United States Patent Application Publication US 2007/0054278 A1 - sequence listing, part 76

SEQ ID NO: 96168 - DNA, 435302 bp, Homo sapiens
  misc_feature (1)...(435302): n = A,T,C or G
ggatcagttgatcccaggagttcgagactgtagtgagctgtgatgatgccactgtactccagcctgggagacagtgcaagaccctgtctcaaaaataaataaataaacaaacaagtaaaataaaataagaaaaataaagagacccagcaggttagtgacttcggcagataacatcaaattggttcagactgcaggttctggagccagacacaaatgggttcaaatcctacctctgctaattactagttgttgggcagagtcagctcttgactggtagaccaggcctgttttactaccactaaatgctctcagtaagattgctaatgtcctgagtcatttttctgatggagaactcagtaaatgagtcatctttccttcccctcttcaccccaatcccaattcccctcccaaagagcacagggcacccaaatatctttttacctgcccagctatgctgcatataccaggggcacccaaggacaaccacctcttgaagaataatttgctgtgactttctacctggcaacctctactggaagtcacatccagtggaggagtctgtgttcatgaataggaaaagggctgtgcttgtgaccggaatgtatgaaaaagagaccatgtgtgacccttagtagctatgtgaccttcggtgccttgtgccttggagtcttttttttttttttttttttttttttaagaaggagtttcactctgtcgcccaggctggagtgcagtggtgcgatctcaattcactgcaatctccatctcccaggttcaagcgattctcctgcctcaacctcctgagtagctgggactacaggcacatgccaccatgcctggctaatttttgtatttttagtagagacggggtttcaccatgttggccaggctggtcttgaactcctggcctcaagtgattcgcctgcctcagactcccaaagtgctgggattacaggcgtcatccaccgtgcctggccatagtcctcattaggaaaaaaaaaaaaaaagcagcattgggggttggtttgatcatcgccaagggcctccacagtttcaagatggcatgcctcaatgatcccaggtaccaggaaacatgacctctctccttagcatccagacatttccctgagacgcttttcccataggcacagactctgacagagtatctgtggagtgaatgatgagacttttgggcactcctggccttgggaagttggcctgacatggtctgacttcagggccatcaaagcactgtcttgagggactgctctgaccagtcacagctgagtgacagagcttaagttggagccagcttccctgtgcaatggtgagtgagcctacaagaaagacatttcctacaggagaggcctggcctcctctggacatggaagctgccctcctatggtgagtgtgagaaggggcacccaatgtgcttcctcttggggtgcagcggtgtggccggcccaggtatgtggaagagctgctccttgttctttcacttagagaagtctttgtcggttctgttagccagggttctctagagggacagaactaataggatagatgtatatataaaggggagtttattttattttattttattttttattttttttgagacggagttttgctcttgttgcctaggctggagtgcagtggaacaatctcagctcactgcaacctccgcctcccaggttcaagtgattttcctgccacagcctcccaagtagctgggattacaggtgtacaccaccatgcctggctaattttttgtatttaatagagctggggtttcaccatgttggtcaggctggtcttgaactcctgacctcaggtgatccacccgtctcggcctcccaaagtgctgggattacaggcatgagccaccgtgcccagactaaaggggagtttattaaggaatattgactcacatgatcacaaggtgaggtttcacaatagacttcaagctgagaagcaaggaagccagtccgagtcccaaagctgaagaacttggagtccgatgttccagggcaggaagcattcagccccaggggaaagatggaggccagaaaactaaaccagtctagtctttccatattctgcctgcttttattctggctgtgctggcagctgattagacggtgcctacccagattgagggtgggtctgccagtccactgactcgaatgttaatctcctttggcaacgccctcacagacacacccaggaacaatactttgcatccttcaatccaatcaagttgatactcagtattaaccatcacagttgatatagctgctatgaagaagtttttcttatcatctgaaactctttgagcagcaaaattctgctcagcatcctaagctgcattgagaattaagcttggcagcatagatggagtaaggctgtcatgatcttatacacgctgtcacagtctctgcatgtatggtgaagttccaggtgcctgacacacgatgtgctccaccctggtgacatgtccaccccagtgcaactccagcctcctgtgcctatgtttagaggcacagtgtcccttccaatgaagggctgccttctttctctattcaaaagaggccatatcagtttgatttatctttctataagtctgatcatgaataacttaaaaccctgaataccagtatttttcaagaaagacaaatccaatttcagggtcagcatcaatttatgagaatagcaagtgcagaggcatcatcagaatcccctatggatctaaaataactgtccgtgcttggccccacacctggagatcctgatggagtagatctagagtgggcataggcatctgtgttttattttctttatttattttttttgggacaaagtctcactctgtcactcaggctggagtgcagcagtgtgaacacttgggttgtcatcatgttgcccaggctggtttcaaattcctgggctctcatcatgttgcccaggctggtttcaaactcctgggctcaagtgatcctcctgccttagcctcccaaagttctgggagtacaggcgtgagccactgcacccagccacatctgtattttaaaaagtcccatagataaaacccacatatccattgcaggagactggatacacaaagtgtggcttatccatgcaatagagagctagctgctcaacaataaaaaataaaaaagctgttgatacatgcaacaacacagaggaatcttctagacatcagggtaagtgaaaaaagccagtcaccaaagaatacatagtgtaaaattccacttatatgaagttcagaaaagggcaaaactaatacatggtattagaaatcaaaattgtagtttacactgaatggggggagtgggattgacaacaaagggacacaagaaaacttcctggtggtgatgaaaatactctgtacctcattttacgtgacggtctatgtggatacacacaatctcaaaagtaacaaactggctgggtgcagtggctcacacctgtaatttcagcctttgggaggccaaggccagaggatttcgtaaagacaagagtttgagaccagcatggacaacatagcaacacccaatggctacaaaaaataaaaaatttgccagatgtggtggcatgtgctaaccaccacaagtcctaactacttgggaagctgaggcagaaggatcacttgagcctaggagttcaagttaatagtgagctacgaccacaccactgcactccagcctgggcaagagtgagaccctgtcaaaaaaacaaaacaaaacaaaacaaaccaacaaaaaaataaaaaaacaccaaaaaaccttcacaaatgaaacccttgagagatatgcattttattgtctataatttataactcatttaaataaaatggcctaacttcccctttagaccccaagccagagtcttgcatgggtgccaaggagtggcctaatcagttcagcccagccatagactcaagaaaggaaacattttcctgttccctgccttatattatacaatcccccattttaatttactttccagcatttccctcacgctttctctgtcttttggattaaaaaaaaaacaaaaacaaaaacccaggaaacccagcatagaacaaccagctcaataatgaatccatttgtctccacacactgtgcccttctcctgtctccatttcagcagccacatccacattcctggaagaagttcccctgcttccaggctacttcaaggtgcatgatgttgattgagcatctactatgtgccagaccttgttgacccctttattaaggctacttccttttcttttcaaaataatcctgagaagtagatgtttttactgccccccatttccagattagtgatcaataaagggaagtaatataatgtccaaaagtgatattttagtttgatccaggtgccatagcaaaacatcatcaacagcagaagtttatttctctcacttcttgaggctgggaggtccaagatgaagcagcagcagactcagtatttggggagggcctagttcctgttcataggccgatgccttcttgattaagtctcacttggtggaaggacctagctgactctctggcatctcttttataagagcacaaatcccattttactctcatgaagccatgaagtcacctcctaaaggccccacctcctaataccatcaccttgggagttaggattttatcctatgaatttgggggtgggaacacacacatttagaccgcagcaggtgacattaggttaagtggaggaggcagggttggaacagtcattgcaaaacctcttagaatttaagacccctttccttccaaggcctgaaaggcagacaggcgttggagatacaggtgaatataaaaggggcagagctcctcccttgaccatgtatttcatgcccagtcgctagaattcaagtcaaccaagccctcacacacccgggccgtcccatgttctctggctcacctcttctggtagcttagaagtggcagcctcagggaggcttctgtttggtagaacttagaaggaagcatgtgggaaatgcagatgtctttgcttttaggattctggctccctgagatcagaggagtgggttcccgtacgggggtggcgaggcacagggagaagcattggagcagactctgtgtgtgtgtgtgtgtgtgtgtgtgtgtgtgtgtgtgtgtcggcgcgcctgtgcgtggagggggataactgtacccagcgcgaggcactgggggaggaggaagcggtagcagagatctgaataattgattcttcagccgcaccagacgcccgggagcgggcggagagcgtggttccaacaccacggacagcagcgcgcgccgccgcaggcgcccccgtcgccagccagccacctatcctggccttatttgccgccgtgcgctctcggaacgggtggccgcgctccgcgtcgccgccgagggactgcggggtctgtctcgacccacctaggagagaggctgcgggcaggagacgctttcgcccgccggagctcgaagcctcttgggcttgagcgggggctactgcgtctcgccggctgagaacaagtccctaagttggtgtggagggcgccgctaccttccttctcctcttcctcggaggcgaccgcagcagaaagacgccccgggaacccggctttgccagtgctgtgaaccagggtgtccaggcgctcaccggactcccgctgggaagtggggagccgaacgcccggcgcggagctggcccagcagcgaagggcccggagggagctgcctttccccgcccgcgcctctctcggccggggaccgcggggatccccggccacacgcgagcgcgctcccacactcacacacacactcgccctcaaacacaccagcccggagctgggttgcggagagggtgctccggcgcgctcagaggaccgggcagttgccgtccggagtggggcaggaagcggagctagggatcttggaggggagctcctagggcttggccggatcatgggaccgggtgagcgctgagaatcgcggccgcagccatcagccctggagatgaccaggagcggccactgctgagaactatgtggagagaggctgcggtgagtgctagcgcgggacgccgggcctgggaggcccccttgggaagggggaggtgggaggcctgaagagggaggaagcggcaggatcacaagagggtcgctgcgtgggaaagatccacctccctcggggaaccgggaccgcgggagcccgcgtccttccctccccmtctcctactgctggctcgtcacaaactcagccagcgcccccccaccctcgttacctcctctttctctccctacctccctcgctcagcagctcccggtcgcacaactcccagcagccggcgctggggaggtggtagggggtgcgggtggaggtgcccagttagcttctcgtgggtggccaacctggggctcccattctcctgtgcaccctggagtggagctcccgctatcagccacaggggctgaggatccgcactgggggcgtcgtgggcatcgggmttcagcttcccccctcttgtctagcccccctgggcgcataggggggcttgtgagcamtgcagactgcagccttcccctcaaccctccctcccctcgttggtgggctgaccctgcctctccttctctcctccgccccgttagagccctgctgcagagcctccggctgggatagccgccccccgtgggggcgatgcggacagcgcgggacagccaggggagcgcgctggggccgcagcatgcgggaacccgctaaacccggtggctgctgaggcggccgagatgctcgtgcgcgcagcgcgccccactgcatcctcgaccttctcgggctacaggtacgtcccagagggagatcagggctccttgggccrgggaggagggagactcgaccggagggagagcgggagagggatcaggctagagagggagagggaaagcgggagggagcccagcggcgaagtgcaggaggggcaccagggggcgctgcggctccgcgctccgcggcgcttacccaggaacgtcgaggcctcttggagttcgcctcaacttcccccggctccagcagcgtccgtcccgagaggcgcgcgtcaggrcacgcgtgcacgaccgtgctggtatttgcaggtacgcagggctgtgcacctgccgcagttcatgcgtgtgcaccacctgaggacatgtgaggactccggctggccgtgggcaccgctacagcagtctgaggaagtrcgcagaaaagcgcgcgtgcctatgagcgtgtgcggcccactgcccacgtgcacctaggacttggcaacagcgcccgcagtagaaaggctagggaggggctgtacagtccacgtccgtctgggagcttcttgggagcctacctttccccctacgcacgttctttgccagctcctacgcgctggcccgcggggggacgcgcctactctccagaattcagcattgcacacggcgcgcgtgagagagggtgtgtgtgtgtgaacatgtgtgtgtgcgtgtgtgtgtgcacgtgtgtgtgcacgcgcgcgtgtaggggtgggtgaaggactctccacggccccttggctcgaggtggggcgagccccaagttccccaggcacagcggagcctgggcccaccaggcagcgtcctcactcccaagcacttggggtgtactctgactgagaggagccgggtctgtagttggggctgggcgtagagcaaagtgtgtggtgcacacgacgggctcgtagggggcggggtcagccaactagctgagctctcaagctgggacgcggggtctgggtgccgcctccgcacgccctgcggggtctgtagttcgctccgcgccagcagggggcggggttgataacttggtcctctctatcccaggtgggaggggttggatggagggtttattctgtgcacctaggagcttggtggggtacagaacacgcgcggcgcttagggtctgtggcccgcggcgaacttggggaatgcggtgggggatatggacagagatggggatggggaagtgcctggagacaggggatgaggaagctggatgcgagaaggggctgggggatggagaattagctcgaattggagttgtggatagagttagagatggatcgagggatgtggatggcgtcggggactcggaatggagtccgtgatcccagcagcctatcctgctgctgagttccatgcctggctcctagagcaggaagccaagttggtaatccctttcttctggtcgccttgctcaccgcggccctgcctctcactcttcaccttgcagggaccgtcagtggcgactatgggcagagtgggctattggaccctgctggtgctgccggcccttctggtctggcgcggtccggcgccgagcgcggcggcggagaagggtccccccgcgctaaatattgcggtgatgctgggtcacagccacgacgtgacagagcgcgaacttcgaacactgtggggccccgagcaggcggcggggctgcccctggacgtgaacgtggtagctctgctgatgaaccgcaccgaccccaagagcctcatcacgcacgtgtgcgacctcatgtccggggcacgcatccacggcctcgtgtttggggacgacacggaccaggaggccgtagcccagatgctggattttatctcctcccacaccttcgtccccatcttgggcattcatgggggcgcatctatgatcatggctgacaaggtaaggccggaaactgatgccctgccaggacctgggaagccaccagctgcatggcagctgctgcaggtcttcggacgcccctagaatctgtcttgatgtgaagtgggggtgggggtgggagggtcgtggccactggccctggtgagaaccaggtcttgcctctccaacccagaaatgaatggaaatgccttttgccttgtttctgaaaatggtgtacacaggagcactttggtgtgtgtgtgccaggaagcgctcagaaaactgagaagtaggctgtggggtggtggtggtggcggtggtggcatgtttggagatttacgagtaccatggggcacagaggtgggcccaggagcactggagacatatgcttcctattttcacaatgccagttttacctgattgttttgtgggaaaatgtccattttttcctcttatggtaagtgactaaaactatttctaaaaattattaaatgtgggtaggttctgraagaaaatgcaaagtttttaggtaaagcacaaaagggcagaaaaaatgtcatgcttcctctgactctgcagytagaggaacagaggtggggagtttgagaagccctgggccagaggagcggaggagagacccgttcctcaaggggagtgggtgggagtggaaagaattaactccaaacccagagcatggagggcctggcattttccttacgtgttctttgtctggggctccaaggccctcagatgaaggagttggctcctgaacaaagatgggtcttggtactaaagttggagagtctcaaaatgcaagaaagagtgtacaaaaatcagttggctctgaatgagagggagggtcttttttgtggacagcctgggagctttggtttggagwagaagggagagagatttgaagatttgaaggcgatgttatgacagcctggtttgggaattacacagaagtggagggaaggaagaaggctggaatgaagaagtaaagtgaggaatgagaaaaaagggaaagattggagttgtgtgtgtactgtcctctaagtcctgagaaaagattgggagttcagaaggcgaggaaagagtaagtgtacttgtgtgccatagcctctagccctgagaccttcttggagagtgttccttagatggcaggagatattctagtggagtgagcagacattcactgtagcgctttccttttgatgctctcaaagcacttttatattcatcacatcagcttttgcttctgtttcagcgattcctaccagctcctttggtaaccgtattaattctttcaggtctcctgggctgcagcacattcagctgtagcacacaattgatgcagtgtcttattaaacattcattttaaatgatttgcaggctagcagaattcctgtgtgtagctgagcattttcccagtcacttctcagttttggggggctcctgtctgggaagaagagagtagggactagccatgctctgccaccactgacaatttcagaactggagagcatcttagggtttcttggagcatgctgtaactttcagatgaagtgactgagccataggggagttaagggaatttgccaagaccacatagtggctgatgtagctaggtagctgaatttctgatcccaagstgtgatcttccattccactaaatcaagcccatactttaatgatgtcatccatcttcaggagggacaagggatcagtttcattttgtgggaggggctgagcatggagagctatgatgaatcacagcctagagggcttttgtatgggaggggccaatcttctaaagaaggcattgagggagaagaacagccagtttccagccacgccttggagtatgattttgggatttaaatattaccacggatcccttcttccttcttgagtttttctaaaggagtgatagactggaaacagtaaccatactgaaagtgaaatttctggatccatgagsgtttggcacaacccaatggagaaatctgggaaaagctgaattggaaaaggtggtgtgagactgggaggttccgggtaggctttggctcttacttctaagtctcagtcgataggtgtgtggctcaggctgtcatgtgactcattcatccgaacgtaggcagagagaagccggaagagtgtagggtcatggaagggaacccccttgataggcagtgaccctgcctgctagtgaatcttgacccagtgaatggcaggttgtgaccaactagaccagcaactgttcttcccttgaagggggcattagaaagaaagttttgagaagtccagggagtatgggtggaaacattcttctctcctttgggatgaaactgcgttttggggatgtggaccaaaatgtgacctcacttaagagtaagaagagaaaaggaatcaggaaagggcaagaggaagatgagaaaagacatttccagagaaataaagaatagagacttaagaggggttkgagagaagaagaatgaaagggtccattggttcaaaaatggaggaggggattcgatactcctgattgttgttgggactttcagagttggtcttggagacattggccactctctgtgattctggtggaactgtagggagatgaggcaagktggcagggaagcaaagagctcagtggaggtaacatcggggtatatgtctggtccccatgtggaacggtgatattgagaggakttgggtgataccaagagaagttggtttaaaaggtcgtattttgagaaactggggatgtatttagaaaggagattgtctgagaggtgaacagcccttccttccattagtaacatatatagatggcttgtgcttctgccacatgtttcatttagagctgaacattgagtttatttgtctccaaagaaacagtcacggtgcattgtttaaaactctgccttgcctcgcttgcaaatggtattatgactacagcctcaaccttcctagattgacaaggcctctgcctcctgttaaaatgatgttgatttggtaaagtcatccagaacacacgtgtgttatatttacttctacattggcaacatgatagtgcccctgctggtaagaatagtagtcaatttggttatcagttaaaatgaacacacacacacacatttttttaactttttttatttttatttttatttttactttaagttctagggtatatgtgcacaacgtgyaggtttgttacatatgtatacatgtgccatgttggtgtgctgcacccattaactcgtcatttacattaggtatatctcctagtgctatccatcccccctccccccaccccatgacaggccccagtgtgtgatgttccccttcctgtgtccaagtgttctcattgttcaattcccacctatgagtgagaacatgcggtgtttggttttttgtccttgcgttagtttgctgagaatgatggtttccagcttcatccgtgtccctacaaaggacatgaactcatccttttttatggctgcatagtattccatggtgtgtatgtgccacattttccttctgtctgtctacttgaccgttgaagaaaataacaaagccttataacaattgaaatgtcatgcaaatgtggtggatttttgtggtgttaatttaatttacaatggaggtgctaatgttttgctcgcatcattgggtagtcttgcaatataactaaattagaggtgaaaataaggctgagcgaggtggttcacacctgtaatcctagcactttgggaggccaaggcgggtggatcacctgaggtcaggagttcaagaccagcctggccaacatgctkaaaccccatctctacaaaaatacaaaaatcagctggatgtggtggcaggcccctgtaatcccagctactcaggaggctgaggcagggagaattgcatgaacctgggaggtggaggtkgcagcaagccaacatcatgccactgcgctctagcctgggtgacagagtgagactttgtctcaaaaaaaaaaaaaaaaaaagaaggaaaattaaaatcaataaataagaggtgaaaataatgctcgatgtagatgaagttctaatcttatcttggcttggccattttgaccctgtctaagtgaaatacactccagctgcagtaatagtccctggtaagcccagaatatgggctagatctttacacttctgctcagtgtccttaaccctctcaccccccatcacttctccccatattcctaattgctccatgcaggaaaagacgaggctcagattttagctatatccatccatgccagttatcacttgggtttcgttttctatgttattcctatgcaagcctcatgtcttctgccagagtgtaagtcgtttgagggcagatttttwaaaaaactgtttatctgtatatgtgtatttgacatgacaaatgcttctctcctccgcagacatataaaaataatgccttttcattgtagagcacttaggaaatacattgaaatttaaagaagataaaaatctctctccaaatcctatcaccatgggtaaacattactgacactttggtgtatttccttttatctatttagttgcatgctcaggattttatagtatatatggtttttcttattgtgctttgccctctgtggactttcttagaggattcaagattttctttaattctggaraaaatctcagccgctatctgttggattctttctttccatcattctttctattctctccttctgaatatacatgcatatgtatagtcatgcgttgcttcatggtgggacacgttctgagaaatggatcgttaggtgatttaatcgtgtgaacatcacagagtgcacttacacaaacctaggtggtatagtctgttacacacctaggctatgagctataggctcttgctcctaggctacaagcctctacagcatactctactgtatgaatgctatactaaatattgtaagcaactgtaatacattggtgagtatttgtgtatctaaacatatctaagcacagaaaaggtacagcaaaaacttagaatataatcttatgggaccagcattgtgtacttgtggtccattgttgacctaaacctccttatgcagcacatgactgtactatatatatatrtgtaatttctcartcaattctccatgtatcttgtttttttttttttccagttctctgtttgtgctgtgtttgggaaggtttcttcaattctatactccagttaactacatcatttcatttgtgtctggtctattattttattttagaaagaaacagcatggatggtctattattttgactatctgttgagttatagatttcaacaaggatatactttatttccaagataataattggttcctctttacacctccctgtttttttgtgttataaataatgaaaaactcttctcactttktgcatgtaactccctcccctgtcccttcaaagaytaaaaaatatgtattataaagttcttctctgattgctctagcatctttccttcttcagttgtgaagtccttcatttgtagartcagttagttggatgttcacatatgttctttaatttttgtttgtgaacttattttcaaggcaactttatgatttcttatgccctgtrtctgtgagggtgtgtattttaagccagagcccatgtcagcagctcaggtttgtactctcttcccattctacgtggcctgtggtacaggcttaggagtccatctcatgtaggtgacttcattttggctccttgacacagatagggtcctgctttttggctgtgactaatggtggatggtgcagatgttccagcaccatccacagctagcagcctgattctaggtccagttcttcccctttttccctggatggacattgacacctctgttctcatggctcatattggacctatcctccatggattatgtggctttgattcctacttgaaaccctagagtcccgtctttcagttcatttatttttagggattactctctatttttgatctgtgattctcttttcttatttgcaagcaatactatgtaaatttaaaaataactaaaggtttctttawaaattctatgtcttaggagcagaaaaggaaggttactgagtgtgttcactcggattttgaccccgttttatttcacaacctgcttttatatatttttttaaacttgattatgtattcttggaattttcctttatcactacatagacttcttaaacttgattttcaatggctgcagagtgttcagttcataccacaattattttaacaatttctctctttttccaccattaataatattcatttgtgctccataggggcatccttttcagtacctcacacttgtcctgccctttgcgtttgttacacggtaaatgtttgttgattgaatgaatctagtcattggctccgatgccagcttgttggagcttccggatgaacatatcacaatatggttcagggcattcgtgcagtgtttgttccctcaatgctgastgatttcataggtgtttgccaatttttctcttctctctagtgggcagataattaccagccatcctgaggattagcataaattggggggttacatacgaaaggcctgtagagaactgctgagtaacagctcatcagcaggaggtggaagttggtgctcttgtaacctggcagctccagagtttggatgcgagtgatgggccttcccattaaacactgagagctctcgaaaagggcagaygcacagatcggaatgttggtggagcccactcagctcctgctaaagaggcatcaggtagttcctgggagagtggggagacctatctttagtcttttccatgaggcatgtcagatgcgatcatcaacacctcctcacttaagtcatcagagaccaacaggcgtcctcccggtagcgtgactcacactccaagtagccctcaggggttgctgacaatcgtttgggccctgaagagctgtgrtctggtgggtttgcagcggtgtttatcttctttctcatagcctcagatggaaaatgctactgtaggcagagtgagtggggaaagagagagaaagagggctgtgcagaagagaaacaggaactgaatctctggtttgtaatagagagttggtagcctctgataagtcatcacataaatgagacattataaggttattaattggtgtcttttgtttgtcctgcatcccccacccttgatctttcaacttctaattctttgccaacattttaaagttggaagacatcccattgaaaagaaaatccaaacttcatgctgctttgaaacagtcagaaggcctggccatactggccccgattccccctatggcaacagttggctggagatgaatctcatcccccaaccccacctgccacgatccctgccctcccactgccatcctgggacaggacaggtgcccctcctttcttaaattccccaaagtcacttcacttcacttcacttcactcatttatgttacatacacagtatcctgaaggcacttggctgtgaggcctatgatgtaggtgagggaagtagctcttccaggggctgctcctggataagacggcagatctatggcatgtatgcaaccatggatgccatgttcactgctgccatcattaatctcctataacacctggccctgttgagcccactggccttaaggccttctcaacacagtactccaggcagccatgatgaatcaacttgagttggaagatccaagraaaccttggacaaagagtctgaagaatgaaattcaattttcaaaaatacctgtgtgaccttagaaaaggcccttcacctgtctgaacctctggttctcctgcaaaatgaggatttgggacaaaattatcactaagatctcttccagctctgaaaattttgtgcctcatcaaggaaagactggcaacaaacataccaaaatatgaatagcagttatctttggggtggtagactcatggctgctttaatcttttaaagaatgtcattatcaagtggttaatrtattgtactttgagttagattgcctgaatttaaattcagggattccacctcttactggctgggtgatcatggggaagttcttaatatcttgagcctcaatgtcttcatctctaaaatgggaacaataatagcatccactttgtagagttgtgagatttaaatgacatcatggatattagtccatgtctcagtgcctaccttataataaatgcttattacaggaatgctattgttattgygtctgcattttttagtttttatttttctccagtgtacatgtactttttaataaccagaaagagtgattaaggatgatgtggttacatgagggtatgctctgaaagaaactgggagtgaatcccacagaactgtcagaagtggagggtctaacatgaaatgatttgtattttcttaactgagacaatcagaagcttcctttgcctttgtaggacttgctgagagctktatcctggcaaacggaagctaaatgtggccagcatgaaagtgatcgyaggagaagactatctcattgacctttgcactaaatgactccaccaactggaccatatgtttgcacgaggcttagggatttagagtgtggacatatatagtttctcattttatctctgccaaggattaataactcagtgatagcctgggraacctggcagctccaamggtatttgtttaaagaatctctattttcagatgaggaaataaaggatctgggagttgcagtaatttgtgcattgttcaaagctgtaactagaacctagggctttgggttcttattcttttgctcttattttattaccctttcaagttaatgactacgaatacatttgatttagggaaggggctcagatgcaagacaaataacagattttgatgttcatattttggttgtcttgactaaaaggattaagatgttggatgatggaattaaaattcaaaacttcagattgaagtgatggagtcactctaaagactgcactggaggttccccccataccgcactcagctttaatgaggttaactgacaaagaaaaattgtatatattaaaggtgtacaacacaatttttttttttttttttttaaagaaaacagtgtttcactctgttgcccaggctggagtgcagtggcatgatcatagttcactgcagcctcaacctcctgggcttaggtgatcctctcatctcagcctcccaagtagctaggaacacaggcgtgtgccaygatatccggctaatttttaaatttttggtagagacgggggtctcaccatgttgcccaggctggtcttgaactcctggactcaagcaatcctcttcccttggcctcccaaagtgctggtattacaggcataagccaccgtccccagccccaaatgatattctgatatacaagtaaatgtgagatgattgtcaccatcaaactaattaacatatccattacctcacatggttacatttattgtgtgatgagattacttaagatgtggtatcttagcaaattgcctgtatacaatatatttttgtattgtcaccatgctatcaccagtcaccatgctatacattaggtctctagaacctatttaccttacaagtggaagttggtgccttttgaccaacctctctcaatagtttgaagaagaattttcactattgcagaaagggggatgtgagactttgcaactcacttagtcataatgtggctgcctctgttccaactatcacatccaactcacttgggaatggtttttgcaagggtcatgaaccggtgtactgcacgctgaatctggctcatagatgcattttgtttcaccagtacagcatttttaaatgcttgaattttaatgtctttagacagcatgcattttcaaawtcactacagctgtccccactctgttatcccatatctagggtgattcatacatttatgttaatgatatggtttctgtgagtatttgagatcatggtgctcaaatacagactttttatttgtttgtttgtttattttgtattgaccagaagctcagcagatcctaagtggggatatgtggaggccacatatctagaaatatatgtggaggccacatacgttgtggccttataaaaagtggaggccacatttatagaaatataatgtttaaatcaagggaggtgatagctccattatacctcttctgttgtttggagtgctttcaggtgcaagtaacagagtctttgaccaacagtgtcttaaaccattaaagacattcagttttttgcttagtaaggagcctcagatctagcttagtgacttaatgtcacattgaggactcagatccttcccattcttctactttgccttcctcagctgctggtttatctgagtcacaatatggctgcttctgttccagccatcacaccttcacctcctagcattcaaaactggaaaaaaagggagagaaaaataagccttcttctagggcctctatcctttcattggagtagacttcctcttacatgtcagtggccagaactgggtcacattcccactgctcaaacaacaatgatagagatccaggattcctctctgagaatgggtaattgccactgagcaaaattgcttctgttagcaagggtgtggggtgatgcttcagtggtacaactggtgatgtctccagcaacactaacaccattatatgtagcattgcacttagttccgaggagtgatatctaaagatggacgttgaaaaattgcaatgcatgcagaaaaagggcctttaggattgcgtagactctaaatgaaatatattaagagtttcagaagaagtatttagggatgtttagcctggagaagggaaatctcagaggggatatgggagaagtgttcagatactccatgggctgttacaaggtagaaggttaagtcttaattttgttattgttctggggacagacataagagtgaaattattattattattattattattattattattattattattattgttattatttgagacagagttttgctcttgtcgcccaggctggagttcaatggcacgatcttggtttactgcaacctctgccgcctgggttcaagtgatgctcctgcctcagcctcctgagtagctgggattacaggcacctgccaccaccatcagctaactttgtatttttagtagagatggggttttaccatgttggccaggctggtcttgaactcctgacctcaggtgatccacccgctttggcctcctaaagtgctggactacaggcgttagccacggcacctggccaagagtgaaactataaggagtaaagtttcatcttgatatgaggaataagcttcggcaattaggtctctaacagaagactgtgaggattcatggaataggaaggctatatcaggatatgattgagctaacagtgactgtctgtccctcaggaatgaggtggaaaattgggcttgcaaggttgggttgggtcacctctgaggctctttcttattcaaacactctgtacctctcaaatccttgatttttaaaaaaagatctccaagccttggtgctttaggccaagcatttggctgaaaaccaacatcctcactttttccaagtgtgtgagtaattcagtataaatttgcctggcatggaggaggaatttataatccctgcatcatcacctcaagttcccaaaagactttacattatcctgaaggtagaagatatttgaaaagcagacaacctatgtatatatcaactcacacacacatatataaataaaaacataagtaggtcagccggcctcatatttactagtgaaaatgtttttggctaagaagctcatctacagaagacaatgtttagaataattgccaatgatctcgaaatggggtgtttttgcacttgtatcaggttaatcattattacttaataaagtatattcagcttgttttgcacatcttactgtagtaatatgtttgtattctaaagagccagccagactcctctctggtttttcagttgrcaaattattctttttagtcagttgtattctcctgcatttggaacatctgcttatggcagaaaatactctagatactattctgttgtttatccacttctcctattcccccacatccccccaaagaaaaacgaacctgaaattgctttccaaatgctttcactttctgttcaaattttggaactttccatgggatggcaattgatatattgtctccattttttaaactttgaaatagatgttgatgtacagagcgaaaaaacctaaataatacaatagagcattcagagaaagaatatttgctccattaatgcatcgtagatcttcgaactcaggttcccttccatggaggtggctatgttacccatttcaggagggaaaatattaattggaatggaaatttctttctgtttgtgatttttttttgctgaagtcggcatatggaaaggatcttctcttaaactacaatccctgacttgaaaactacaatccctgacttgaaaaagsttaattgtttccattggtccctaacagtgactcttttgccaaaacaaaaataaactcactctaaaatgtaagttgtgatttccaaaaatcactgacaccttgaagcttggctcacaaactcactcaaagaatttaagataatttggggtgattttggggggagttggggaccactttaaaatctaatgaaggctacggacccttccagaggagtgcgtgttcataaacatgcagtyaaaattatgtgcaatttcaggggatcacagaccctctgaaaccctttcatagacttccttggatttgatttatttattggtttattaaacasagttgatccttgaataatgcaggcgctasttgcattaacccccatgcagtttaaaatccatgtataacttttgattcccataaactatagcccactgttgatcagaagccttaccaataacatagacagtcaattaatacaaattttctatgctatatgtattatatagtagattcttaagtaagccatagaaaagaagatcataaggaaaatcgtaaggaagaaaatatgtttgctattcaagtggatgtgggtcatcataaaggtcttcatccttgtctttacattgaggaggctgaggaggaggaggaagaggaggggttggtcttgctgcctcaggggttggcagagggagaagaaatttgcgtataggtagacgcatgcagtgtgttgttcacaggtcaaatgtatgttcattcttcatacatttcttggctttgtccttggaccaaaatgctttgtggatgcatctgttatcaatttgtttcagaatctagctggagagactcataatgcaagtgcagtatgattgtattcacgggaccatgggaatgcagaggagggayagcttcatccacaggtctgagggtagggatctggggtcaaattggagagctggtctggaagaggcttgtgtcctgggtgcctgccmctacaggttgtcatcccccacagctgaagatgagctgtagagggaaggctggctcatggaggagcagaattgagttcacaatctaagccttcctctcctcttaacctgttcctcaaggctgccagtcttgagtggtcttgaaagcttccaaattctcctctggatggcatttcttaccatcaaacattgagctttttgcagatttccgttttgttgtcacaaatggctgaatgtctcctgctctatcttgtctcttcaaattaggaatacctgcccaggaagagtgagtggcatttgaaatccatatcgtcttgctagtctgctgtcctaggggtgaaagaaaaagacatattttcctggcgaattgttttaatgctaagatatctgtaggactgaggaaatgtagtattaactgacttgggtgagtagactcagaacgatgtgaagaagctgtggagctgtggaaaaaggcaggcttgctgtagttctggtgttagggtgtgtgcatggcttccatgaatgggattttgaaaatggcaggccttgggtgaagaccttcatggtcaaatttgcactttagttaaaaacaaatttgctattggttttgccttggttaattgatactagtttttcctcttctcttctcctctcttctttttctcttccctcccctcccttctccactcctctcttctcttctcctctcccctcccctcctttctcccctcccctcctttctcccctcccctcctttctcccctcccctcccctcccctctcctcttctctctctctctgtctctgtctctctcctgtttagcagcattgaaagaaatatttttatcatggacccactgctggatcattttaaagcaaatccaagacatcattgtgttcatcagtaaatatgtcagtatatatatatacatatatatatatatatgtatatatatatcaaaaatataagaactttaagaactgttgaaaaaaatcacagctaatatacaagtaatctatacatatgtattttagaggattttgtgagaatcagggcagtataaagaaaataaaaatcacctttactctcagcatccacagacaactgctattaacattttggtttatttccctctagtctgttttcctataccttatttacaaatacacactatataattttatagatagcttttaatttgcttaacattttatcatgaggctttcagattacttgtaaacatttttatcttctatgttttctattctgtggatatctcatgatttacttgataatttagattttccccaattttttgccatgaaaaccaataccttgtttaacatctttgtaatgaaatgtctacatcacagattattggcttttaatagaatccattactgaaattaaagaattttaaaactatcaatacagaaccaattaaggttccgttaatttgttcccagaaagattgaatcactggacacttctaataactatgtcttaaagtatctctgtcacttaactctggctggctcttgaaacagaaatttttctgattggctagacaaaaatattaactcattgttataatttgcatctcttttaagacacctgccatggaatatattttaatttaagcatcgcttttatattccctaggtattgcatattttaactgctttgatatttctcattgtgtaaatggaaaacctcagacaatgatggcttccaatataacatacagtggagtaatttgaatttctaaaaaataataaatattttgaagcctggcggggagttctatgattattcattcttcatcaccaggcattgctcacccattgtctctgtatcagtgttgtttcaatcattgctttaatatgtaaaatttctcagcagaaaatcattctgtgggaccccactgttatgatttgccaggagtctaggtagagactcacgtccaattgggctggagtcatgttcgtgtcccaggctttgtggggaacggtagggatgggaagcccttgtttgttcctttctctaaaaaagcagaggcagggtgaggttttgcggggtccgtcccgcagaccctgacccaatgacagatgaataaagttccctgacgcacagatattctgctttgccagtctagctgagtgtccgtgccacttacagacaccaaggaaggttctgtacagagtcagtggccacggcctcgacttgccagtgagactcacatttattcagtaaatattaattgacaaaggttgtgagtaaacacattggtgggtaattaacctggttgcccctaccccggagagagccatcatgcactcaagaatgatcaaatattggtcttaagaccacgtgagtaaacaagctagttagataaactgctctgccttcctttgtacccacttcaagctatttacttaaggtaaggattaggttgccttaagccataaacttattctcagacttttgcaaaaaccttcaggccttccaagaaggtttgtggctattctctataaccaaaatttttcccaccagtctgattgaatccccacaaggttgtaacaagaactgccttgtgataggaaagggatattgcccaggtggcagggggcagtaaaatgagttttaaacaaaagtgggagagatttatgtttgatattaacagctgtgaggaatactcaaaatatttaaccactacagcattatcacagctgaatcagaatagacactcactttgtagaattctggagcacctgttatgtgaggtgttaatcctttagtrgctggttatggggaggtagggggttcccaagggaggggctgagtggcagggggcacttggggttcctggaagatgtggctattcacaagcaaaacggaagcatttcagcctttaaataaccagttctgctgcaccagtgcacaccagccaggatatcagcgagatctcacgtgtcatttatgccaacgtgtatgcagaagttttctcagggaactgtttagaaaaggacacaggatggctgtctcctctgccatatattaaccatgccctgaaaaagggaggtagggctgagagcattttgaagatctctttcctaaaatatgaaaacagaaatgtgcttccttctaaccttccaccttctgagcctggtgctttggcttgtctcttgtgggttaattttctagctgtctatcataagcctgcctttctcccatgaaaagcacaggagctgaagccagctgtccatgccaccgcccactccccactcccatgttccctgtcttctagggcaagagattcccaaacaattcctgttttcattggggttgaatgaagagggctgttttagtctctggttttggggtgtgatgtgctcatttgcagaagcataaaaataatcttttaactcaccaaaaaatactccacagcctaaattaactttgttaaagatcaactttcaaaagagagccttggatgtgccttcgtgggatcatgtgcttagtttacttgtagagtctgtggcttccttccctcctccgaaataggaaatcctccatccctgtcctggttcatggaggttttcaaatgggcttcaggagaaagaagcacgtctctggtttcatccgagggtaggagaaccctctgatatgttgtttattgttgagaatgcactgaattgtatctccctaaaagtcatatattgggtcctaacccctagtatctctgaatgtgacactttggagctggagtctttaagagtaattatggtaaaatgagggcatataggtaagccttaacccaacatgactggtgtccttataagaacaggaaattaagacacaacataaacacacaaagggaggaccatgtgaagacacagggagaggatggccatctgtatgccaaggagacagttttcagaggagcaatcctgcagctcccttgtcttagacttctagctttgagaactgtgaacaaattacatttctgttgtttaaaccatctttgctgtaataaagactgtgatcctttgttacagcagcctgggaaaatgaatacagagaggttgggaggtagttagagcttaattccaaggcttctcctcactcctcttctgtaactgagcctcagtggagtcaagacacctcagctcagaaccsagacctccacctgctctaacactgactttgttcttctcatgtgggctccctttctggacactaggctcctgctttgaggaactgagtccctgtcttagaatccttcctaaaacccttctaggacttctaggttcaatgcttctcaggaatttttactcaaatagtcctagggggtgtggtaggcagaatcatgtccccaccaccccctcttccccacccaaagayatccacattctaattcctggaacctgtgaatactaaccttatatggctaaagggactttgcaaatataattaaattaaggatcttgaaatggagagactgttctggattagcctaggtgagtccaatttataatcattccttatgaaagggaggcagggaggtgagagtcagagaagcagatgtggcaacagaagcagagattggagtgatgcactttgaagatggaggaaggggctgtaatccaaggaatgccagcatcctccagaagctggagaaggcaaggagataggtcctcctctagggcctctggaaggaatgccaccctgccagctgcttgacccacttcagactttggacctctggagccataagagaaagaatctgtgctgcttagagccactaaattggtggtaatttgttagaacagcaataggaagccaatacagggacagcgtctgataaacacacgctctgcacatcaggctgtgccctttgtggccttttctctgaatttgatcttaaaaattcatgcagattttggttcctacctcataatgtaactatgttggtactaaggcgaaataatttaaaatgacttaaaagataagtgtgtccatttttcccttcatcaaatagttaagttgtattagttcgttctcacactgctaatgaagacrtacccaagwctgggtaatttataaaggaaaaaggtttaattgactcacagttcagtgtggctgggaggcctccggaaatttacaatcatggcagaaggggaagccaacatgtacttcttcatatggcagcagcaaggagaagtgtgagcaaaagggggaaaagcccctaataagaccatcagatcttgtgagaactcactcactatcatgagaacagcatgggggtaaccattctcatgattaaattacctcccaccaggtccctcccacaacacgtgaggatgatgggaactacaattcaagatgagatttrtgtggggacacagccaaaccatatcacaagtaaaagcaatgctctaggaagttctactgtatttgtgctctgcacgtgtgttctgctgggctgtgtgtgcctctgtttgagaaccctggggtggtatgcactttgaaacccgaaaccccaaaacctggctccacgaacgtgcctctgcgaaattcttcccaagcaaagtttccttatcatttttgtgcctggaggggagaagagacaagaaattcaggatagctggagaatacagaaggaggaagagcaaattaacagtgagctttctgttcgattgagcatttgtccacaatatattgagatcaagttttgtttcttaaacaaatctgttaacttttacggtcaatttggggcggtgcaaccggttagaagaattcattaaaacagccaaaatctctggctccgctgaatgtgggaaagtctctgatgccctccaagcagttgtatgaaaaagatgaatcatcaacaatgcagagatgacatgagagatgcagatggggctttgatccttcttgttaccaaaatcctacttagaatgtgttgtcatgaggtccccacttcatgctgccatatcgtggttcctaaagccaggtctggggtacttgctggggtggaatttagaagctagaaacgaacttgctcaagtctacawcccatccacagttcacatgcccttggtccacgcccacttgtgctgtgtgctcctgttctcttggtttggggagaccatatcccgcttgtattgatgacttcatcattctatacttccagcactcagaacattgttttgagggagagtaggtacttagtagatgttcaaacaaaatagtgagttaggagaaggggctaggtccaggattgtattagtttactacagctgctgtaataaattatcatcacaaacatggtggctgaaggaaacgcacttttaccctcttacagccctggagggcagaagtctgaaatcaggttccctgcaccaaaatgaaggtgtcagcaaagctgtgctccctctggagactctggggaagartctgtttcctttcctttactagcttccagaactgcattccttgacttgcggcaaactctgaaattcagtttctcctgcaagtaagaaagttgggctaaatgctcttacagctttaatatctggccttctttgggtgggttccacataatgagaacgatagtttgtattgcaaaaatgtggagctttgagttaggcgatctgggatggaatttgagctttcatattctctctcacaaagaataatatatttgtgtatcatttagctatctataaaataatatatattatctatctaaaataatacctttatagtgtatcttcttccttcctctctcccttctggaccttacctttcctcatctgtaaaatgggattgggctaaggtccactccttgacagactccgctgcttsttggaagtcaggagtcactccagcctcattgatgatgatctgccttttgcatgcttgggggacctacacctctgtacaggcgagagccctccaagcatcccatcagctcctcttctctagatatagtccttagtagttggagctttgcagatgcctccacaatctacagttgtagcctcaacctcttgccctgggttcctgacctgttyccctaggtgcttggtgggcttctctccttgacatggccatgggtgcctcayactgaacctgcccaggcctgtcctctttgattcatgcttattctggatttcttctctctgtcaatggtattcctgttgtccaagccttccttgcttggaaggaacayganggacggatgtatattgagctccctgatgtgcaggcagagtgttgcaggcagggatccgaggaccaccaccctcattgtagagaggaggaaagtgaagcccagggaatcacagaagcttatttttggtgacactgctggtaggcaggtaacagagctgggccctgractcaggtctcctgactccacaacctctgtttttttgatcagaagaatttcttaagttttgttyccttccatggcaccttcacaacattttggccactttgactaattttttattgtgatataatacacataacatagaatctgccattctaaacattttaaagtgaacaattcagtggcgtttagtacgttcacaatgttgtgtgaccagcacctccatctaggtccagaacatcatcactccaaaaggagaccagtaaccatcaagcagttacgatctatttccccacccctccagctcctggaaacctttaatctgctttctgtatctgtggatttactcrttctagatgggatgggatcgtctgttatgtgaccttttgcatctggcatctttcacttagcataatgttttcaaggtccatccatgtcgtagcatgaatcagtactttattccttttcatggytgaataatattccattgtatggatatactatatttaatttatctattcaaccattgatgggcatttgtgctgtttccatctgttagctattgtgaatggtgctgctataaacatttatgtacaagtttttgtttgaacacctgttttcaattcttttggatttatacccaagagtgaaactgctgggtcacatggtaatactatgcttgacttattgaggatagatatccccctactcccaccaccagaatacttttctttacatcttaaaataaaatgatgccagatacagtggctcacgcctgtaatcctagcactttgggaggctgagacgggtggatctcttgagcccaggagtctgggactagcctcggcaatatggtggaatcctgtctctacaaaaaatatgaaaattagccgggtgtgttggcacatgcctgtggtcccagctgctcgagaggctgaagtagtaggatcacctgagcccaggaggttgaggctgcagtgggctgtgattgggccactgtactccagccttggtgacagagtgagatcctgtctcaaaaaataaataaataaataaataaaaataaatatagtttaaaagagaatggtatatcactgccaataatgaaaaccagtttcacttaygataagcagaagataacagcaaactaacaatcaaataaacaaacaaaatcttgccactagtaaaaaaaccaaaaataaagattacagtagtaatattaaaatataacaaactactgttcctgccaagtctcacttagcatatgatatggtttggctctgtgtcctcatccaaatctcatctcgaattgcaatccccaagtgttgaagaagggaagtgattgatcgtgggggctgtttcccccatgctgttctcatgatagtgagtgagtgaattctcatgagatctgatagttttatagatggtagtctttcctgcatgctcacactctttcctgtctccccgtgaagaaggtatttgcttccycttcatcttctgccatgattgtaagttttctgaggcctccccagccatgcagaactgtgagtcaattaaacctcttcctctataaattacccgtctctggtagtatttttatagcagtgtgagaatggactaatacagtatattattgtctcctttaaataattagcaagtgttagaaaggtgttgaagacctattagcaccaagatgagacttcctcactgactaattagaaggattgaaagataatcagagttttatcctgcatacttttaatattattttgtgtctcatctaagtaagacataaaacaatctctgacactatacctggccctctggtgttttccattcttccactgcccaactcttggttcgtctccatccctggcacctggtccttatcaccttccacctgarctttgattccagtcttctgagtttcctgcttatacgggaagctctcctactcaaggggcgcattggacatgttactctccactcttaaagctttggtgatatcaacattatattcagggtaaattctaaacccttagccaggcatccaagaatcacctcagtctgccccccatcaccaccaggctctgtctcccacagtgcacccatcaggtgaattagataacttgttctttctttcacgtgcccatagttctagctccatcgctgagttcttcctcccacctccatctttacttttggaaagcacagttgaaatctacctctcagggttcttattaggatcgaatgaartaaggtgtatgaaaaccctsaaaactgtaagaagaaatacaagtgtgaaacatgtcattgttagtcccgctttgcctttaagtcctttaagttttaagtgtcaagttctccaaggtgccttttccatttcttaggcttgaagcaatcgccttctgcctcctatgcactcagtctttttttatgccagaagacagacagaatggcctccccacatgactgtgaatttattcctcttctatacccttgctgtagccattttcatcttcctcccctcagtgcccagtatacgtgggttgaaagagcaaatctgtgcctacttgcaggagaaaccatcttgtcgtcaatcagaagtggagaaagctatagccacactgcctctgtcaaacatactttctttccttatttctcttccctcattagttgcatcttggaatgtgctttgtctaataggaagtgacagtttaatcgtttgggtttttaaaatttatattctgctacacagctgaccacatgcgatgatcaggcagcccagcattatggcatgagtccattccacttttgcatcagaagatttgggtggagccatgaaatggctgacctcatgcatagcaagagagttgaaaatcactgtgggggacaggagctcttctagggagaaagaagtcaggtatgcgtgcaggtgcagagkgggcagatgggcaggaagcctgacagttttcctggaccctgggctagatcacccttttcatcgtccagggtccctcctaccacttaaartggatttctgtgcrattatttattcttgccccttcttttgaagtcctttgagcctttgaacttgatatggtttggctgtgtccccacctaaatctcaccttgaattgtagcttccataatcctcatgtgtcctgggagggattcagtgggaggtaattgaatcatgggggcaggtctttcccgtgctgttttcgtgatagtgaataagtctcacaagatctgatggttttataaatgggagttcccctgcacatgctctcttgccatgtaagatgtgaccttgcttctcatttgccttctgccatgattgtgaggcctccccagccatgtggaactgtgagtccattaaacctctttcccttataagttaccagtctccgatatgtctttattatcagtgtgagaacagactaatacagagctctttcagtggaaaagatartacattaaatcgttataccaaacrttataatcatggatggtattgcagtcacattatctgccaggagaattggcagggactgtagaagggatgtccactatttaacttgaaccatcatacagatgtgaaatatgaggctcagagaggctcagggacttgctgagggacacactgcttcctgagtaccagtcccatgggtctcctggcccatcagatgttgattactggtgctgatgaaaagaccaacaaggatattcattttctgtgatgggggatggtaataaaacttcttcctgcaaactcaccatgtgcactgcattgccttcagataaaatgtaaactcctggctgcacaaatccctgatttctgacccctgctgaccttttgagcttcaactcagttctctcctcattttgcartttgctctagactttcccaaagagggctctgaggaatatgaccctacagaaaaaagtttaagccaaaataaatttaagagatgctgtacatcatgggatcctcagatatttacaatgcacatgagcctcttcaaagctctgagaagtcctgcgctacagamacggtttaaacttatttcctgctgtttgaacgaatgtttcccaaatctatttgatcagaagactccccttytgttttttatacaacacttgttcttgttggcttgataaaatatgacaaaaaccattgccctgattgctaaaatataacaaaaacccacattgctytaaatgtgcctctttcacattttctggcacttgtctgtgctgctatttctgtctgtctcatatccttcaaaactcatctcagaagccatgccctctgagaaaccttggactgctgtcccccacaggattaggtgccgttcctatacttttgtagctcctgcattctgataatttatttgttgatttagcttcccagctgtcctcagtgaggacaggaacagtgtcttatgtgttaatgtgttcagtgagtcattccataaacatgtactgagcctcctctacccaggcacacagttcagggcactgaggatgctgggggaacaatgtccctgcccttatcaaacttatattccaggggatggggacaaaatataaacacggtaaatatataatgttagattgcattaagtgccacaggcaargcagggtaaagagactgaaagtgacaggagatgccctttaagatagggtttcaggaaagctggatcagctaggatggatgaggccctgctgcacaaacagcccctgtatcttaatggcttataacaataaaggcttatttctcgttcatgcaacgtgcccaccgagggttggctacgacttctgcgccatatcgcctcacttgtgggmccagatggagcatggctggttgttgtggtgtaggtggggagggggatgtggtgagtcatacgctggctcttaagggcttcagctcacatttgattgccacaactgattcaaggggccaggaaagggctctcctgccatgtgcctggaacgagaggaaaactggactgtggggtggacagcattaatgaatgcacaggaaccctctctgacatgaggacttttgcacagagaccttaatgcagaaaggaggggagccttgtgaatacgtgggaggagggtggaggaaacagcacttgcgaagaccccgatgcccctccagcattcagcacggggtttgacatgaagtaggtgaccaggcagtgtttgttgaatgaatatcttgaattccaggacatgctgcattaaggagatctttccgtctcagttgtccaagtggcaggtctagatgaggtgagtgttcatttgtaagagtggaaaattctaaccagcccaaacaaagattgtttggtattggagtctcaattataggacttagagtcagtatactgaacttagctctggctacaaaatttattttgacttgtcctctgactcaaggccaggatcttatgttctagcacaagaaacaaggcagaaatatgtaaaatcaccctaactatagtasagtgtttagaaaaatgtttataaaatacctataaaaatgaaaattagcttttctccttgtgtatacctgatgggtttatcatatttgaaatgactycatcactgtccagattccctgctaaactccacctgggcaggagcatatccccttcrtagagtccccccagcacctagatactgcctggcaagtgatggatggccaatatatccagtacttgtggactggttggcagagggagggaaagctatgcagcatttttcagactttatttttaagagcagtcttaggttcacagcaaaattgaacagaatgtacagagatatcccaaataccccctgccctacacatgaatagccatccctgtgatccacatmccccaccagaatagtaccaacttgtaacaayattaattgttacaactgataggcctacatggacacaaaattatcgcctaaagtccatagtatacattaaaattcacccttggtgttgtacattctatgggtttgaacaaatgcataatgacttgtatccaccactatagtgacatacagagtaatttcatgaaaaaaaatcatctatgttctacctatttattcttccctaagcccctacctcctggcaaccactgatcttttcactgtctccatagttttgccttttccagaatgtcatatagttggaatcatacagtatgtaaccttttcagattggcttctttcacttagaaatrtgcatttaaggtccctcaatgtcttttcacggcttgatgtcacacttcctttttgcgttgaataatattctattgtctggatgtaccatcttttagggtatggctatggggagagttctgacctcagcactattgcttgtcaagaaggtgacatggatttaactagcggaagagtgggtttatcawtaaaggcaatggtgaactgaacatgaaaccaagaagggtgatcaagctagagaaaaatcagctgaggctcctggagaatgaaccaggtcagagtgagtgatggttggggggraaacggactggactcagtggatgtatagaatwtcaatagtggagctgggggaagattggcacatgggatccatggagttgaaccatcattatgtccacgttaaatgctaactttggcaaaaataaaccatttccatgagcttctccagccggagaaaacagcatgaataaagacacgtaggtggccaagtacatggtgcgtatggacagccatatgcagatcgctttggttggagcatggggtgtttgtattttaaccctgactcttcctaactttgatgctaattttgagcaaatggaaatggcactagccacattcttggatctgtctggtatctggatttttgggttacactgcttgatttttttgcgcagtcctaggtcctcccttactgagaccactattgtactggcttccctggtggctgctgccaggggcagggtgtctgagatgggctccttcaggcacactgtgtctccttctcaggacgaaggacaagagcagcatctctgtagacatggtgctaagtcagcagaaggttctgattgtgcagattcagcatttctcttcctgctggtttgaatgaatatctcacctgcagctgccttgggaaaagctgtagtgtcagatgaggagggtcggaggtcagacagaggctgggctgttttggtgactcagattctttcgtttataacacgytggtaattccacttggggagcctttaatgcctcgaactcggaggccttggtagagactaagttaatggatttgaaatttctttgaaaagctgaaattactggacaaacacaagatggtagtggttgttatagtaattatgataaaaatgagaggaaacttttaattttccagcctgatatgatttgaaggatgcaaaaattgaatctgatgttggtcaagcattgatcttgcagaaaatgtcctgttttcctatagcaaagagatgtcctaaaaatggccctgtaacttttgaattgagtccctagggaaccatggagttttagggtaatatgtttgcaccttgaaggaacatttgattttcatgccccattgtttcccatcgcttcatgcttcaatgccttggtgcaagttgttacctctgtctagaatgcacctccccacctaactggcaatgtcagaaacagttcttcacttgtaagcaccagacacattctctggctagctaaagttgaaaaggaaaagagggggaactcacaaacttgagaggttgaggggactaggcaggactctgagggcatgctactcaaaattaaaaagcctgttggacacagcttgcatgttgcatctcagctctcgatcaagcaagtgcatttaatagactcatcaagatggcggacaggaagagtgagcattccccgagggcattgatggcagtagtggttgctatgcagccaaagaaattaacacatgcctgtttcatcattgtttagtccccagctcaacagtcatctcctcgggaaactttctttgacttcttctgggtagggtcattcaacatgcatgatattcaacagatatattagtatctaccatgtgtcaggcatgttcagggcacaggttgcagccataaacaagatggacatgatctctaccatcaggaagtttacctttcagagaagcaagatgataaacagaatgaagaagcatataagttaattttaggtagtgttaagtactagacagggaaataaagcagggagaggtaagacagagagtgctgtggatggataaaggtggagtatttaagagaggctgagcaggaaaggtctctctgaggaggtgaggaagtgagccgtgtggagtataggcagcaggtgactgcaagtgtctagacgctgggtgggtaggggagggtgggcttgccatgtctggggaatagtaagaagactaggatggctgcaggagagtgatcagataggaagtgggaggaaacaggttctgagaggtagagagagggcagctctcatgggacttggccatgaaaagactttaaaaacaaatagatcttaaaatagacctggttttgtttttctcctgaaaacaggagataccaggtcaagaaggttccttctactctaacccttataaaaaataacctgaagcccttgttcccaccttataaaacccactgctatttcctagtgggatttgaaaccaaatagtgacagagtgatgccagtgcctaaagttttggtcagtctctcaactgagaggttgatcaaaagggggaattattaagtttagcgaaaagctgcctctttacatactttaaaggtttctccataagtagtgaactgcaacctaactggatgtgtaaacagactgtaacccactgttgtccaaacaacygagtttcagccaatcaagggggaccaactgttcaaactgggctcaagtagggcaaatgccaagctgtaatggatccagctgtttctgcacctcgcttccattttctgtctgccactttccttctctgtccataaattttctttgtggtagaaatggagcctcttcacacctgttctggttcgagatctstacaattcttgaatcattctttgttcaattaaacacaattaaactttttaaaagagcagtttgggttttatttcaactgtgatggaaaaccactggaggggtctgaacaaaggattgacctaactttatttatgtctttaaaaaatactactctggatgctgcatggatagtaggagttctggagtgaggaggggatagggggcaccagggaggccagttaggaggatattacaataatccaggtggagacaggacaggatggttacttgggtgaggaggtactggtggaggtggtgaaactgaccagtttggggatgtgcttggaaagtggactgctctgtacttgctgatggatttgatgtgmggagtaacagaaagaaaagaatgagagagaaagaatgattcttagggcttttatttaatcaactttaaaatttgaggataattttagagttgtagaaaagttgcaaaattagtacagagaatttcagtatatgcttcacccaggttgccccactgggcaaagtcctagakttctttcttaaatttttaaaattgttaattattgtgcatacatagtaggtgtatatatttgttaggtatatgggatattttgacagaggcatgcaaatgtgctataatcatatcagggtaaatgtgatatccatcacctcaagcatttgtcctttgtgtgacaaacaatccaattatactcttttacttacttaaaaatatacaattaagttgttattaactacagtcactctcttgtgcattcaaataccatatcttattcgttctttctattttttgaacccattaaccatccctattccctgccctcacacccccaataccctttccagcctctggtaaccattgcactactctctctgtctgtgggttcaactgttttcatttttagctcccacagatgggtgagaacatgtgaagtttgtctatctgtgtctggctttttccacttaacgtcatgacttccagttctatccatgttgttccaaatgacaggatcttattctttttatggctgattagtactccattgtgtatatataccacattttctttattcatctgttggtagacacttaggttgtttccaaattttggctattgtgaatagtgctgcaataaacataggagtgcagatatctctttgatatactgatttcctttcttttggatatgtgcctagcagtaggattgctgggtcatatgttagctttatttttagttagagttttaatatggtatagttaacgtgctggatggagttgacatttgttgagatggggaagacgcagagaagagggagatatctctagctctgctctggccatgtcagcaaatcatttcacattcaagtggaagcagatatcaaacaggttggctagatctgtgaacacggagctcaggagagagcctgggttgtgggtgcagctgtcggcatttagatagtatttaaggtcacagaatgctccactcttttatatttggtaattttcgtaataaaaaattcatttaaaatggagtcagtttaaggaaatatgattaactgataacttaggtcatacttttctacaaatggccagtagaaaatgttttaggctttgcaggccataggatctgttgcaactactcaactctgccgttttagcacaaaaggagctctagataatgcatcaatgaatgggcatggctgggttataatgaaactctatgtacaaaaactgggtggtggactggatttggctcacaggctgtagtttgccaattcctgggctctacaatgttgagaggttgggaaggtgatgacaaaccatcaaggaggctgacagggagcaaccagtagggtagcaagaaaaccagggcagtgggaagctcaggaaggcaagtccaggaaaggaattctccattatgtctgatgctggtaggacaaggaatgagaattgtcctgtggatttgacaacacagaggttgcaggatacctttcagtagcaccgtcgtggccacacctgaccagagttcgyagaggaaagaatagcacagaagtaggcagggtggttatagccaactctctagatcatttttgctataaaagggaacagagagamatggagaattatctacagagggacacgaggtcacataagggttttcatttctgtttttaaggtagaagctaygcttgtattttggggtgatcctcctcatgattttgctatggttggaccctgtatacacttcttcttcttcttctttttttttttttttgagacagggcctcactgtgttacccaggctggagagcagyggtgcaatctcagctcactgcaagctctgccctaccaggctcaagagatcctcccacctcaggctcctgagtagctggggccacaggtgtgyaccaccatgcctgcatgcctggctattttttttttttttttttttttttgtatttttagtagagacggtgtttcaccatgttgcccwrgsctggtctcgaactcctgagctcaaatgatctgcttacctcggcctcccaaagtgctgggattacagtacacttctacaattaattctttcacattatcatttctttaaaatctgtgtcttcttttagcagggtttctcagtctttgaacgtgacgttatgggccagacaattatttgctggggggagggcaaaattgctgctcgttaagctcctagagtgtgggactagatttactcttcttgttctccctggtctttaatactatgcctggcatacacagggggtgccataagtattttgctgagtgagttggtgaatagawgtgttcctttacaaagtactgttttgatcatctcataagaaagtcacatggtacctgggtggcctgagggaaaagcaaggcaggtctccagggttgagtttagcatgcctgatctttgctgagattcaggatttccaattgcactggagaggattgtgtaggtagtagcaagagggtggctacatttagctgacgtttctcatgcggcttctggactatcaaggtctcttgcttcatgcctcctcatctgcttgggaatgttgcttatgtagtttctccaaaagcaagtggacatgagggatggggaagctctttatctcaagcatgattattacacgtggattccattatttaggcaaatgctgtctacagacgctccaggagccacctcccaacacctgtctttcacctcttgccagagactcaaagatgagtgggctttcagagtcataacaataataatattaatagctgtcactctgaaatagacatggcaatttatactctgtgggggagtctttagtccctcactggctaagcacagtggaagggcacctgtatgtgaggtgatctcagtgggagatgaagatggtgaggaataggctaagtacctccctccccttgtaccaccctctgatgcaaacatgacctccacctttaggggattctataaaatgttgttgaatgggctgggcgtggtggctcatgcactgtgggaggccgaggtgggcggatcacctgaggtcaggagtttgagaccagcctggccaacatggtaaaaccctgtgtctgctaaaaatataaaaattagtcgggcgtggtagcacacgcctgtaatcccagctactcaggaggctgaggcaggagaattgcttgaacccgggaggtggaggtygcagtgagccgagatcgcaccactgcactccagtctgggcgacagagcgagactccatctcaaaaaaaaaatgttgaataaatggatgagtggatatgcatccgtgctcccatcttgttcctgtcttccttttatttgtgtttctacctggcaccaagggtgtcctatagctgtctctgagtaagactgaattcataagaatttattaatttctctaaagagaggagactcagggtcccagtaactgaatgctgttcttmtttcagtctttcctgtatcaccttcctggattttgccatatcaaggtatcacctactttasggatctataaactatggcctgccacctgtctttgtaaataaagttttattagaacagaattgcacccatctgtagatgtgctttctatgggtgctttcgtattacaacagcggagttaagcagttgctatggcgaccatatggctcacaaatcctaaaacatttactatctggccctttacagaaaagcatgctggcccttgaagtacattattatttaatcaatttttctttaaattgactcagtttcagaataaacttattgctatggagattagcaaacatacaagaatagagagaatgtgtaatgaacactcatgtaccctcaattcagcttcaactcatggtcaattttttttttttaaaaacagctscattgacatctaaataatattaaaaactgcgtgtgtttaatatacataatttgatgagtttggatgtatgcatgtgcctgtgaaaccatggccacaatcaaggtaatagatatatctttcacttcaacagtttccttgtgtctctttgttttgtttttgttgttgttgtagtgagaacacctgagatgagatctctcttaagaacattttaagggcagaatacagtttgttaactatagacactatgttgtccagcagatctccagaacttattcatcctgcataactaaaactttattgaacagcagctccccatttccctatgcccccaacccttggcaaccaccattctattctctgcttctatgagtctattttagatatcctgtatgggtggaatcatgcagtttttgtcctctgtaatggtcttatttcacatagcagaatggtccaggtttttccatgttactgcaaatagcggacttttttttctttttttttttaggttgaacaattttccattgtataaatatgtcacattttctttattcattcatctctcttttttttttttttttttttttttgagacagggtcttgctctgtcgcccaggctggagtgcagtggcacgatctcagctcactgcagtctccgcctcctgggtacaagcaattctcccacctcagcctcctgagtagttgggattacaggggtgtgccaccacacctggctcatttttgcacttttagtagagaccaggtttcaccatgttggccaggctccattcatctcttgatggacatttaggttatttccgtatcttggctgttctgaataatgctgcaatgaaacttctgcgaagcaaaggaaacaatcaacagaatgaaaaggtatcctatagaatgggagaaaatatttgcaaattatatatctgataaggggctaatatccaaaatatataagaaattcctatgactcagtagtgaaaattattaaatggacaattaaaaaatggacaaaggacttgaaatatatgattcttcaaagaagacatgcaaatggccaacaggcattaaaaaggttctcaacatcattaatcatcagggagatgcaacacaaaaccacaacgagtgactgtgaaattatctcacacctgttaggatggctattataaaawtgaccaaagataacaagtgttggcaaggatgtggggacattggaacccttgtacactgttggtgctaatgtaaaataatgcagctgatatgaaaaacagtatggcggctcctcgaaaaatttttaaatttttattatcggttggtgcaaaagtaattgtggtttttgcaattaaaagtaatagcaccarcstaatggaactatcttatgatccagcaatcccacttctgggtacatatcccaaagaattgaaatcaggatctcaaagaaatatctgtaccctcatgttcactcatgttcattatggcattatccaagagagccatgttggggacaatcttatttaaaaaaaaaatttttttttgagacagagtctcactctgttgcccaggctggaatacagtggcgtgatagtggctcactgtaacctccatctcctgagctcaagcaatcctcctgcctcagcctccctagtagttggtactacaggtgtgtgccaccatgcctggctcatttttgtgtttttytgtagagatggggtttcaccattttgcccaggctggtctcaaactcctgggctcaagagatccacttgccttggtctcccaaaatgctgagattaaaggcatgagccatcgcaccctgcccaatctkgttttcttaatactccctcctccctaataccttaccaaccccctgattattttaatgcaaatctcagaacttatatcattttaatttaaagtttcagtaagtatattaaaagaactcctgtattgactataaatacaattttattattcctcttaattaataattccttaatatcatcaactatccttaaataactcaaggtttttaaacataaatacctacttaagcttcatttcaagcaataatttgcttgaaattatggttcagatatgctatttatattttttaatatagtagaatggctcctgaatttttgaaaatttaagaggaaaatgtatccctgcaccatctaaaatgatcttgtacaccatcagtataccacacmctggaatacaccacgttaaggaggcccttagcggaaggcgttgtccactttcttctttgaawggtatgaaaggtcttacagtgtccttgttttcacaacccagacagagttagtcagtgcctggagcaaacaccagcgacatgcataccaaccatgaaatctgaaggaacaacaacttcatagtcatcttcaccagctcaacacaatttatagtacaattaagaccggcaaatctaattggataaacagaaaatagaattaaggtaatctatcctaagtataccaaattcctataatgagttgctttcagcagttgtggaaacatataattaccaaacaaattacatgttatttttatctaagaagctaattaagtgttctgtgtaaattattatgtggtggcaccaggatcagagttgtattaaatacctaattggaaaagggatgagacccgagaattttacatgggaatgtgactgagagagatcatagcaagagggtctgattcagagacagggacttgagagaagctaggtggaaatgggagagggttagggtgtctttggttggtttaaatttgtttgtgtttttagagacagagtcttgctctattgcccatactagagtacagtggcatgatctcagctcactgcagccttgaactcctgggctcaagcaatcttccctcttcagcctcctgagtagcagagactatactcaccaccgcacaccaccatgcccgggtaatttttaaatgttttgtagagacagggtcttgctgtgttgcccaggctggtcttgaacttgtggccttgatcctcctgccttgacctcccaaagtgttgggattacaggcatgagccactatgcctggtcactttcgttggtttaacttgagcctggatggttgaggttaagtcagggctctgacgtgtatggagccttagtctttttaatttatctgttctttaaacttattcgtctccctaaatgtaagctgcaagtctctgtgtgctgcagctaaccttaaccctgggttttttgagtgtgtgtgtgtgtgacccttatataacttccttactttgctctcatttcctcatttccctgtggctcagtaaatcttccaatatcttcttgtgggttcgtgctcttttgyaccctggaatggtaggacatgggcgctttgggatatttcctataactcagaacaggtagcctggaagaattttgcaatgaagctttgagctggcatcagcctcaagaaacatatccctgttgagtgtgataggagaggcagaggcttctcctaagttgaggcaggtgaggattgaagttgctgcatttccaccaggttagacatagtgctgtggtggaaagcactctcagctggagtcataagaccagatttattgtccctgtcctgctgttggtgagcagtgtgacctttggcaatgcatcattcccttctgagctctggtatctcatttgtaaaatgtggaaaatagcccttggcctatttacctcacagaggtgccctgaggatggcatgccatagtgtaaatgaacatcatctgtaaaatctcaatttttacaacagaaatatatgaaaaggtctggcattatggttgtttttaaccaatggcagctgtaggaagtcagacaaggtgggtgatgtaactgaaaagagcaggaatcttccagcctggctagatccaggtgtcatttggatttggtctctcctgcttttccccttgattcttctctgtattcattgtgtttttattttattttatttcatttttttagatggagtctcgctctgttgcccaggctggagtgcagcggcatgatctcggctcactgcaacctctgcctcccgggctcaagcaatacttttgccttagcctcctgagtagctgggactacaggcacataccaccatgcctggctatttttgtatttttattagagacagggtttcaccatatttgccacgttggtctcgaactcctgacctcatgatccgcccaccttatcctcccaaagtgctgggattacaggagtgagccactgtgcctggcctattttttatttttttgagacagtgtcttgctctgtctcctaagatggagtgcagtggcacgatctggctcactccagcctcaccctccggggttcaagcgatcctcccacctcagcctcctgagtagcttggactacaggtgcataccaccatgcctggttgcttatttttatttttgaagagatggggtctcactatgttgcccaggctggtctcaaactcctgggctcaagcagtcctcccaccttggcctccaaaatttctgggattacaggcaggagccaccacacccagcctgtaytgactttattcagggaatgtctccccaccccaactcccagtgtggcaagacagtcactagcagaagtgttgcatctttattctgtcagttaagtgacttaggggaaacagagtgcagagtccacttcctggtcgcttcatcrgaagtcccagggctaactctgattggactcctcttcctcacttgcccataaatcaaccaatcacattgttcaggataggaatacactgactgaccaggctggtcatgtgcatatcctgagagctggagatgctgaagttgccccacttgagctacatggaatgaaaagtggggacagttggttccccaaaagtgccagaagaaagagtgttttctggactagagaaaaccaaagatctcattctcccataggctacctatttgaattataatagaaaaatttactagattgagagtcagggaagacttggattctagtcttgactgtgtcactatcactccgaccctggatgtgtcaactctctttttgggaacccagtttccaaatctttgaaagagatttgggcctgaattcttctgaagttcctcaccttttcttcaccagggactcttcttatcctgcggctttttatcgtcatggtatactgtgtgttttgccggcaaaacaaaatacattaattaagtactaatcgattttatttaaaaaaatgaattaacagcatacaatcaattgccacttagaaatgcagatcaacagaacataaggtaaccagtggaactacactgagttatatatattccagcccaaagcaaataaacttaaatatttctttaatcttgcctgtgttgcctgggacagcctgattacagggcagaatttgaattatgccaggccttatgaaatgttcagcagggctatagattcctatttctcatttactggatctcaggtgcctgtaatcccagctactctggagactgaggcatgaggatcactttaacctgggaggcggaggttgcagggagccaagattgcgccactgtgctccagcctgggggatagagtgagactcccttcaaaaaaaaaaaattatttatctcatctctctgggttctgcacatatttgaatttgctgcacctgatacagaccaaatcagtgtttcctaaacctctctgatattaaaaataacctgtgagctctttaaacttacaacctcttgggtattccccccaccccactttgattcagtatgtttgggtaaggttgcatacttgcctttttaacaaggtatccccaggtgattcttatcgtaaagaaagtctggaaacactggactaagtaacatccaaggccttactactctaagtgtgagcagccacatctgtatcccctgggatgtcttgtttaaattgcacaggccaaaccctacagacagacaactggaatctggattttaacaatggaagcagattggcttttgtttttaattggcttttaatttgatctattttctgttttcattgtaatgaggctttcagctgcccctcttgccctaggcctcttcagaagagacatttccctctcctctccctgcctccccacagggtataataaacacctgttggggtttggtggggaagctcaccctgacctcccatcactgagacacgaggtgcaaaagtgttctgcacacagcctgagatcttgcctctcaaagcagacttgacccccaagcttccacccctaggtctcaggaagaaatggcctcagcagattccaggcctccagggctgtctgtttcatgctctcaatttttacttggcttgatccgtgctgtctccatccggtgttctgaggcatttcacacacgactggtcttcggcaactgggccaagcytgttctgttctttttcagttttcttaattgcaaggctttttgtttccccactggagaactcccataccaagaattctgaaatctaggtactcagaccttagtggatgatgttctctcagcacttaattcactcatcattcaataaactatcctcaagcaattctatattcaaaacattctgataatgatggcatagtaataatgataatgataatagttggcatgtattgaaattttattatgtgcaagaaactatgccaggtactttaaatatctcatttaatcctcacagtaagtctgggatgctggcactattcttacccctgcttgacagatgggaaaactgrggctcatagaaggaaacagagtgcacagtgtctctgatatggtttggctctgcgtccccacccaaatctcatctcaaattgtaatccccacgtgtcagggaggggcctggtgggaggtgattggataacgggggcggattttccccttgctgttctcgtgatagtaagcgagttctcacgagatctgatggtttaaaagtgtgtgtcaattgcttcttttctacccatccccatccttccgctgtgtgagatgttcctcgcttcstcttcgtcttccaccatgattgtaagtttcctgaggtctccttccccagccatgccaagcggtgagtcaattaaacctctgttccttataaattacccagtctcagatagttctttacattgtgaaaatgaaccaatacagtctcacagttgaatagtgatcgaatgtggtttcaaactcagccckctctgacttctgagtcttcagtgttaaccatctcacacacttatatgatttaggcttgatggaaacagcccacttttcatgaagcattatctacagagcctttaatttctactaatgccaagaggaaagtgccatgcccaccttggtgatgacagaactagggtctaggagtggattcatatggtcagagtctcatggccagggattggtaaaatccaaatttggaatctggcttctggctataagcccaaggttctttctgtcatcccagactgtacagcccattatctcaaggagctggcccctcagaggcagagagatcatgttcagtatctaggagtttatgacaagtactatgtggtgcatcccaggctctgaggataaagtcatgactcttgggtgagctcataatgcgggcttgcattgcttcagcccttactttgtgctaagcatgtcacactctctcatttaatgctcttaaccctacaattacccccattttacagaggaggaaactatagtgtctcrcacagaataggtgcacagtgaatttttattgaaaagaagaaaaatggcacgtgagttgaattaaggaaatgtaggccagggctggggcaggaaggcatacagtggccatacagccagctgacgggaataatcgagtgcctgaatatggagtttgaacttcgtcctccgttttgtaagtagctaaggaagggaaatgaaattgtccatagtgtgcaggaaggactggaggcaggtgaaagcattaggtcattgcagacctccaggtgtgggtgatatggctcaaactaagatggagaaaataggaacacctgtcagcatgtgtagggggcargaatgtgactttagagtcaggcctgctttcaatccagcctcctcatttaagcaagttactttatcttctctgagcctcatttttgttctccttttaaatgagggtggtaccacctacttattagggttatgtagcatgtgctgttggggctttcccatatgcccccagtccttgcctccatatactgaagcttgctcactgtgaacccctccgactctgtcttttctggctttggaagcaggtttagcccacctgcagggggagtgaaggtgctggaagcagccaacggtagggatttgtggataagcactccagtcckttgtcttgtaggcaggataactgtgatgtagagtagatatttcatgctatatcccagatgtctctagtgatcttaaggcccagttgccttaagcagtcacttaatttaaaatttaccatttattgtttccttttacttccctgtctcacttctctttcctcttaccagtgtttcctgggatcatttctcaaaccactgggagctcaaattctttttcagggcctcaggtcataataatgataaaacgaaacattgtmtgttaagtgcttagcacagtcgtgaggcccaaggtcagttscccsataaatggtagctgctataaacatcatcatcattaccatccttgtgaaggtggagtgaacttattctttcaagacatttccactgacagataaattcatccaaaatatgaagaaaaatgggggaggaaaaggtcacctagaatatgcagagcaaaatattgcaatgatttctttttttaatgagatagtttattaattattaatcagtatctttaacctttagtccttgtttaacaccatggataacaggtctacaattgagtataattagccaaatgcctcttgcatcctaaattggctattctgagttacacagtttgattttcttggaaggaggacctggtttcattagmacctagttgcaaatgaatctcctccttgaagttyttgttgctatttgagcttgtttttagctggagatttactcttggattttagttgttttcgccttcatctgttgaagaggtggsatgatattgcgtgtgtgtgtgtttgtgtgtgctggaagttatgcttccaatatttacaatattggctttccaaagcagaagatgatgggctttctgggagggtggttcaataggaaaccttcagaaccagtggggttggatggtggagcagagkgtaaaagggagagtgatgaaaagtagagtgattgaaaggataagcrcatctgcttttagacttgctcacttaacttatatgtgcttatctggaccttggccccaggggaggagatagaggaatgcgtgagaagctgtcttgagtgttagggacggagtatgatgaatgcaacaactgtcagttctgtgtcaacttggatggggctacagtctgtactcagtcaaactctaatgtaggtgggttgtgaaggtgttttgtaggtgtgattaaagcttataatcagttgactttaagggaggttatcttagataatctgggtgggcctgattcaatcagtcagatgccttaagagtagagctgaggcttctctgaagagtaaattccacctgaggagagaaggtttagctcatgcccagaarttccagcctgccctgtggatattggacttacctacccattccccacaatcatgtaagccaattccttgtcatgtatttcttaatatatgtctcccgctcatctgttcctttaattgaaccctcaataatacagattttggtgccaagaatagggctctgttgtaacaaataccttaaaaagtggcagtggycttggaattgtgtgttgggcagaggctagaataatttggagacacatcagagaaaaagactagacatccttcaacagactgtgagtggaaatacgaatgctaacagttctgtttctggggactcagaagtaagaaacatgttagagaaggcatacatcattttagagactacctaaatcatcatgaacagacttttggtggaaatatggacgttaaaagcattaccagggagggctacctacgaaggaaatgttattgaaaactggaggaaaggacatccttgttatatagtggcagagcatttatctgaattatatgctacagttgtgtggaaatctgaacttgcaagcaatgaacttggtaaagtgttgaaggggcagcctggtttcttcttgctccttttagtaaaatgtgagaggaaagagattgaagcaagaactgttaagcaaaaagmaagcaagatttgatgacttgggaaattctcagcctatctggattgcaaaagatgctaaaattaggagatttactatcaggaaagcatgttaggaaagggtatggctgaacagttttttttgctagttcgttggaaagataaaaagtcccagtattcagccacacagagtgctctttgaagagattaggtatgagactcatgtaccccttggccatcaaatcagaagcaaagaatagatattaggattatctaggaaagaactgtgaagaaccattttttgtctgatggagtgaatccccatgacatactcaggagacccataaggtttttgaaatttcctaccagcataaacattggcaatttggacagaagggaacagagaagataaaatgaaggaaggccattacactccctaaattytttttttattattattatactcgaagttctagggtacatgtgcacaatgtgcaggtttgttacataggtatacatgtcccctgttggtttgctgcacccatcaactcatcatttacattaagtatttctcctaatgctatccctcccccagccccctaccccctgacaggccccggtgtgtgatattccccgccttctgtccaagtgttctcattgttcaattatcacctatgatatactccccaaattctacaggcaggaaatgacggttaaaactcttaggctggaaacacatattacccttcatgagaaaggactggttactcagagggtagagcctcaagctcaaaggacagagatgggagaggattatttctaggctttgaagcctaatgtttgcctaactgaatctctcctctcctttttttttttttttttttttctggaaacagtgtctcaccctgaaggccagactggagtgtggtgatgtgatcactcactgcaccttcgacttcctggtctcaagtgattctcccacctcagcctcctgagtaggttggactacaggcatgcaccaccatacccagctaatctgtttttgtattttttttttctttttyagaggtggggtttcaccacgttgtccaggttggtctccaatgtctgggctcaagcattccaaccaccttggcctcccatagtgttaggattacagggattagccactgcatccggactgcctaactgaattccaaaattgtttggatgtggtaacttgttttttcttttcawtgattccttttttgatcaaaaacccctgtaactgatatcccatgcctgttccacaattgcatctggggagcagataatccgttttctagttttacaggtccacagttggagagaaactttgacccaggagggatcatgctcagattcttataagtacttgacttaggtgattgagataagattttagacatctgagctcatgagatttatttatttatttataattattattttttttgagactgaatctcactctgtcaacccaggctggagtgcagtggcatgatattggctcactgcaacctccacctcccgggttcaagcgcttctcgtgcctcagccttcagagtagctgggattatgggtgcacagcaccgtgcctggctaatttttgtatttttagtagagactggtttcatcatgttggccaggctggtctcgaactcctgacctcaggtgatccacccgccttggcctcccaaaatgctgggattacaggcatgagtcactgtgcctggtctgatgagattttgatgaaaattttggactttgacactatcgtgagttagttttggggagatggagtgaatctttsggagcaagatggtggcctggcaggcagaactacgacctctcaaagatgttcaccttctaaactctgactcctgtataaatgttatgatttatggcaaaagggattttgaagatgtgattaagttatggatccrtcttgagatgagagcctcatccaaaattatctggtgggcccaatataattgtgactgtacttataagaggcgggcatggaagagtcagagaaggrgatgtgaccatggaaacagagttagagtgatgtggccatgagctaaggaatgtgggcagactctacaaactggaaaaggtaagaaatggattctcctctaaagccttagaaggaagcactaggaaggcctgctggtccattttaggtttctgacctccaggactttaatacattttacatcactctaagccactaactttatggcaatttgttacagcagcaatgggaaacttataatctgttaagtgccaggtcttctgctacactgcttagacgtattattttgcttctttctgcagtcctttaggacatacgtactaaattcccattttgtggttgtggaaaccgaggcaatgaaagttcagatagcttgcttaaaatgacagatctagttagtggtggctctgggatttaaccccatgcccgaatgattccaatgcctatggactagctcttgcatgataaatgtcaagggacatgaggagttaggtcagaaagccatcacgacatagctcaatgtgtggctttacatttgacgtaggatgacctagtggtaagtggtatagcacctgtttaggtgcactggagacatgttgcatggccccaaatccagctttgccacccattactggctgagtttactttggacaagttatttcacatcttttttttttttttttttgagacggtgtcttgttctgctcattctgttgcccaggctggagtgcagtggcacaatctcagctcgctgcaacctctgcctcccggkttcaagcrattctcctgcctcaggttcctgagtagctaggattacaggcatgcaccaccacgcccggctaatttttgtatttttagaagagatgggatttcactatgttggccaggstggccttgaattcctgacttcaagtgatctgcctgcctgagtctcccaaagtgctgggattacaggcgcgagccaccaagcccagactatttcacatctctgaacctcagtttccttacttataaatggggattataatacttttttttagggatatggagcttagaggagaataatggtggtaaaatgcttagtgcagtgcctgacacatcataagcgctcataagtaaaataataacagtagtagtaataataacartaataacatgctaataataatggcgaattactcttcctgttttgccactctaggcagagggatattagtgaagagaatacaagatccatggtgggtcaggggcacaagtgtgttacaagcaaaaagaacagcaggcactcaggccattgcctatgaaatgttcttccccacctcttaaactggctaatcccattcaaaagccatgtctcccaggaagtcttccctgaccttcttggctgaaacagacgccctttctctgagggcctatcacagaaggtactttcctactctagtcttgtcaatgcatttgaagcctctctcagtagcctggaaactccgagagcagaggtgctctctgtccctctcttatttattgttataccctgagcattaaaaaaaaaaaaaatgggataagtggtgagaagagactggagcggcaggccttggccatgctaggagggaccctttagcttccaacttcccgatgaatttscccccgagttggtttgctttgtctttgtaactgagaacagcctagggagaagcatggacatgggggacctgcaggcatgagactggttgsttagcatctccatggcccctcactactacagcccactctacatgctgttctgggcctcattaaaacctgttctccactagcctcggtgtttaatatttatckatcacccacagcatgcaagctggtcaataagtgttttcagaagcctcactccatgccatcttgatcagcccctgccgctattttccatcatgccagctcttgaaatcttgtggatgtgccttgaattttttaagtgcttttctaacaaaagtcccgactgcagagatgcagaagcttaagttccatttcatttgcctcctgaaccttgagggcactggtttttatattgctgcctctgtccctcttagtcctcagtccccacacttctcaggatagctgaagagatgagtctgtgtttggctctgagttccagctccctggcagctatggattatatgttagcacaatccattttactcccccagctgtttactttcctggggacctgcttgagtcaggctgctcccgaactcccttaatgaagacatgacagtgggtggctggagacgagaagttgcaggagaagcgagaaggagagagagagtcccctgggttatatccctgttactcaacattgttgaattagatcctcaacattccatcatgtgatgtttggatgctgggaggggagttaaatatagaattcctccttttggcatttcagaaggtttatataatgtcctgttccttttgacagtggggagaaagtgaataggatggcttggaagatgggtctgtgtccggagctccatttaaagtctactcagcagcctgacccatctgcctactcaggggatgttcggtgaatcatgtttgcaaaggcacagatgcccttttgagcccaaagatctgctcagctcgaaaattctattaattctaagattctacaagtagccttcacaagagtggatgctgaaaatagatcagccacgtggtatgccctgaatttgcctggattactgatttgattttcccctcaatgtttccctgaacctggcctggaaattcagcttgctttaccatttgaaccctgccgtggagtcccagggaccagcgttccaagtctgcctctaycatttcccagccatgtaaccttgaatgagtctcttggcttttctgagtctcattgtctttagcatgtccccatacctatctctccttcttactttcttgtcttagtaaatgacctcattttccatctagctgttcaaactacaaacctacaagtcacctttgatttctctctccctcttacctgctatgtagaaaccatcagcaagggcttctagctctgcccttaacacagatccatgaaamatgcttctaccttcactgcaactccttatgaaatctgcattcagtgacagcagcatcttctaaactggtatcttcttccagctttgacatcctatgatcaatgcatgacctcgctggtcgagtgagtaagaacgatgacaaaacccatatcttgaatcacatgcatctttattaaaatcttcctccagctttccattttacctagaattaaartcaattgcttgctgtggcctagaaggagcaccataatctcctgcttatatctcagaccaaatcctgctctcttttcccttggtcctttatctttctggaacattcctcacactcacctttgcacktgttgttccgtttgcttgggaatttcttcccctggacctttctgtggttgtcttgttctcaccattcaagtttcgtctcaaacattgctgactgtgacaggctgttcatgatcatccaagttcaagtagcctccactctagccattagcccattactcagcttcattttctcctatagcttagctctatctaagtattatatggttagtgttttgttttttttaatcaaactcctcccattaaagcatgtgtcctttgaaagcagggacattagtcatttctatatcttaagagagttatcaccagcctgggcaacacagagagactttgtctctactaaaaactaaaatgacttcaccaggtgtcatggcttacacctgcagtcccagctacataggaagctgaggtaggacgatcacttgagcccagaaatttgaggctgcagtgagctctgatcgtgccactgcattccagcctgggcaacagagcgagaccctgttttaaaaaagtaagtcacgcacgtagtaggtgcttaaaaaaaaaagtgatgcacatagtaggtgcttaataaatatctgttaaatgaataaagattggttacggggatgaaataagagcgtgctcaggtatgcacagacacactcatgcacatatgtgcattgaaactgccatggtaagaaatactattgttaatagctgggagccagaatttctatgactctccagttgcatcaggcctcccttgactgtattatgctcctaagaaacttttcttgccttttgttgaattaaaattctttaacttctcagctatctcatggatctttgcatctgttttgcatctgtttcttagcagcctagcttggckcatggtgctttatagagacatttagcatgtaaagatatttataaaggagggattctcttctatttttgcccagtcatctgttggagagagggggagcagcaagcaggcacacatgattcatgctcttgcctggagggtgctgcccacctctagcctagaagagtggggtggcaggagccctctgcattccaaggctggttccagtgaatggagcatctacagtggtggtttggccaatctcaacattctgtaatggcctcttctttacagttcacacttcccagataggttaatattacagctccttccatcagaatgtccttaagtgtgtagctgcaaagttgaggggtacagttcataaaacgatcatttctgacatcacttggaagattgagggctgccaagaccacccttatctttgataattcactggaaactcacaaaactcgctgcaagctgttgcacccacggctatggcttgttatagctgaaggatacagactaaaatcagccaaaagagggacacataggcagaatcatgaaaggtccaaccgtgagctgccagtggtgatcttcctayggaatcatggacagtgccaccttctcagcaacaacggatgaaaataagcatggrackttgccaacaagggaagctcactgagccttggcgtgcagagtcttttttggggtctgctgttgagttcttrtatgggtgaccttggcttccaggtcctctggaggttgagctcatgctatgtgattctaagcccccactctaaatcacactgttagactctctggtgtgacccaaggcccccacaagcaaaaaaacactcctatccaggcatgacattcccagggcttagtaagacaccaagggtaaagaccagacttctttttgggcgaggtttaattctttactatggaagagctcaacttgatactcttggtatggatgacttacgtagatagcggtggtgctggcccttttcttgcttccagtgcctgaattcatccatcaattccacaaatatttattgattgtgagctaggtgccaggctctgtgctagttsctagggatacagtggtgaaggacatagttcatgctataaaaaggctggggagacagataaacaggcaattattcttatatataaatataccatgatgctagaaatgatactaaaggctcttggtgcacaagggtgcctggcacagttgctggtgaagacytcccagggcggtggtagttaggctaagattggaaaaatgattagaagttggccaaccagggtggagtatgggggtagggaggtagtgtttaggtggaggaatatcacatgcagaggttgagtggtgagaaagttcttgaggatggtaaggagctccacattttcatggatgccacagctcacaggtgattcatcttgaacatacagccaataaacacccaaagactttcccatcttgtaccaaggcaggtggatttttttttttttcaagactkaatctctgttgccaggctggagtgsagtggcacratctctgctcactgcaatctctacctcccaggttcaagcgtttctcccaaggcaagtggattttgaaatcaagaaaatgggkttcatgagagaaattcttggcccctgttgctgtcaggaaggcttttagactaaaaagaatggagctaatgaaagcagttggatagggcaagcgtrtgagcattggctttcactggcttagggcagctccaactcccccagaaaaggctctttgtttatggtgaggtcaggacttcagagtgtgactcagaaggtcctcagagctggtaaaaagtgtagactggtgctgtaggccaaaagacaaggtttataaaagcagaaggatttctgagacatcttggacatgtgagcaggtgactcacagacgttctagaaaccatatttcaaagacaatatttttggcagaatcaratggttgctttgtggtcgtttcagggagttccagcaataacataaagaaaattaacagaaaccaacaaatggtagggaaaaacgttggtgatacgtgccaaagggttactatctttaacgcacaaagatgacttacaaattaagaaaaagacaaaacaccctaaaagaaaaatggaagagaaatgagtaacatgtgattagagaataaaaactcaatggctaatagatgcccaagaaaatagtaaaccctgccaatactgcaaaatatttgaaatacggtaatgaaactggctgggcactggctcttgcctctatttctagtgctttgggaggcagtggcaggagtgttgcttgaggccaggagtttgagaccagtctgggtaacatagcgagacccccctctctacaaaaaataatttttttaaatgagccaggtgtggtggtgcacgcctgtagtctgtttcttggaagcctgaggcaggaggatcacttgagcctaggaatttgaggctgcagtgagctctgattgtgccactgcattccagcctgggcgacagagcgagatcctatctcaaaaaaaaaawatawawawatataaagaaatccatcaactcacacaaaaatgttgttgatgggactttgcattattcttataattaagaaaagcaaaatgaaaattcagtaagcaaaacagtgcagttggaaggagctctaagcctccctacttcattctggtgaaggcagggagtcaggaaggagtctggggctcctcctgtctgtgtcctcattttgtctcccacctcctggcccccagttttcctgcaggtgtgagtgtgtcagacctccttctgctctgagtgggagagaactcgctgtactctagggagctgagtttggggaaagactggcccttaagcatcctcccacccagcctttacccccagctctctctccctgtaggacgcctgattttcttggcagaggaagaagctaccctccatccactttcccagggtaggcaaggcagcctcttcccctgggccatccagcctcctgtaggcctggggcttagcaaaacagccagggagggggagactcggaacagtctttttttttttttttttcctcccaccatgagcagtatgaggatgatgccttagctccattgctttgctctcagccttcagacttgctgtaggagaatctctgctgtaccctgtcatgtcttagatttgtgtaattgagggaggcctcccaggcaatttaagtagggatttacttattccttgggagtgctgagcttgtagtggaggaatggtctactcactagtgtatttactcgacttctcctaacaagggtctttccacttggggttgttctgtccagcatcccttgggacttccagggaaagccaaatattctttgctgcccctgcttcttcgacaataaatgcaaaaagtttgaaaaaatcccgtactggtgttgtgtcaccagggtcaaagaccttgaatctctagtaagaagtagaaggcgtcaagaggtcaagttctgactccatagtttcaggacattgtgggacttgattgctgcagtgtgaaatttatggttttgtaagacagatttaaaaccctttcatggcatcttgtagcctttggaataaaatmcaacatcctcaccatggcctatgaagagaccctgcatgatttgggcactasgtgcttttttggggctttgtttgctgtcattttcctccttgttctttccaaccctaggggctttgtcctcatggttccctatgcctggaatgctcttcccactattctgcactggttgacgaygacttcttcacaacttggcttttggggcatttcctttgagagggcttcstgacagtcctgctaaccttttccataggagccctcatgtcattagctgtaccacaactttaacttgtatgtgttcatttacatgtttctgtctcttctgtgaaatggttgctccttgagagtggggcctctgctctgtcttgtacaacacctgacacacgggccaacttataaatatcatgaatgaatgaatgaatggatagctctctagttatcaattgtgactgtatctttccctgccatctcccagctccgtctcacctggaccacctggaaaaacctcttgtaccccataatttcagtgcccctgtctgtatctgaggctatggaaaagctctcyacccaagcaccaaggaatcctgcccttttccgcttgcccggataaacaaagagttatcaaggctaagttgccagttatgttggcttcttctcctgtttgctcttgggaggataggattttgattacaagcataacagcctccagttattgagcatctactgcatacagggcaggcactttgcatacatgatccctgatcttcatagtatccctacatggtaggttttattatcccaatgttgtaagtaagcaaacgaaggatctcacaggtcagtttgctccctgggccacctgacctgtgctcttttttccctatacatcgtggcctaggttttggaacacacaagggcacgcacacggcccttctcagactatgacaatatagtgcactgcaakacctcgcttttttaacaacctaagctgatgggttgagttgtgagagtcagaagcttgcaatttcacttcatctgtctctggagactattctggctttctactgcctggaaagaaggtgggaacaagggctctgtgagggatgattacaccagggcagaaacagctcacctcttgagtgctcatgtgccatacactgtgccgagtgatttatacatatagctttctgtaacccacggagcagctctatttgtactgttattttgagcactattctgcaaatgtggaagctgaggcacacagtaagaaagggtaaacagtggaggctggatgcaaacccaggtagtctgattacagagtttgaaagctcagccaycaggtacctaccaaccagctaaacagatctcatcattcaaagtgtggtccatgcaccagcagctttgacatcctctgggarcctgaatgyagaatctcaggtcccatccagactgaccgagctasaatctgcctcttaacaagatccctcggcgattcacgtgcatgttaaagtttgagaagaactgccccagaaattctrtgaatataaagtaagtgccattttcctgaagtcaaaagctggagatttagagcatcagtgttcttagaaacaacgtgcgacttcagtatcttgcaaactatggcatcaacgaggagctgttcctttgcttgagggaattagtgatgacaaatgaatttagtattttcaacaaaaataaaagcaagttgagcttgcatagttgatccaaggctttaaaaaaaagaggctgcttcagcctgcaggatgttgttgacatagtattacatctaagtacgcagggagccccgagccagggttgctggagtgtccctattgcaagkgaagttttggcaaacacaatctagggattgaaaaggtaactccttcattagatctgcctggaatttacacatctgcaaatgtgagaggacaaaaaggacttttgatccaagagagatcggccccatctccctgtgctgggaaaaaactttgattttcttctttgatgtgaaacattgccattgctagctatatatttgatcatagtcactggacaacttattcagctctagttctttattaggtcctcatggctgctttcttagacatcggaatccttaaaaaagagaattttattttattttttaacctttcccagcttataaatgccccagggacctggaaatgtccacgtgggctttaccaatgatgtatgtcgttctgtttgagtcaaaataatgagtggttgcatagacgatgattgatattgtgtatttccgagtcgcctcattttggggaaggaatatgctgatcgtgcgtcaatttccctcaggttggctctccagcagggggcccaagaaggtctgcacccttttcatgtttctttgctgcttcctttcatcttgccaagttacatttagcaggatattcatctaattccttttttaaaattttaatgctccccattttttkggggggtkggggacaaaaagagccttttaggaaataagcatcaggaactaactaatcaaagygaaactttctgggagasatctgacagccgcatgcctctaatgaccttcaaaaagatcacrtgctccaggcaattacaggatttgggagaaaatagctcattctgaatagccgaacctgctgcaatgttcatcactttgcagccgtgcccctacctccccgcttttgtagcttccttaccccgaagcctcctgaaagagagttcacttggattaaaactcctccagctttaacaaactgcaaaggggacagctgatgctaaaaaaggggatcttgtgcacagtgccaggtttctcctgtagccagagtttttttggctctggctacagaaggtgcctaatacattctgactcatggccaaatattatcaggggactttgttggtcaagctcttgaatatgggtgcagctggaaaaataacctatttgtcaataggttaccagtttcacagctggtagtgcccagaakkgygctgaataaacttcagtgggatccctgctgcttggtgcttgaagttcatctgacgtgaagcctttgtgaaaagagtattcaggaacccagtagcaatcttttcctttattttaattagacmatgcttctctcttgtttgcagggttttttgagattttatgcaaacttttaatgtttttgcctgtcagtgtttccattatttgaaatctttcatattaagtaaaattagccamggccagtgctatattaaagtatcaaaacttttagcatttgctcaccctcctttcctgggragaacaggtttctctacaygattgcctgtatgctttgctatgagtcatagtttagagaaaacccccacgttcctgtgcaatgaaagaagcagcataatgatctcaactcaggcagaatggcctggaaastcaygatatgtggctgcacccagtcggtrcctttgctttgcttgtgttggaggtctcttgcattagtgttrtgaaaatagatgatgagctcrtgcctytgtgactttgtttcttgagacctgcctgatttccatggtcacaagaacacagagaaagatgtgtgggctcccgggggctctgcctgacactgttgagagcgattccagaggagaaggtatctgtggggtaatcttyggatgttattctgaaaagccccaacrtcttcctcataacagcttctaagcttgaggaccaagagttatcctctaaaaaggtgtccccaaacaaggtaggtgactttcccccagtrtttccaggggtgtgagccaagacatggggcaaaatgattaggggacctcctgggtcttggaagtggtttaatccttcctgtagctcaatgtarctgtctgtggttgatgtcactcggagtcaggggtaggagtgtgtgtgatacagtgtagcagagatgccaatctttgtggttgccccrcccttcttgctgtggattgctgctttgaccaagagtgttggaccgatgaaagtatatccagtcctcagtctgaaatttgacgtctgtggctgggtttgaaaggatgagcttraatgtgggcttttgaattagaaatagaataggatttttcagttagcatcgtggatacaggggctgaaaagatgccacaatgagctgaagttaggaaggawcaggggacagctgtgggaggaggacagtgtggggatgactggaggggagtggaaataggggaccatggggcaggggagtggggagagaatatgaaggcttctggtagcaatctgcatgtgtccttacaataaacagtttctcttgaactaactggagtgggtctctttccttgaccatgcggaagacctaatataagaaaggaaacaaagagattgcaggtgtcttccagagagaagatctgttttcctgtgtgttttaatgtggagtctctttctggtctgcttacccactccttgccccctgcatccaccccccttgtatatttttcccttaatgaaaagaaaatagagatcattttaatacagaggtaaarttctagggcctccccagaaaactgtttcatgaatgaggaagctaagaaaaagggccactggctttaaagcccagtaggttaaataggagaayggagaaagttataaaatgattaattggtcaagttgggatgggaaccttaggttataatatcaagmtttaaccttggcactatggacattttgagcaggagaattctttgctgtgggaggggctgttctgtgcattgtaagatatatagcaacatccctggactctacccactaaatgcaggtagcagtccatagttgtgacaacaaatgtctccagccatagacaaacatttcctggtggtaaaaatctcccccagttgmatgtaaatttgttcagccattgtggaaagcagtgtgatgattcctaaaagaacttaaaacagaattaycaatcaacccagcartctcattatggagtatatccccaaaggaatataaataattatataaagatatatgcatacatatgtattctgcagccctattcacaatagcaaatacatggaatccacctaaacgcccatcagtggtagactggataaagaaaatctggtacatatacagcatggagtactacacagccataaaaagaatgaactcatgtacttcacagcaacatggatggagccagaggccagtatccttagcaaactaacgcaggaacagaaaaccaaatactacatgttcttacttataagtgggagctaaacagtgcgaacacagggacatagggaggggaacaacagacaaatagttctaatcgagggcggagggtgggaggagggagaggataaaaaactacctgtcaggtactatgtgcatattacctgtgtgacaaaataatctgtaccaaatgtgggtaccaaatccctgtgacacacagtttacctatataacctgcacatgtacccctgaacctaaaatgaaagttaaaaaataatctttccctgttgagaaccatggggctagacaaaaagccgccttccttcctttcttgaatgaagcttttgtttgtttgaatctgctgtttatgaagggctgtggaggctacagagatgactaaggcacagtctcttacctgtatgaattaacagatttctggaaaatattaagctgatatttatttatcaatttattcatcaaataaagctggaaaataccttcctcttggctttgagtaacagcaaagatatccacctgtgtcaaatgggtaacgctcattctaagtgtaatgaggatctaacctgaggttcccacccaacttgattactttataactttctccatcttcctcctcctactgaactctgctgggttttaaagccaatgggctttttttyycttagcttcgtaattcaaaggataatggtagatgctataacaaataagccctcaaatatcagtggtataacatagtagaagtttgcttcctgctgatgtaatggtgttcctggttggtgaacagctttcctatggccatgcagtgattcagggacctagatttctgccatattgtggctcttccagtcccctaaatctcactgtcttttctttccaatcagcagaaaaataagtgaggagaaaacacgcccctttctyaagagtcctggcctgaatgtgactttgtttatgctgatcttccattagaaaggacaattggactactgatgatttccgatcaagtagaataaatcaatattgaatggctcatcttggctaaaattctgtgacagtctctggttatgaaaatttaccatcaggatcctgttcacataggacactttattcagcagtggggagagtttagcagaattctctttctgcacagtttaagatggagctgggaaaagaacccaagtttttagatacagcagtctrtctgctacttgaatcttttcttctccgccataccaggactggaagacatagattgtgcccaatttctatatcctaattacctaccagaggattgggcatgtaaaatattttcagaggggatgaatggatgagaaatattgttcacaggcttagaggtatacactcaaggaagattttacttgttaacctgaaaattgcaaaacaggtgcttgtagagctgtacccacagcagtacattgatgtcgcaagtatcsgggcgggaaaaactacaattgctgcgtggggtggggtgggggtgaccatagttccctttattagccagagatataagtgacaggagtctaaatgagaacctgaagccaaacaggaacatttatttgatcaggtaactaaaaagttcagggtatctggcttccagcacggctgaatacagatatataacaatgtcttcgagaacgtcttcctgtacctgggctccgctttcctctgtcagactcagtctttggcagattctccttaagtgatggcaaagataacaccagccacaacagatgttcatccttcaacttggccacctcagaaggaagaggggctccagagaatgccccaagattatcattggctggtccagtgccatgtgctcatctctgcacccatcaccagggtctccctctcattgttcagaccaagtcacttgtgcaccattagcacaaggggtgcccagtccacagggataaaggggcaagcagggacaattcttcagtaaaaaactagaatggatgcttgatgaggaaagatattctatgtccactatatttctattgtcattatggaatgaacctgtgtattttttatcttaacactcatttccattcttctggtaattgtatgtaatcaatctctgttaagccctctccccagctgtagcccstgagctttttgtagagattcctcctggtgcagagatggagcatatggttcagtgctggaacaatgyggtcattatatgctcctggtccctgtgaacagttcggggatggttatctggtccaggaagacccagtgaggtgaaatgagactttacctcaaacttgagtaaaagagattcttttttcaaaattaactttttattatgatgattttccaaaatgcatgaaaatagaggtaactctaatcataagcagagataactctcctatactcaccatccagcttcagcatttatcaactcatggacaatcttaattcattttatygccacccacagtagattattttggagcaaattcccaacatcctatcatttcatctctatacttttcaatatgcgtctctaaagataagagctcctgggggaaaagacttggtattttctattaaaagtgaacctgaaaagatgtagggaataaaatcactgctaccatcttgcttccacttggagccaasaattggagccaacaactagagccaactgtgtggcagcagaacagcaagaaggaggaacacgaaatccagatgacagattttgggtcctgaattcacctgtgcatggagtaagcttagctactttttttttttttttcagtcacttgagctagaatattccctgtagctatgttgttgatgccccactcatatcctcttggcccaccctgagggtcacctgaagcttagatggacagttcccaacacagtgatggcttctcacctcaagcacaggcatctctctgcctaagaatgttctctggccatacgattgtgtttggctcctgcrtatggcagacctgaagtggcaggggataaataaatgccccccagaactgtctttaatgatgagggatagaagttggcataccctggcttctttgctgctcagggagacagtamtgaggtgtgtcctacactgttattggagggcccttgtggggttaaatccctgttatccccagaagtaaccttcccatgaatttccctgctgctggcttcttttcctttcctgtcttatttttctacttcctcaccacacttcctgtgatcacctyccaactaaaccatgtccccccagtttcttgctttagcatctgctctaaagtaaaacttaactgaagtaattcccctttgcttcattttgcttaagcttccatggttctatttcctttttaaaaatttctatttaattttaagttctgggatacatgtacagaacataggtttgttacctaggtagacatttgccatartggattgctgcacctctcaacctatcacctaggtattaagccccatatgcattagctatttatcctgatgctctcccttccccaccaccaacagactctggtgtgtgttcccctccctgtgtccatgtgttctcattgttcagctctcacttatgagtgagaacatgtggtttttggttttctgttcctgtgttggtttgttgaggatgatggcttccagcttcatccatgtccctgcaaaggacgtgatctcattcctttttatggctggatagtattccataatatgtatgtaccacattttctttatccagtctatcattgatgggcatttgggttaattccatgtctttgctattgtggatagtgctaaaataaacatacgtgtgcatgtatctttatgacggaatggtttatattcctttaagtatataccctgtaacgggattgctgggtcaaatggtatttctggttctagatcttagaagaatcactacactgtcttccacaatggttgaactaatttacattcccaccaaaagtgttcatggttctatttctggtcattcttaaaacaaaaaaaaagtcctgagtaattatgctccatatttccatccccagtatttgcttgagaaatgaaataatgaaggcttctgagaaacagtgtccccacgcccccataccccattcacacaaaatgttttcagcttgagaatacagttgcggaagccaagttgggtctcaggaatatctggtttgcactaaatttcacctgcagaattataaaattcaggtgctgttgccttgggcacaactgctgggctctgataagtagagtgggtgtcccagcagcctgtcctgttggttcagataatgatttatgggggggcgcaggccccagggtgtgcacatggatggatgctctgcttatcctcctccagataggtttctggcatctaagacaagagaggagtggggtcaacaaggagagcttctgtctcttcctgtttaagcatctctcctactacctacaaatgaaaacatacaaatactatgttgatggtatagcaagtaactttaaagaaggcccccagaaatacttcactaattggagaccagttctccagcattttgaaaccataaggaaattacaaagtaagctgaaaaaaaaaaacttagatcatgcaaaagagtggtcaacaaagtccatgtattctacacaaaggagagccgtcttaagactgtctctccaggctagtttacttttactttatacacaattgcaacagagcattgaaagcagcacattttaagcagggaaggaacatgcacagcaagggctgcaaactcaaaaaattaaatgaaccagagaataattttaaacaagtgaaagaggccagttgatggattaatgccatgtggggacgtgggtccagtgttgacagttcttccatgttttcaggaagaaactgaaaattggaattttaagtgaaataaccttagttttacatagaaaatatctaaacaaaaaatttttaaaacagcatgcagacctggcacatcgggggcgtgactttgccccattaaatgaagcataaattctctattttgccagtgttcctatttggctcatataggacactttaatttgtgattctttggttattagatcactagctttttaagcacaggctttgggctctgtttgccttcttgggaaatactgtcagaaatcagtgggttcataaccttttgaagaagtcactcttattttggttgagtgggcagtgttcttagctacccaaaacaaactagctattcacttcctgggatcgctgggaccggtgcctgcgggtttctggggacacagaagatacatcttcctcctccctctcctgtgtttacacaatctgctttgaaaggttatgattcttctgtgggcgactggcctacagcatctgcctgctttgcttgatttggttcatttcacccaggctggcatcttcgagtctggggtccttttggctttacccgcacataatctcttgggtggatcaaaacctcttcaactctctcttgagtttccaagcaggctcccctgtggggcttttctaagagtgtttagcattggcattgctgcagagcacagtctcactgtgtggttttatgaaggatttgttttttaaaatttattttctatttttgtgtctttagaggcagggtcttgctctgttgcccaggctggagtgcagtggcatgatcatagctcactgcagcgttgaactcaggctcaggcaatttttcttgcctcagcctccagagtagctggcactacaggcacacaccaccatgcatggctaattaaatctttttttttcttttttttttaagaacgagggtctttgttatccaggttggtcttgaactctgccctagccttctgagtagctgggattacatgtgtgagccaccatgcccaactaaggttaaaaatcttaagatgcccttcaagactctactcctcaaggtcatgaaatagtcttttaaatttgttaaaaataatgctgagtgtattttattttcaactcaataacgctgtcacacatattaaacaataatggcattttcccatttatttccttctgcatatatatgtgtgcattgatgtgcatgtgtatgtatgtatctgtatttatacaagtacataagatataaatatatccatacctatttgtaattgcacacaatttatacatgcagtagtgtataagctgcatgtttcacttactatcaaaatctctgtaagcataatttttatttattctgattatttaatacacagtgatgtaactgtgatcccaaaatgtgcaaagttaaagccttcaactgcagctgaggagagggcaggaatggtatatggggacggtggtgagtcacgaatgatgggcaggcggccatgagcagggcagcctcctccccggggccagggacaggggaatggcctaaggagccaggacccaagggtagcccaggaccggggaagggggcagagacctccycttggcctaggtcaggagctcagaagtgccacatggctgagggggcagcggcccgggaagagccagaggcagagccaggaaagcaccatttcctgggggggctgggggcagggaggtaccctacaggagaagccaggtggggcctcctgtccctggggtgggggccatgctggagcatgctgcagcaagaaagacctgaggcaggcgcagggcctgagagcctggctggctgggctggggggcgcccccaggcagcctggcccagggagcaggcccgactctgtaggggatgctcagcgaggggctgcagagccctcaggacctctcctcctctctccctggaaaggagctggggaacccgtagtgcaaatctgtggaccactcagttatggagagaggttgtgcccgaaggtggacactggggtatgctccctccaccacctcatcctccactgctatcctcagtacagctgcttctggtaagcgtgcaggccatggacgccaccctcgatctgggctgacatggtccacttctcaaatttgagctctyctgagtacatcatggagccatgctggttactcgctatgaggtagggcacaaacttctgaatggaccctttgtcctggatggaggccgagacaccctgcacaatattcaccttttccccctcgctgaagtatcgtttctggctgctgctgctcttctccatggcatctagcgagcccatgccccagtacttcttgagctgcaccctgtctgagaagaagtactcgcygctgggcctccgtggtggtggccagcagggagcccatcatcactgtggaggctccaagggccagggccttgaccacgtgccccacggtctggatgccacatcggctatgatggacacaccaaagtgctgagcgtacttggccaccttgtacacagcagtgccctggggctgaccgcaggccatcacttcctgggtgatgcagatagagctgyagcccataactacatgcagtccatccacaccagtgtcartcaggttcttagcctgggctgctgtcaccacattcctcccaatcacctggaggtggaggtacttctgtttgatgtaatgcaccatggtgatttgatacaccgagttcccttgggaggagtccaagactatgacgttgatgcctacccaggtgagcaggtccaggcagtatttktcatcctcatgggtgcccacagctgccctgcacagcagctgcttgtgggaatccttgraggccagaatgtagtctcgattcttcttcaggttggtgtgggagacgatggccactagctcatggcgatcattgaccayaggcagcttcccytgctaggctgaaggatctcatttgcctstttcaatgtcatgcctgctggagccaccatcagcttgatccttggcgtcatcacctcactgaggagggtggtgtggtccttctcagcaagaaagttgatgtctcgggaggagatgatgcccaccaacttgctscccatggtgcccatctcagtgatgaggatgcaagagaagccatgccggatcttggcctccagcacatcacccacagtgtgtgaggggctcagcaccacggggtccgtgatgaagccctgttcaaacttcttgaccttatgcacctcgttggcctggaactctggggtgcagttgtggtgaatgaaaccaatacctcccatcagagccatygcgatggccatgtcggcctctgtctcagtgtccataggggaagagatcagtggtgtcttcagcatgatcttccgggtcagggctgaagttaggtctacctcatcagctatgaaatctatgaaccatgggagaatcaggaagttgttgtgggtgcggcagttggcgccgaggaagagctgctgcacggtgagccagtcctggggcacgtagccggtgccgccactgatcagatggtycgccatgctgccgcaaggccccgcgaagcgacaaacacccgcgcggccgcctgccgctgctgccgctgctgctgacgctgtgggcctgggaactgtaagcataatttttaatgcccatagtggtggttatttaaccacttagtgttgggtgccttggtcattttcatggaaacttttgctaatataaatgccactgataaacatctctgtgcataaacctttatatttactgttattttctcagtatagattccttttagaaatggaattgaacaaatcccttgaaagcctccaaactgtctcatttcaatcagttcttttaagagctgaagtaagagtattcttagctccacttaattggtcgagctgatatactagctttttcttgatttttgtctgaagtaattaggttaagaaaagttagtttaacacatacatccctgaatagcagaaactgaatccaccacagatgtacttcttactcgtctgaagtcraatgtggatgtttgtattcagagggcggccctctgacaagtgacgattcaggggctcagctcctttcatcttttggttctgccaccttcaacatatggcttctaaggccactgacatcatctgtgttgagctgtgaaaggagtggagcctgggaagttttttatggactaaatattcccaggaggaaaacggagtaggatttatgatcacttatccagaacctgctacaagatttctccttatctcatacttgcagtctgtcagcaaatcctgttggttttatctttgaaatatcccttgacttacccacttttctcccttgcccatgcaccccccagtcctggctggcgccatcactcccctggatcactccaatagcttcctcattggtatctctcttccactttgcccccttgccacttgcttctccatattctgttaagaaatctttattaaaacaaacagttccacgacattccccaggtaaaaaccatgtaatagcgtccattagaatttattaaaaaatccaaactatttaccttgatgaggtcctgtgtgatctagccttgtctattctccagtctcatccattaccacgttcccctaactcgttaaatgctattccaaatggtttccattcaacttttcaaatttgccaagctctttcttaccctgtagcctctgcgtgtgccactccctttgcccagaactttcttgttgttcttcacttgacaggttatttctgtttttatttaaaattctttttatttaataacaatgagaacacatggacacaggaaggggaacatcacactctggggactgttgtggggtggggggatgggggagggatagcattaggagatatagctaatgctagatgacgagttaatggatgcagcacaccagcatggcacatgtatacatatgtaactaacctgcacattgtgcacatgtaccctaaaacttaaagtataataataataaaattaaaaaaaawtttattttttttgtgggtacatagtaggtgtatatatttatggggtacatgagatgttttaatacaggcatgcaatgtgaaataatcacatcatggaaaatgaggtctccatccccttgagcatttatcctttgtgttacaaacgatccaattatatattttttgttatttaaaaatgttcaattattgactatagtcaccctgttgtgctatttattaaatggtaggtcttattcattcttcctattttttttttttttgtaatctgattatttcttgttctttggatttcagcctaccttcatggtgtgaacgtacttggttataatgcattgccttttgttacatttttctatttgatctgctcatattttgtggggcacttttgcatgtatgtttgcgaggaaggttggtctagagtttccttataatggcttcctctggttttggaatcagggtaatactatcctcataacatgaattgggaagtattgccttctgaacactagtttctgaaataatttgtgtaggactcttttttttttttccttaaatgttttatagagtgcagcagagaagacatctgggcctgaagtttactttgtgggagggttttaaactatgggttcaatttctttaattgatacagggttggtgaaggtttctatttctttttgaaaaagctttggtaatttgtatctttccaggaatttgtccatttcatctaggttgtcaaatttataggcataagggttttttaatccttttaatatctgaaagtctgtagtaatgcaccagactttatttctgatagtctcttttcttcttgatcagtctacctaggtttatcaattttgtttttttttktttttttaaagagaatcagctttgggtttcattagttttctctgttatttcttaattagcttctcagcctaaatgttttctcagaaaggatgtttcctgaccattctacctaaggtggcttcacctttctcttgccttctcctctgattatttgttttctacctcaggtctatgtgtaattattttatgtgttatgtgctttttttgcttctatgttacttgcagataytgcagaatagtaataagtctgcctaacatggtaatgtgcttggtgaatttccaagaacatatatggtggtttccaagtatgctagcacagcagtatctatagtggttaagagactagggtctagagttggctcatctcagctttaaccccggctacatcgtacactaagtgtgtgaccctgaacacgtgtaaccgtgaacacaaattctgattccttctgagatgagggttgtgcaacatggcagctgtgatcaggaggcctggggtttgagttctggctctgttacctgtcagctgtgtgattcttgaggcaattacttctctgagacccaatgatatggtttggctgtgtccccactcaaatctcatcttgaattttaactcccacaattcccacatgttgtgggagggacccagtgggaggtaactgaatcatgggggtggatctttcttatgctgttctcacaatagtgaataaggtctcatgagatccaatggtttcaaaaagaggaattctcctgcacaagctctctgtctttgcctgctgccatccatgtaagacttgacttgcaccttcttgctttccaccatgattgtgaggccttcccagccatgtggaactgtaagtccattaaacctctttttcttcccagtttcagttatgtctttatcagcagcatgaaaatggactaatacactcaattttctcttctttaaaatgatttgatgcaaggagtacctaatcttgggattattgggaggaactggatgagacatacatgagtaggatctagcccagggttggccttttgcatatgaggcattccctcaaactgtactttcccagaacttcagctctccccaccagagggtaagcatcactgtagcaggcactttgcacgttttgtgcacctctgtacccycactgccttgatcagtgtggtcagacaggcactgaaaaatgcctgtgaaatggattcttctttttgttgcttatgaaatctgcaactgtgagttgagtgtcctgaagctcagcagggcaacgatggcttcaacaatctggcccttgcttgtctcaggtgagctgctcctttccctttcaggaatcttctaaactgctgggattcccagggggaggacgggacctttagggatcttgcaaaycccagcagaatatcagttttcttcacagaagcrtgtctaacttccttcagccctggtctgcaaattccagacatgaaactgtgctatttgctagcttggcctggcaggtatttattcaaaggctgcaggactccatgatagagagtagcaacagagccagcaggatcctgtaagtactcctcatgcaactacctgcagtggatttaaagtcagctcagggcagtttcaacaccagagttggaggaaagaggttgtgtgtacattgtcytctggggactgctgctgtttatgcctygtggtttcctttgggggagacagatccaccctgctttcctcatccatcttcctacatggatatatcttgttatctagtgctgaaatggcatggacacaggggctgggactagtgctgagatcttccgcttagctcttccaaatacagaaagaacttccctgtgtatggttaggattgaagtacatgtgcttggttcaacattccttcaatcagcaggaaatccagtcatcatcctagccctccatttcattctttgtcttgcttcatgatgtcccttaggggtaaagatttctgaattcaaagccagctgagctgggttcaaatctccacatgtccatttatgagatgaacatcatgtcttctgtctgattcatttgtcttagtttcttcctctgaaaatggaggtaatggcaatgtctattctggcatgttctcgggaggctgaaataacacccaggcttgctgcttattgcacagcccagcttccctgccttccttctctcccttcatgaatccctccatgtcctgctctacctgttgcctttctgttcataagagtattttgaattcctgccttattctccttttttctctagaagtgaaggagccaacttccccaaagtccgtggaatgccattttactttgttaggaaaaaaatcactttttcttatgtgcattctcatctatccattcaacagacgtcatcggagtgccttctgggggtcaggccacttccaggtaccagggattcagagacaaactagtcacgctccctatcttcaagggacttagaatcatccccagagaaggatgctgtgaacaacctcacgtgtgatggtgtggccactttggttgtactagagtggtgggatttgggagktttttcttatttttatttatttattgtaaatttttttaaattaaaacaattttaaatagagacagggtctcaatatattgcccaggttggtctcgaattcctggtctcaagcagtcctccctctcagtctcccaaagtgctaggattacagawgtgagccactgtgccagaccactttttcttatgtgtaaattaaaaaagaatttgaacaggaatgaaagataaaaagaaaaaaaaaaacacttccccaaacaaaaaaaaaaaactctttcacttataagaatggtcatcatcttggctatttcagatggggaagtacgcatgcctcatyttatccaagtttctcacagttctrtaagtcttttttcacacacagttccatacacaaaaggtrgctttgcaaaaaayttcttttaacatagctggcaggctatactgtacatatatctatacacatgtatgcatgtatgtgcwtatayatatacctttgcatatatatgtttatgcatacattttattttgctttatttaraattattatttttggagatagagtcttgccttgtcaccgaggctggcgtgcagtggcacgatcttagctgtctgcaacccccacctcctgggttcaagccattctcctgcctcagcctcccaagtagctgggattacgtgtgcgcaccaccatgcccagctaatttttgtatttttagcagagatggggtttcaccgtgttggccaggctgatctcaaactcctaacctcaggagatctgcccacctcaactcagcctccttaagcgctggaattacaagcatgaaccaccatgcccagccttatttagaatttcatagggaattcttatgttattaaaactaagggttataarggctkccaaatcgctgtcatatggctggtctcaaatgcatttaaacaccccctcccccattgattttttttttttacatggttttcttatgtttgaaaatttgtagtttctctattaaacattgggtcagctgattctactgcccaggagacccaggcaacacctcaaaagtccacaactctcttggccagatgtgactgttctatttcccagctcatttttctgtgtctgcagaaagacacagtgcaaactgttaaatttggaggtttttggcagcttcattaaagggcaaggattttcctctttgggggtgggcttyatgttttaatggtcgtggtcagcattgctgggtgaggatccttaggctttttgtcaggggttcagggccttctggcttccccaggcttctccaggcttctccggcttccrtctctagagaagactcgggatgaactctgaattcttctagaccccagctaccagttcggctccagacccagagtggcactgctttaatctyggcaaagaagactaaagacttttttgtgtaacgaattaaaagtttgcttcagkcttcttttattttatgcctctgctgcactctcgtaacatttagcacctccccctgttgtcatatcatttatcatatcgtggagtttcaggtgtcttattttggttttcctgtcaatcttcctcctacactctgcgctcacaagggacatggaaacctgtcctgtttctcctcataccctgccgtcgactgcggcccctgcacacagtggggtytacgawgttsatgggagccaagggattgttgtactgattttttaaggctggatatttatttttcggtatsctttgcactttttgcctagggaatcaggactcagtacagaaacttgtctytgtcatgtgcgcaccctggagaatccaatcattggaaaaaataaaaatacacatagagaacaccattccttcccataaccacgtaaaattgtgctcgtgcaagctttccatatgcaagagtgcttttgatctaatcagatggaaagccagaagcagaggggaatgaatgtaacttacatactgattattaagtcattcattctagtagtatttattggactcctatgatattccttcttcaaactggtcctcctccagggcatggcaccaccatcctcccagatgcccaggctcaacttsttgctgccaccatttccctcacacccctcrccctgtgactacaccttctacatagtrttcatatccatccacttttctcttttctctgctggccagaatcctctaatcttttaccttgaaaggttcaataacagatgaatgaacagatgacagaatgaatacgtcgaatagtttcttcaaactggtttgtgttaagagaaatagcatttatatttttatttagtcctagagaaaaaataacaaccctttgcctctgcctactctcgttttcacagtcccttcacaaatattgtatcttcggttatgctcatgtgtgagttctgtattttaagaaggacattgataamctgagctygttaaaaggaacatgactaagggaggtacaggctgctggaagtggttcctgaataacatcaacaaaaggataaatgtttgcatttctgagagtggagagaaatgaggaagtgagaggggtgagtagattgctatacccaattatttgaagggctttcatcttgaacatagagcagatacattccatggtgctctagaatctaagggaagaagtagagcccatagagacaaaatctacctccaaaaagtatgtggaagagctatgagctggctaattaagtctagagttctgtcactggaggtagtcagcagagtaaacatgtcaggggcagggattccggcatacatatggactctcttgttttgtagattttctgaggttattaggacttctggcgatattcttatctatagataggtattgcttcagctgcctaaacccatatctccctgtacccccaaaacactcaagagccatagccataaaacttcaagaagatgaaatattttgggrgttagtaatacccttgatggttagagttatatgtggctgagattcttcttgtatctattctggtctcatttaagatggctgaaatgattgatcactgcccttcagagactcatatattttctgctctgcaaaatgtctgcaaattgcatcccagcttgtgcaaggagagccactcccccatccccaagtgtgttgtttctttcagtgatggtgattcagaggctgtgatacatcggcttagctgttttgggtttcagctttctcatgactagatgtatgtytttggacaagtttacattttcccatatttactttctttgtccttaaaaaaaaagttgctgttgctgctgatagtatctattcctcatagttgcgagtgggtctcctattagagaaaataaaaggaattgctatattagtatctttccagctagtctttgagcttcttgatgtcaaggatcattcattcttttcgtcccagtgcctaccataggggatggcacagagcagacaatagatgcttgttaaatgatgcagcaaccgaggcatccactccatgtctgtgagtgggatacgtctctcagagcaagagtgccccagtgcaagagtgatctagaacagtggaggaagggaggataaatgtagtctttgattttggagagacctaagtttgaatcctagctctacctcttgctagctctgtggtcttagacaagttacctaacctctctgagcccatgttagtccattcttgtgttgctataaagaaacacccaaggcagcctggcatggtggtgcgtgcctgtaatcccagctacttgggaggctgaggcacaagaattgcttgaacctaggaggcgaaggttgcagtgagcagagatcacaacactgcactacagcctgggcaatagagtgagactctgtcccccccaataaaaaagaaaagaaaaaaaagaaaaaaagaagaaagaaatacccaacattaggtaatttgtaaagaagagaggtttaattggctcacggttctgcaggctatacaggaagcatggtgctggcttcagcttggcttctggtgaggcctcaggaggcttccaatcatggtggaaggtgaaaggggggtagcatatcgcatggtgaaagacagagcaagagagaaaggggatcrgtgccacactcttttaaacaaccaaatctcatgtgaactaagagcgagagctcactcattaccagggttatggtgctaggcygttcatgagggatctgcccccatgatctaatggcctcccgccaggccctacctccaacactggaggtgacatttcaacatgagtttggagggaacaaacacccaaaccatatcagaacctctgtgtccttattgaaatagttggtgaaaatagcaccaatgtctaggagttcgtgtgatgattagatgagctgattctgtaaaaaatacccctctcaatctacaaacatactcattgctccataaatactgctattactattatctctaggattaccaccatgttttcagcttttcctgtcacccttgcctacacaaaagtggctcgatgttctagaaattgagactaaactaaactttgaatagattttcccaaacctgccaaaatatcccccaaattatagcaataaccattccctcctagagtggggctatctctccagcggaagatctgaaggttgtgtgagggatgctttttctcttgtctccctctactttcttgtagcctgagatatatagcaatttccaaggcagggattggtaaagtagactgacagcccaggttttccttgctgggagattaggctcttgtcccaagtttataattggtatcccaaataatggattgagaggtgttggccagaggggagaagaactggcaacatcaccrcctaaatgaccccagggattctggccaaaagcagrgagcaatctttctcgaagccccaacatctgctgttgctcagaaagcttcctggcagtttgagccaacttaatcagactgttctcttccacggcgctcggaggttttcatcctttgggacaagagatagctctgagttacttaacttacctggttcttgtatacgcttcatgttgtggcttttagtttctkttctctccaaggtgagccagttggatcttccaggaaacagatgctgagatggagttaggggcacaagaagtttattgagagggcataagtacctgggaaaaaataaaatagggaaggcaggaagtagaattgtgcaagggagagcttcagaccaccatgcagaccagacagtctctgccaacctaacagaaagctttggagaagaggttgcccatgaaaggagccccatgttgggcagaagttgccrggccccatgtccccctcatgccctgtcactggctgaggactgctctggcagaatgtgacctcagytcaaaagyggaagtgaatcctgagggctctgaagccagaggatgtcagtaacctgcacccccagtggctgaatgacacattcttttttgaaggcagatcggatccaagtgtctcctccatggaagtcacacctggagaatcacaccttgaaaaacattggccagcacgtctgtgatggattaactccagtggttagggagcctggctgagtgccaccatctgggccattcaaatcagttttctccacaaatatttacttacactttctgggcgctaatcatcctggtgggagaactgattgttataaagtgaatccagcaggggggcactatgccttcaaataacataaagctgcacagatggagtgaacagtgtggacagacaatcatttaaaaagatgtgaactgaaaagcatcttacaagagttacaaagatcatcactataacaacgactatcgtttattgaatcatcaggatgtgccaggtgctttctacatgccatctcatttcactgggaggtgagtgggcttattactcccagtttacagatgaggaaatggaggtgcagaaagaagtaacttgaccaacatcagtcgaaatacatctccccatttccatcaccagctctgtgatccaacactcaacatctcttgccaggactaccaaaggtcttcgaattactctcctttgcacaagcatctttgcttcttgctcaaaatctatcctctctactgaagccagtgggatctttcaaaatgcaaacccgatcatgttgtttctctgctgaaaacggtttcatggcttcccgttgctatggtgataggaataaaatttgtctctgtggccttccaagcacttcatggctgacctcggctacctctggagccccacctctcacctgctccttgcaaaagtaatattggccttcttgcagttgccctcatgtccccccttcacctgtctgacatgggccctttgcacctgctgttcattctgctgatacttcttgactagtaaattgttttcatgtacttaaatagcactcgctacaatttgtgatgttgctttacttttgtgattattgactaactcctgcctccctgagctccctcaatgaagctccgtaagaatggagaattatccatcttcactgttatatccccagcactcggcacctcaggaacttcacggaatgagcagacgtttcagtactggtgtttggaataacaaacattctgacttcaataccatgttgaaaaagcagagttccttctatttgggagtgaaggagggtcctgaaggtatcttctaggaagtagcatttgaatctagcctttgaagtgagttamctttattctgtttctgactccagtaaacaagccagcaaatcaaacccttagagatggcaagactaccttaacagagcaggtgcagatctcttctgacccgtcctactctcagaggacagcagctccagatagtatcatccttgtgaaaaaccaccaacttccacattttctttgagccaggggaacactagttagctgaggaagggggtgcaagggagggagacaggatggcattctctttccttctctcagttatttgcttctcccagtgctgaatctaggcactccagagacagggccctgaattctgagctctggtgatttgcatttaattactaagaatgttttatttttctcttgtaaaattgtaatgctgcttgcagcattaaaaggagtttcttctggaatgaaaacaccaagcttttgagtaagtatcttttatgctgaacatggggagtcatccaaaatagggagttgattttcataatggttttgcagttactcataatgatgccctttgtaagcctttaaggtcaaggaaaaaaatcataggtcagatgcacaaggtatggggaatgttagaaatttctttgctgtgatctaaattcctctagatgagtggtttttttgagcattttctaaattatttttaacaactatttggagaacacaaactgaaataacccaaatcaatactagttttatttatttatttttccttttctaaaatttccataggtttttttttggggggggaggggggacagtwggtatttggttacatgagtagttcagtgatgatttctgagattttggtgcacccatcacccgagcagtatacatttaatccaatttgtagtcttttattcctcaccaccctttcccctgaatttccagcgtccattgtgtcattcttatgcctttgcattctcatagcttagctctcacttacaagtgagaacatacaatgtttggttctccattcctgagttactttacttagaataatagtcttcagttccattcaggttggtgcagatgccattaattcattcctttttaaggctgagttttattccatcgtgtatatatacataccacaatttgtttagccacttgtcgattaatgggcatttgggctgattccatatttttgcatttgtgaattgtgctgctgtaaacatgtgtgtgcaaatgtctttttggtataatgacttcttttcctctgggtagatacccagtagtgggattgctgtgccaaatggtagttctccttttagttatttaagctatctccacactgttttccatagtggttgtactagtttacattcccaccagcagtgcagaagtgtttccttttcaccacatccatgccaatgtctatttttttaattttttgattatggccattcttgcaggaataaagtggtattgcattgtggtttgatttgcatttccctgatcattactgatgttgagcatttgttcatatgtttgttggccatttgtacgtcttcttttgagaactatctgttcatgcccttagcccacttttgtttgggcttgctaatttgtttgctaattgtttttttttcttgctaatttgtttgagttccttgtagattctagatattagtcctttggatgtatggttgtgaagattttctcacactctgtgggttgtgtatttagtctgctgactgttcttttggctgtgcagaagctctttagtttaattaagtaccgcctatttgtctttgtttttgttgcatttgctttgggttcttggtcatgaaatctttgcctaatccaatgtctagaagggattttcccgtgttaccttctagaatttttatggttttaggtcttagatttaagtccttgatccaccttgagttgatttttgcttaaggtgagagatgaggatccactttagttctcctacatgttagatgaagggtcttaagaaagaaagtgcaggagggtcggatgcagtttagggatctgcccacatttatcagccatccctgtccccaccactgcccacctctggctcactaggatctaggatatgccaatagctgcagatttggttaggatccctttccagtccctgggtttcaggaaggcttagggaccaggaggaagagcaaaagtgttctctgccagcccctstrrtgaaactgctgatccaatctcactggagactccattcctttcctgttgcttcatagatgagatcatggtaggatgcagtctccaagacaccaaaatgatatatgtagggtgaagatttcacagggaagaagcccgggtcctcattctctgttttccaacttcaaacatctctacgattatttgtttagtgtgtgctttaaaccacttgcattttaatttaagcacatttatttttaaaaagcaacttggcatcacagccagaaatggaaaaccagtatcacttcccacaaatagaaagtaagttgcaaaaatatataccacgaagaccaaacagctcagagactgctgcctaaggctcagagcctgaggcctgatctcgctgttaaaaagggagattagcgagtgttgtagggtgtttgggactttttccctgatgttttcagaagagttgaaacagacttgaaagggagcaacttttgcaccatgtgacttgatgttatttaattcagtctccttgtaccacctaaaaattatcacagctaacacccgtgctatagcctcacacctgggaaagggatctggtctttttcagtaaattgttaattccacattggttcttagtctcctgggcaggctcagagaatgtggcttgagagtgatggagaggacaggttagtctcaaggagttagttgtggttgtagcaggtctatgtgtgggggactgaccagtaggggaagtacaaggagaatggggtatgtggcacaggtaaggaggagggcagggaaatgagaccaccagcaagaaagaactgatagttagaacagtggagtaaaatccacactttcactgttgtgtctggactttgccccttggaagacatttgggaaaggtgatgtggggctggaagtctatgctgaccggccaagagagtaaaktgtgtgtgtgtgtgtgtgtgtgtgtgtgtgtgtgtgtgtgtgtgtgtgttttaccacaatttaaaaaaaattgaaaaagaagaacactattagttacctgagaatcaatatagaccatggttctcacactttagtgaacatcagaaaccccgagatgcctgattaaagcacaggttgccggtacaccaccgaagtgtcagattcagtaggtctgggtgaggcccaagaatctgcatttgttacaagtctccgggtggttaggtgctgctgctggttgggaactgctgtaaaccatttactttggtacccacaggtccagagaatgtcagaatgtcactatcctctgagtcccgtaggggctgtcaacctaggaggcacattagaatcacccaaggagcctaaaaaacaaacatagaaacaaaaacatggatgcctgggccctaaacccccagtgaatctgattttattagtctggggtggggcttgggctcatatgttttttaaactgtatatgcatttagatatattttctttttttaactttttatttcaggggtacatgtgcaggtttgttacacaggtaaacttgtgtcatgagtagatatattttcaagcttacagaaaagttgaaagaatagtagaaagaactcctatattctctttattcagattcaccagttgcttacattttgccctatttctttcacactttttttttgtaggaatatcactgaagtgatattgtgtccttcttggtgcattgtatcaagagatgatgtccgttggtcttgatattggtgatattaattttgactccgtggttaaggtagtatctgcagtctctactgtaaagttgctatttcctctttgtaattaacaagtaacttgtagggagttctgatgctgggttctgatgcttcctgcttagaaacctgcactaggaagacgggatacactttcaatgtagctcctatattattaggcagatacattgagactatataaatatcctattccttatcatgtttttactcaccagctttagcatccattgatgttttctaactccatcattccttctctttactagtgttctgctataaggaagaacatttatttttacttttatactttatattagcatgggctcaagattcttaattttacagtgggttataatccattactgtcgttatttatatttatgcttaaattgtctcagattttatcggtcagcacctcaacctggctcttgtattcttttgacacattcttgtcttagtgagctcaggcttccatgacaaaatatcatagactgggtgtcttaaacaacaaaaatttatttttttcatggttctaaaagctggaagtccaagatcagggagctggcgtggttgggtttgagtaagggctctcttactggtttgcagacagctgtcttctctctgtgtgctcatatggccttttctcagtgcatgctggtggagagagagagagagagaaatctctcttcttcctctacttacaagttcaccagtcctatcaaactggggtcctactcttatgacctcatttaaccttagttacctcctaaaagccctatctccaaatatagtcaatggcaggttaaggcttcaatatatgaatttgtaggggacaaaattccatccctagaagtcctcattttttttttttttttttttttttggtgcacattcccttactttctggaacaataagatgctcttggttcattttatacttttcctgcttcaaccctggaatcagcaatcagtcatttctccaagggtctgggttcctcttttaaaaaatgctttctgggccaggcacagtggctcatgcctataatcccagcactttgggaggttgaggcgggcagatmactggaggtaaggagtttgagaccagcctggccaacgtggtgaaaccctgtctctactaaaaatacaaaaatcagccaggcattgtggtgggtgcctgtactcccagctactcaggaggctgaggcaggagaatcgcttgaacccaagaggtggaggttgcagtgagctgagattgtgccattgcaccccagcctgggcaataagagcgagattccatctcaaaaaaaaaaaactgttttcttggtgagaataatatgcagtcagaactgagaactagagttctaaaaaaatcccctcatgtatacccacattctatagatgaagaagctgttattaagagatagggaatgaccagctcaaagtcacacagcaggcgagtggcagaactgagcctgtaactctcacctttcctcagtccagcactttttaaaaattacagcctcctgagccctcaccattttgtttgcaagtgtcttgttgattmactccattacagatttaggacattataaccagggacccagtcattttccttattggtatctcctctgtacacgtggcttagtgctgagcagagagtaactgctccatgaaaccttggggcctcagattatttttctgacagccaggttctgatgcttcctgtttagaaacctggagtaggaggacaggagacatgggtttcactgtagctcctatattcactcactgggtgatgcatcagttctctttgggtttcattctcattgatacaaggagagaaaccacactacgtgggctctctggtgatgtcttgggcagagtttcccagacaatctcttccctacggtcttagacaccctgggcaaaagccaaaaccggcacactggcacgtctccctcacgtaattggccaaactaagtcacgtgatcaaactcaaagtcaagaggtgaggaactgtatcctggttcttaagtggcagggaccacagaatcacgtgacagtgacatgtttccagtaagagatgaagaattgggccagttgtgcaatcatgcaatctactgcaaaaggttttttgtttttttttttcactttgttgcccgggtattccctaaaacacccagagactstagctcttaaatataaggctgattaaagctgatcgatgccacctgactataatactgtcacttgagtgaaggtgccaatgctacgcagcaaatgtaggagagatgctgtagattaactgtatgtttttagaagctatggaggcccagcccctcctacaagtcagggctgaacctagtggtctagtaagatggggaggcctgatgagaagcaggacacacacctgggatgtgcctatgatgattgagatcttctgacagaggctgctccttttggagctaggcaagataaaatgacacaatttcctttgggacctgcaggctgcaagagcaatggtacctaccccatctgttattatgacatacggaccctgcctgcagtgctgagcaactgtgactctgagccccacttgctcttctttcttctgggtttcagaaaggttggccgggcgtggggctcatgcctgtaatcagagcactttgggaggctgaggcgggtggatcacttgagccaggagtttgaggccagcctggccaacatggcgaaaccccacctctactaaaaatacaaaaagttagccaggcatggtggtgggtgcctgtaatcccagctacttgggaggctgaggcaggagaattgcttgaacccaggaggcagaggctgcagtgagccaagattgtggcattgcactccagcctgttaaaaaaaaaaaaaaaagcaacttttcatgctgccttttaccttatcttttatgtataccttgagatttaatgcctctgagtacatgagatggagggcttaagagaagggacttgagttaccgtttagtttgaatcccgtctctactagcttgctgtgtgatcttggacaagtcacttaacccatctgtgctctagtttrcttatttgttaaaagggayaaaatagaactgacctcatagagttgttatgagcattaaattagttaatatattttatatgtttgaaacagggcatgtcacatagtaaggagtctataagagttacttattataaaaggcaaaatcattgagagaaaaaaataatgcttaattttccttctattcttgagaagagagaaattcaaactcttgaagacaccctgatctctttccactgcaccctcagacctctggaggcaaaggaggtgatgctgtcccctgtattccgactgctaacgtgggaagacctcacacaacattgcatgtctgctgaaatgttaatttataattcagtgtagagactgattttccttggactgtaagaagactccttttctagaacagaaaagatgaaaagtatgtgcatgtaattatggtgtttatgccactctaaaaaaattattcctaaatrttgtttgggtagaattatttagagaatgaggctagaaccattccaatcccaaagactcctcatttgactaaactcttctattctttgttgaaaggactagactggaggtatatcaaggcatgcagatgactaaactattgtgtgggctgttagaggattaattattttaatacctttattgatatataatttacttatcataaaatgcactcattgtaaatacataatccaatgatttttaaagtaaagttacagattttgcaaccatcaccccaaataaattttagaacattttcaccagccctaaaaaaattatctcaggcctgtcaatcattgctcctaaccccagccccaagcaagcactgatccactttctgtctctatagattttccttttctggaaatttaatgtaaatggaatcatacaatatatagtctcttgagtctggcttctttcacttagcataatgtctttgaggttaattcatgttgtcacatgtatcagtgttttctacatttctatttccaaataacattccattatctggatatataacattttgtttattttttatttttttgagatggggcctattccccaggctgtggctcactgcagcctctgcctccgaggctcaagcaatcctcccacctcagcctcacgagtagctgggactacaggtatacactaccacacccagctaattttgtgtgtttgtgtgtgtgtgtgtgtgtgtgtgtgtgtgtgtgtatacacacacatacatacgtatttggtagagatggggtttccatgttgcccaggttgatctcaaactcctggctcaagtgatcacctacctcagcctccaaagttatagatgtgatccactgcgcccagccaacattttgtttatttaccagctcatgggtatttgggttatttctacttcttgtctgttagggataatactcctgtgaatatctatatgccagtctgtgtggatgtatatcttaatttctcttgggttgatacctataagtggaattgctgggccatatagtaagtttacgttttaagtttttaaaaaattgccaaactgttttcacaggtagttgcaccatatcacattgccatcagcaatgtacaagggtttcagtttctgtgaatccttgccaacacttggtgttgtccatattttccattatagtcattctagtgtgtatatggaagtggaatctcattgtggttttaatgttcatttccataatgactaatgatgtttaactccttttcatttcttattggccatgtgtatttcatctttgatgaaataactattgagtatagagttttttagctcatcttatttttgagctgtttgttttattattgagttgtaggagttctttatatatttttgatacagttctttatcatatgtatgatttgcaaatgttttctcctagtctggcttgtctttttattcttaatggtgtctttggagtgcaaaagttttaaattttaatggagatgaatttgcctattttttcatttatgtctagtaaaagaataatgaatggttttgtgtctaagagctttcygcttaacccaaggacatgatggttttctctaatttttttttcaaggagccttatagttttagttgttatatttaggtctaagatctattttgagttaatttttgtgtggtttggagataaggatttaagttcactttttcacatattgatatcaaattttcccagcatcatgtgttgaaaagactatctttttcctatcaaattatcctgtcatgtttgtcaaaaatcaattgacagtgtcagagcttatttctaaacgttcagttttgttccagtgatttgtctctttcccttaataccacactctcttgatttytgtagctttgtaatatgtttgaaatgagggtaatgtaagtccttcaccattgtttttctatttcaaaattattttgcctgggtctattttttttttggctactggaaacccctccctcttgggtctgacagggttggagatagatatggtaaaatagagtataggggacagagaccagtagactgtgtcttggtcaccgttgtgtctttagcacctcatataatgcctggtaggtcctaaatactaaaaaagctgtaaaataaatggataaatgtatcttaagatttttttttatcacatggtatcatctatgtcttgggattagggaaaatttccatgtcaaactaaagagtaaaaattcaccaaggttttgatatgctctgatatgatcactactacttgarcctccccctcatcggttttatttcccacccatcatagctcctggaggaggatggaattaatttcaaggggatttgggaagtaattgtcttgttgttagttataaatttttgagagatgatggaaccttatcaagayagcttgctgttgaaatcttatagtttcccgtttagacctctgttattattatctgattatttgattattattatcaagggttttatatgtctaacagtgttagatattgagaggaccttcctacatgttgcctcttctgtctgaaacagagcccctcaaccctcccggaaagaagcacacataccccaaactctctcataattcttagacattctccagacctcaacctcatcattactccttagaaaaatcgttcctaaaccataacctgtatcaactgccctcctggaacccaccatatgcttctcgttggtaacacttatggtggttacatatttaacattcattgttgtgcttattttataaagctttgaggtatagttgacatacaaaaaattgcacatatttactgtaaacgtttcaatgaatctagacatatgcatacatctgtgataccatcaccaaaatcaaggagtactgaatatatctttaacctccagggtatgtgattaatgtatatttctcctcggggatcatcrgcttcgtaggggcaggaactgtattagttttcactcaccgttttgtccctattgattactacagtagttgacaaagtacaactaacattttaccgagcacttactttgtgccaggcattatttaaatgctatggatatattaatatacttaataactacagtggcctcttgggttgttcttattgtcatcccattttttagataaaaaaactgaggcatgaggagagacattatgtaacttgctcaacgtcatacagacaatatgtaatggggcatagagaagggtgtcaataattatttgttaaacaaatgaatggatgaataagagaaagaaagggtgaatgaagctcttcccttgatcctagttggaagcatgtcctctacaagagtgctgacttatcttttcttgcgagatggatgggaatacaaggctatggggatgcccaggagactgttttggactccagtgctgctgactctggagagaggaaaaggtgggggttgggatagtctaggaaatgctggcttcgcacaacacagccgagtgggtgggagccaaaaatagccagtcctttgagtagaaactcctctagggaggaaacwtttctttgaaattggacacacaaattagctaatgatatccagacactaaagaactgcatgttccccagacagcccgcggccccaggatcagacgctgatcttgtggagcacagattaagagatgccgcaggtctrgggtgggtatagattgttgtgtctgccatcctcactcacagccctgagcacagaggtgaggacgcagccaggggccagcactctccttccatgtgtgccaatccctgcctccctgtatgtcctgggctgtttgtccaggatggaaagtggcactgtggcatttttacctgtttgtgctcagtgacagttgacatgacacagagtctatgttggcagtatttccaggccgaagcttaggaaatcgactttaggatgaatttttcaatctgggagactctaacagaggctctgagcctgggatgtgcaaactacctgcacttatcttcaaaattgtgtccaaatgtgcgtttctcaagggagagggtccaaaggtttcatgagtaaacaacaacaaaagctttcaacaaggtatgggatgtctccaaaagggtgagaayccatgatgatgatactgataatagcaataataaagtaacttttctgagtgcttagaatttgctaaggccaggcgtggtggctcacacctgtaatcctagcactttgggaggccgaggtgggcagattgcttgagcccaggagttcgagaccagcctgggcaacgtggtgaaacccwgtctcaaaaaaaaaaaaaaaaaaaaaattagctgggcatggtggtgcatgcctatagtcccagctacttggaaagctgaggtgggaggatcacttgagcccmgatggaggctgcaatgagctgagatcatgctactgcactccagcctgggtcgcagagtaagaccctgttccccaaccctgcccaaaaataaataaaaaagaaaatgccagatatgcattaagtctcttatatagatgatataatttaactgttgtatcagtcagtttaagcaggttcatgctacagtaataagctactgagattttggagttgtttatgaaagttgatttcttgttccagttatatgaggttagttgcagctctgcttcatgtcttagatgcaagagtcagactgacggagggctcctttctaggtcattgctaatctcatggaagagggaaaagagaaggatgtagatgaagagatggatcttaaagattctcctgsaagtggcactgtcactcccacttacattccgctggctcccagcccaacattggcgaggattccaattgtccagtagggaggagtcctgtagagaggagggacagcagatatttgaacaataacataatctattacattccttataaaaaccaatgcggtagatatagtagtgattattatcattgtccctttcttacagatgtggaaactgaggctcagagaggttaactttctccccagtgctgtgtatttattaagtgagaggttcaagatttgcatggacttggtcagactctcgagcctacagctttagccactgcattcatcgacttccattgttatagcaggagcttctcctccactccttgttcctcctccccaattcatggtaatccacacacaccagttttcttaaaacttcattcatgctcaagagaaaaccatgtccctatctggatcctgtgtttgcatagtccccagcctctgggctcattctggatcatccagctaggtaggcatttgtttggcaggattcctgcccactaagagcttaccatgagtgtcatggtgggaatgagctgggtatttttagagctyggcagcctagcactgcsgcttgctcttccccgaggtctgtggattagcctaggggtagcatatgcctacgctttgcttgcctggtcctggtacatggtcctgtgtactgttaagaaaacagattgtcccaggtagatatgtagccagatatttttttctctgtttcctttttttttttttttttttttggagctgctccaccccctggtatggtgcagcttctcctggggctcctctgtaaytttacagcagcttctgagctagtgaagaaggcgggatttgctcacttgcagttaagtctggccagacagctgttagttgttgccacaaacatcttatgtgtttgcaatcttgcctgtcctcctgggtaggcagaatgcacaatctctcctcaggggaagtgagaagatctagaaggcccaaggaayaattatttttggcatcattgctcctccatactcattatccacatctgttgagcattcctgtggcccagaagctgatggcagtgtcactgtggcaccctagctttgatgtacttattgtcagaagctctggatagggaccaccaacaatgcactttgctgcataggtgctgtgagtctccatgggaaggaaagctggagatttgcataaaaaagtatttagaatgtccagaagcacaaactcaggtgtcatccaattcaacaaacactttctgagtgcctactgtgtgcaggacataggattttgcttcatgtagaggttataacattcaagaggacacccgtggagcacacaggcacatcccccaatatggccccaggcattacagaatgtgacagacgtgacattttttgtttgttaattaactaattcattctagtgttgtggttaagcgcataaactttggggccagactggttggtttgaatcctagaaataaaaataaaatcctaaaccaccccaactaattaaatggaaccccttcttggccagggggatcccagagaaaccttgaaaactgagttcctagcyataaccagacaggagctcagacttaccacattatatcctctcccttgctaaccatcatttggctttctttcctaagggttaaacagaaacaggccatctcaaaagacttgttccatcactgtttccaaccaaccacctgactctgcccctcgctttatacaggtttgacacggccaaccaagcaacattccttcctgataagatttgcacacccagaactagcttctgtttgcatgaagtggttctggtcagtttacgggggctgcacactgagtgccttcatgtcctctaattcaccttttgacacatggggccaaattatagtatacttaaatgttatgttttcaccccaaaatgaacatggcatgtatatgacattcatattaatttactgtgcatttgcgtgcccttcttttgtgaatattcatagctcctcctataacttgagtatgtatacttagccattctgttagcataaattcctgtctcaccttgcctcctttgaagtgcctgcctctggtttctgctggatgctacactccccagcctgcgagatggtcagcttacaggctgcaaccccttataagaaataaagctctcctttctagatgcatgaacctcgtgtttcttcagttgacaaatccttactctgtaactcactggctatataactgaacaagtgaccaaaactctccctgccaagcttctttcttcccaatatgggaatgacaacagtacctagctcagggagttgttgcagggattatatgagttaatatacataaggcccttggaatggttcctggtgcataggaaattgtatcaaagtgttggctgctactaacactattatcatttatgcaatagatatttattgatctatgtgtcagtagactgttgtctactatgtatcaggcactgacctaggtcccagttgtggaacattaagctcactccatatccttttacccttacggagcttgcatttcagaggttggaggcagaaaataaataaataaataaataaataaagtgtcaggtggtgattaagacatgaatgaaaaatcatactagaaaagtcagatgagggagattaattcctaattgagcaaagatgatgaaaaacttccccagaggagatgacaccagctgagaagaggcatggtagtaagaggcaggcacccaacatgcaattccaaaatgagattttgctagagaatgggaatatccttcttgggggtcatattgttacatctttctttttcttgccgcctatgaacaggaattctaaataaggtcagagactggggttgtcttttggtcttagtggccttggtgttggaccccaggttccaggaagtcttttatcccagcagcagtttttcggagagaagactcacttayatgcaagactgacatgaaaaggggtttgctctgtatgaggctgtgagctcagccccatgcttaaagtgctgagtgggaaaaagggcagagactatgcctgttttgtattcaaggggctggcacaacatttggttcttagtaggtgctcagtaaagaatataaatagtcattgagtgtttactgtgtgctgaagacatgtcaccaggttctaagcctttgatatttgtcaacttatttaatttttacaactgaatgccttttgttgttgttgttagacagggtctcactctgttgtccaggctggagtgcagtggcatgatctcggctcactgctgccttgacctcctgggtccaggcgaccctccttcttcaacccccaagtagctgggattataggcatgtgccccatgcctggctcatatttgtatttttttgtagagacagggtttcaccatgttggccaggctgatcttaaactcctgagctttagtgatccacctgccttggcctcccaaagttctgggactacaggcatgagccaccacactcagccctgaatgcctatttttgtccctgttgaaaagatgaggaaactgagcacaggccatgctggggctatctaaggactcttcatagaaagaattcaagaagacttcttagagaaggtgactttataaagcatgtcttgaaagataaattcgtcaggtaggagagtaggggtggggggtgaggtgcagaaaagaacattgtaaagagaagcagctctatgagcgtgtttggtaagttcagtccaggatgcagacaggagtagcaggggaagagggtagagagaggtcagggtgaaagcacgtgggcctcataggccttactcagtgatttagatctttatcttgactgcatcaggtagctatacaagtaattcctgaaaaggaaatgtcctgagatcaaactggctttactcaaaggtcaccatttaaacccagccatgcacagtttagcacttcattaaatattgtgtcctaatggttgctcccttctcccaggggccacacacgtcttctcatgtacataagcactcgtggagtctgcggttggaagaaatcacgcaaggactggttgtgccttgcacacctgtcacagatttgcacacccagaactagctcctgtttgcattgtctctactgtagcttctgcaaatgacaaatgtgggggtttcttcttggatgaagtggtttgaggtttgaggtttgagacttggatgttttctttgaaaattttttatttttttatgtttttgcaaagagaaacttgttcctcttcctatgctcactgagtcctcttttccctaacttctagaggaagtgcatttaatcatgctgtgatcaagtcagccctgggtacccatgttggcttttaattttaaaaaagagaatgacaggaaaagaaaatgggccagttaggttttgaagatttttctattttattattattaaaggaagcccatgtgggagaatgtctggtgctagtttctcatctcggcactgacatcatcactatcttgactgctgtaggtattatttgttcttggcttgtgtatcagctatctattgctgtgtaacaaccgaccaccaacttagcaggtgacacccatttattatctcatgggaaatgaggaggccactcaaagaggcctccttcttcaaaaccagtgatggagagtggaggagggctctgctgcttccagtctctgagcacagggaaggtttaagccttcttttaaagggctcatctgatgaggccaggcccaccttgggtaatctcccttttgattaactcaaagtcagctgattagggaacttaatgatatcttcaaaatcttgtcacttttaccatatgatgtaacataatcacagaagcgatgtcctatcatattcacaggttcacctgtactcaaggggaggagatcacacaaggacatgggtcattggtggtcatcttagaattttgcctactgtggctggtaatccaaaccaaatattcttcctgtggattaagactatcactttgggaacatcttagaattctgcctgctgtggstggtaatccaaatcaaatattcttcctgatctttgtgttaagactaycacttttggaacagccattttccaaagctctctcataattccatcktaggcagagatggagtgtggccatacaatgttttggaggctccaaatctaggtaaagtggaaccactggagacagagtgccatcttgtttctggagtcaggcaaagacactgtgtccaggtgggatttgcttggagctgatttctctgttggataaaatagaccagtggcttcataaccctatgaaaaaataagggttctataagttgacacattttggaagtggagctaaacccaaggctgactccaggactacaactatttctacttggagcccttgagcttatttttccagtacataggtctcagctkaycaatctgaaaatggagagtagggacatagggccttggaggttcctacttattttaatcagttccatagcctgaccctggtccagtgagcatcagatttggagactgtgccatttatgaaacaggcaggtattggagagactccaaaaagctygtctcatgtgtgcttccctgcaaaaacagccagttccagctagaaactttatcttcatgaaaggaaacctctaggcagagagaagttctatttgtttttacaactrtccccagttgtatttgaagatggcaaaatgttgggcttaaggcctgccctgggttcatggagctagctttcttaatgcctcaatcatacttttaatcagaaaaaatttagagcattaatcttcagtgcttgttcttgccatttccagccactmgacactttttcataaacaaagtgacagtttgattgaatgtggtttttaattaagctgccttcacttggaacaactttctgggggcatatgtaaggagcagaacttagaagcacaagctgagactgacttcgcaatagcttcatctccaggcagagtttgagaacaaaggaaaccaggcaagtggaattaaccaggcaccttaatccagggcatcagctcccactccatcctagctggctgtcccttagaataagtgtgggaaggcrtagcagtgagtgcagttgcctcatgctaacctcaggacgaagcatgtaagagcctcggaaattgccccatggtagatatttatattaacgacatttgacctgtttatggcatgtcactctcttctgcagttgggactctgcaaacacaaaaggcaaaaagaccactctgattctgccctcaggtacaactcagaattgtatgagcaacagtggattctgcagtacaagatctcagagtctaacagggaggcgaagatattcactggggcagaacattygagacgggaatgaaggaatgggctacctgagcttggagggtggagatgtggctgggaaacactttgaaagcccttcaaaggctgttcaagtataatrgggacagtcatatgacagggctgggcctccttgaggtgggtgtttggatggtaagagggtcccaggcattgtcatctggctgcaatacaaggatctgcaatacaaggtgagggtgatattgctttaagtagcgctcatctgtactccatcgctccctttgtgttctgtggtgtatagatctaccctgataaatagctgctgccgtggagaaatccatcaagccttcagcctctgcatgactcatttccctgtggcaggcgtgttgctcggcttccaagaatagcctagcctgagggatccaagctcggaatcccttccaactttctgggctctgaagtttggcacccacagaggtctatgcttargtaacggggtgcagatggcttgtcgtttgcagagacagtggctaataaccatctcccttccaccttckctttctgcaaaagcccagggcctggcagagtcacattgcttgcaaaggaagcctaatcataaaaaggtgccttttggtggcttaaagataaggtaatcaggaaacccattcattgatttatttgctcattcaacaaatatttgatgactgccttgggagtgagaaccacagcaagaaacttaacaggggaccttacagaggcaaatcagatctcagtgctaagccctgaatatactctgctgttgtggcaaccaggcagggagatgataagaacagtaattggcatttattaagcacttactgtatgtggtgtattaagtactttacatgaatcaatttgattaatatgcacaaaagtgccatcaattcagttccatgatcattcttatttgctcgctgagagcagcattgcacagagggtaacttgctcattctcatacaaagtgctcatgcaattcttcatacaggaattgcacccagggttctctgatacaagcacataaaaatcacactgattacaccattgcgttatcatagcaaccttctttctgtcgcttcttcccagcctgtgccaagctctttcctgctttcttagtctgtttgggctgctatagcaaaatgtcataaactgggtagcttgtaagcaacaaacatctatttcttatagttctgtaggctgcttaagtccagggtcaaggcaccagaagattcatgtctggtgagggcctgcttcctttttcatagatgrctgtcatcattttgttttgttcttcattggtaatggaaggggccgttgatctctctggagcctcttttatcagggcatgaatatcatttatgagggcttggccctcatgacctaatcacctcccaagggccctacctcctaacaccatcacattgaggattaggttttaacatctgaattttggagggatacagacattcagaccatagtgcctaccccatgggcttagcgttttcctctgcctgaaacatggctgcattgtctccatctcattcttcaggtctccccttaaaggccaactccttaagaggccttccctgactacccagtcagttctctcctattattctctagcttgcactttatttctttcacagcctttatcatactgtgacattaccattttttttggttgttattrtccatatgcccctctcctccaktccctactagaaattaagctcccaaaggcacaggccttgtgtatcttatttgtgctaagatggtgcctgacacctagtgagtcctcagtgagtgtggtatgggtggttggaggaaggagctcggaccttcagtcctcacagatgcacaacaaatctcaggtgttgttgcatggctgtttgaatgaatggagctatgagcataaggctgtattgttattgttgtcactgtcatgatcatggctggtgaaaaacagaaagacactggggattcagaatgcacaacartgtttgcaattgcaatgcagagacggtgatgtggcaggcagtcagtcagycagtcagtcagcrtgctccctttccgggatctgccagtggagtgcactgtgccccatggatgggcttcggagggggtagtggtgacatcagctccccagcagcttctcacctctcttggcctgaagggggctgtgccctttgtttcactgcagctgctgcagacagagaaaggaggagattcccagcctcgagkttgcctcgcagggcagtagcaaccgagggcagagcacagaggagcagctgcattctccatggggacatgactacgtggcctggcttctccttcccccaggggctgggggcctgccaggtgctctgaggattccctattgctcttatctccttccctcctgcatctcaatttgcctccccctggactctgcttttccccccttgtcttgcctaatctgccacaaggacatgctggaaagaggactttctgtgttctagaacattctacatgtgtggctcctgagtctcactttgtccacctgtgaagtgggcattatacccaccgagagtgtggtcacgaggaacagacgaggctgtcatttccccagcacggttccaggcacttggctggtaaagctctgtggtgtttgttcatcacactggaccacagagcaacagtgtctcacatgttatgaagatgtttcaatccgtggactaagcacttcattattgttgttgtcattattattactaacattttctaatttaacagctttattgaggcattgacatgcaataaaccgcacagctggatgagtgctgatgtaggcatatacctgtggaaccatcaccacaatggtattcagcccttaccacaaccgcattttgcagatgaggaaaaagaggcttagagagagaaataccttatcctggttcacgtggatggctaaaagcagagctgtctgatccaggcctgagtttaccttggagacaagaaacgtcagagataaggctgcagtcttaaatatgatgccacggaaggtatcaccaaaaaaaatggtatttggataaagaccctaaagaggcttcaaagggagtgggctacgcagaagagcattccaaggagagaaaatagcatatgcaaaggccctgaggtgggggtgttttccagtgtgtttcagaagcatttaagaggccaagctggcttggggatggaaggagatgagggcagaaaggtaaccggaggccaaactctaaagggccttgtaggactgtgcaaggtcttgcctgaaacaccattgcagggtttggggcagataataaacatggactaatggggccattctggcttcactgttgatactggattgtaagagggcacaggtggaaacagaagtcatccaggtgagaggtggcatggaccaaacttgtagtggcagtggtgagagtgtgggatgtactgggtttactgatggatttgtgcagaatgagagaaagaggagagttggagatgccaccaaaatgtttggcctcagcaacgaagtcaggggctaatgtggctgagatggatgatagacttgagatgcctgttacacatcctattagtattttttccctttgctgctataacaaattacacacagtggcttaaarcacatcaatttataatcctactggtcacccacatctcactgggctaaaatcaaggtgcagtgctgtgttctttctggaggctgcaggggagaatccatttactgggctttccagcttttagaggctgcctgtaccctttggcttgtggtcgcttcctccatctccagtgccagcaacattgcattcctctgtgcctttcttctgaagtcacatctctttctacccaaagccaggaaaggttctgcacttgtgaccctggtgatgatattggccccacgcaggtcatccaggataaattcccctctgaagatctttaactgaatcacatttgccaagtcccctttgctgtgtaaggtaacatgctcacaggttccaggaattagggtgtggaccttgttggggaccagtgctctgcctactacacacatatcctggtggagatgcaaggagagactttgatgtttgagtctggcttttcagaagtgtaggtagctgcagatggaatgttcacagtgctctcgactcttccatatttactttctgcatttgttcagtcgtcatagctctttctcctccagactatgagctgcttgaggtagaacttgggtcttttcctccttgtgtgtctcagagccacaccccagagagtgctctggattgtctgtgacaagaatacagtttgagttcaaatttaaaccaaactcatctcttagatgaggagcatcatacagatcctagtgcgtgggagggccacggacatgtgtctccaccctgccttgcctggtaagagttcatggcagaccctaaccctgctgagctcttgttttagcttttaggtccccaccgtcgccactctggatacaaacttggcattgtggctaggggttttgtgggatggatgcagcagttgttgcctcgtcaacattctcctgtggatggtttttgggtcaaggcccactggatcctgttgtgagttaatttgcaaagcttagctgtacctaatgcaggaaagagggtaaacaaacacaagcagcaggacagactttgcaccagtgactcagaggaaggcctatggggatgggatcctcaacccactttgcttcctgatgtcccaggtgctgggctgggagaatggtctggttagccctatgtccgatcctaaggaacattcacattttgccatgctttttacaggtagcacaatgggcgcatttttcactcttgcagatgggtctcggaatgaacttccttgcattgaaaaagggagtggtttggattttctcactgtctagaagcatagtggctaagggaatttctggagtccctctgtctgggttcagagcccagagttataaacactagttgtaggattttattttttaatttttaattttttagcatattaattatatttaattctctattttggatatttagagcagctagaggcattattttagatattgacgagatgaatgtccttctaacacttgtctgattattttcttatgagaaattcctagtacagaatgtgttagtcaaagggcttatttttaagactttgatatgtgtcatcaaggtgccctgtagggtgactgtcctggatgacactcattttgatggactggttcctttttattgtggtagaatatatataacctaaaatttactattctaaccatttttaagttcagtggcgttaagtacattcacattgttgtgcaatcatcatcagtatccatctccagaacttttccatcgttccaaatcgagtctctgtacttacttgcaatcactctccattccgccccgctgcttggtccctggtaactactattctactttctgtctctataaatttgcctattttaggtatcccatataagtagaggcatacaaatttatctttttgtgatacgggactttagacaagtcacgtcatttctctagggctcagtttcctaatctgatttagtatgactgtgaaactctcaaactcaggatgaaagggaaggagggaggaggacctttaagtgatcaaccaaaatttactaggtgctgactacgcgccaggtactggataccattatattccccgacatgcagatgaggaaactgcataggagaggacccatgcaaagtcccagcaagttcagggctgagattttaacccatgtggcctggcgtcagaaccacattctcaatgcctacactgggctgtcctttgataataatggaaactccttcattggaggattctttgaaggattgagccagaaattttatctatgtataatagcacttaggccagcaaggagaaattggtcaataagtgatacctagtcttacgtttaaatgtttttgagatataattcacataaaatttatcatgttaaagttcacagtccaatgctttttagtatattgactatattgtgcaaccatcaccactccctaattctagaacagttccaaaaccacaaaaagaaacctcatatttttagccgtcactctgtctccctttgtccccagccctagaaaccatggatctactttttgtctctatggatttgcctattctggaaatttcatgtaaatggaattgtataatacrtggccttttgcgtctggtttccttcacttagcataatgtcttcaatgcccatccatgttgtagaaggtatcagtacttcattcctttttatgggtgtataacattccattgaatggccatatcatatcttgtttatcccttcattgattgtaggatgtttagattgtttccagtttttggctgctatcagtaatgctgctatgaacacttacatacaagttattgtttgaacatctgttttcagttctcttgggtatatacatacctagaaatggaattgctggatcatataggagttctatgtgtagctttttgaagaactgtcgtactgttttccatagcagctgtaccattttacattctcacaatcagtgtacrgggtttcttatttctccacatcctggtcaacatttgttatttccattcttctgaatttagccatcctggtgagtgtgaagtgctatctgattgtgattttgatttgcatttctctaatcactgtttgtattgagcatatttttatgtgcttagtggctgtttgtatgccatcttgtaagaaatgtctattgagaccctttgccttttttaaaaacggagtcrcctttctattgttgagttgtgagtgttctctatgtaccctggatactagacttttatgagatatataatttgcaaatattttctgtgtgtcgtgttttcacttcgtttttttttttttttgtgacgggggtctcactctgtcacacagattggagtgcagtggcacgatctcagctcactcactgcaacctccgcctcccaggctcaagtgattctcctgcctcagcctcctgagtagctgggattacaggcacgtgctactgttgcccggctaattttttttttttttctggatttttagtagagatgcggtttcaccatgttggccaggctggtcgtattttcacttcttaatagtgccctttgatgaataaaagtttttaattttgacaaagggtgaaggatgtctaatattttgtctatgatccatttttcacctctaggcccacttttttgaccctcacacatcacggtagattaggaatttcttaatgctgtactggttttggaggtaaggaagatgggactagcccactttgctttgtcaggctgagagggaagaagtgattccattgagccaggacttcagtggccaaaactacctcccctggcttcagaatcccttccccagaccaaccctgcgtgatatcagcatgtggtaaaacactcctgtgtctttagagactgcagtctataaatgatttttctgtcttccatgggccttgcctgcaagcactttccatctttccctaggtttcaggaatgctcaagaattacgggatcttgactgggcacggtggctcacacctgtaatcccagcattttggtaggccaaggcragtgaatcatttgaggtcaggagtttgagaccagcttggccaacatggtgaaaccccatstctactaacaatacaaaaactagccagacgtggcggtgggtgcctgtaatcccagctacttgggaggctgagggaggggaatctcttgaactagggaggaggaggttgcagtaagccgagcttgggccactgtactccagcctgggcctgggcaacgaaaagagactctgtctcaaaaaaaaaaaaaaaaaaaaagggggtcttgtcactgagtttcctcatcttgcctctgcctctgagcacatttttccttctgcttctccaccataatgaaaaccagccataggctttgactactctctattctctagtgtcccaaacttcagtgagcacagacaatcacccagataacttgttaaatatgtggattcctgggatattccccagaaatactgaatctaaatttagggatagagcctaggatgcacatgtttaagcagattcccaggtgattctgatgtcagggggtccacagaccacgtctttagaggcactgccttattctagaagcctacccacccaaacttattctgagatcccaagagaggctaagtccagtggttctcaaacttgactgcatactataatcacctaggagaactttacaacttccctccatcctaggacacagtgcagacaaatcaaaacagaaactcagggcatgggaccccagcttcagtagtttttaaagctccttgggtacttccaaattgcagccaaagctgagaggcatcggagccataaaattgtaggtacttgtttctctttgctaagtcctttaacccacacaggtcagctggatttggaagttgatgcttcactcttataaacacatttcaacttgttgtttattctcatgctgcaaatggaaggtacagaattgcaagggatggaatgtgcacgtacctccaatttccctaccagcagggaatgcaacagcctcatgatgcttaaccacaaagggcatcacttgagacatctttgctcactctcacgatggtgaaagattgtcctgggctcattgaaggagctatggatgtttccaagtccccagatagaggtatcatcactttctgatcatgaacctatggtaccaaggtcattctggtgaagaatcttttatgtagtggccaagagtgtgggctttggaatcaggctgcctggtttgaattttagctctatcacttaggtgggcaacctacccacctttctgtgcctccatttccttctctgtgaaatggagataaacaaaagtactgtacctatagggttgtcttaaaaattaaacaagatgatgcatataaacaatttaacccctgcctggtgtcggctcccgtccacttctcctcttgggttgcctttcaagaagtgatagtggcaggcagggctggtgcttgggaccatactggtgatagaagcagcagccaggtactgtgcccaaaatgctctcaagagtacaggctcagtacatccctttcatttaccacctgagccctgtctggtgagactcatcatttgtcctctatacaatgccttcccaaactccactccaatccctttctataggcacagcttttgttaacaaggtatagcttcatcctgggggcataatgcacttgaagtttttctcaatacagtgttattagggtgaagaagggacttacataatcaggacaaccagaagagatacatgcccaaattcttaacaagattcatggctcgtcccgtaagactccttgactctattattgcagttttaagagtacagactctttgtggttttccccttacttcaactggatctgtcagtaattccaattactgacaatgacacattcttctagaaccaataagcttcctacattgcatttctgctaatagaatgttccgaatatttccaggtatatgtgtctgcatgattctacctttataaagcctctaactagaaatcccaaatttccatgcaacagtattcaacattcagccatgtgctaggcatggttcttttatgtaggtattacttaagctggtttatcaattttaacacactagatttccccttctgatcaatactgcctatcggatggcatgaggagagttttggagaaatggtagtcattactctggtgagggcatggactttccatgctctcaggtgaccaaggcactccaagagttgttgggttaatctgactgctctctcaacaaagagaaatagggagaggaggagaggaaaagaggaaagtaggcttcttagagggcaaagtacccatgagaaaagcagacaaaggaaagagggtacttggaacatgtcttctctataagcggtccagatggtctgcgtgtgaggcagtctgcagaactggctaatccaaccgctgaacaattcatagccagtttgcaaaacctgaaaaaggcagcccagaggtccacacaggagtagagggggaagaagggcctgctaaaaacttatcatctggaaaatctgatgatgagaggagtgctcagagaatacgaagggaaaccttataaatatctcagtgtcactaggatctcgggcttcaagcagcccttgaagtttaagaacaaatcatcccaggccacgctggtagcatttttttttaactgtaattacaaataactgacatatggcaatgttgtagatggctggcttctgagctgtggaccagtgattctcaaactttaacacgcatgcacaaatcacctgggatttggttaaaatgcagattccagttcagcaagtctgggctggagcctgagactctgcacttctaagaagctcctgggagatgctgatgctgctggcccatggaccccactgtgagtagcgaggctagaggcgtgcttggtaaacaaagtcaggaggcctaaatggaggtgcttcgaggtggtgcaggagcacctggggcacctagaaaacattgctggcatctcggggacccatgtccagggaagggctccaggacttccccgagttgaggatgaagactcagacttcctggctaccactcaggtagagaagagcagacgttgccactgaagtcccaggtatgaatgaattctagagctgctggagtggggaacattgtcattgagcttagagaaacagaagtaggagggaggggtggataggcaagagggaacccacaggtactgagcatttcttgattgtcttcctcttgctccccacccttaactgttccttcccaggtctttctctctttagtaattgcactcaccatccacctaactgcctaagcccaagacgtgggatctatccttcactgcattgggaaaggtggtcatgcacagcttgctggaccctgtatggctgtatgagtggccttgggcctgaaacatttccttaacaagagatgaagagccctcccagcctgggctgggcatatctctttgcctggaaatatctttccctgttctgggcttgatgtactttgttctgctcaagtgtgtgcatctaatggcccctggccaaacctgctactatatctgtccctggtggaaagggatctgggtccttctactgcagcacgaggtgggtgtgtgcagctgcactgcctgggttgactgcagagcagatccactggctgtgggggactgacgcattgcaagggactgcatcttgtgtagtctgtctcctcttgctctaccacttgagcctggtgtgtgtgttgtctgttctcagcaacctcaaatcgtgtgatggtctcttccctggatgacacttagccttttaaccttggctgcccagcctgaccacccagtgaatggtggaacattctctttctctcatccccaccagagtctagtgcaatgtataattattctccttcaaatgtatatctcagatccttcctcatctccagtgctaccaccatcatcaccatctggagytgtagatgaagcagcctccactggtctccctgcttctacctctactcctcccctacttcatcctttcctttgcagccagggtaaattggatcaggtcacttctcttctgaatagcctttaagggcttctcatgacatcttggtggctagaacctaggtgccttctcatgaactgcggggtccttacccacctgtcttatccctctcctcttgccacctgctccccaccacgcacctgtgctctgtcagttgtcacctgtgctctctgtcagttttgaacataccctgttttctttccttcttagagtctttgtgtatttggttctctctgtctggaaccagcaccaatccccaaaactctgccatccttcaggtctctgcttcaatgtcgcttccccagagacagattccctgatcaccctagattaggtgttagtctctggcctctgtcctttactctcatggcactaaccttagtttggtttgtacattatctattatctgcctctcccaatacattagatgatccatgggggaattgataaggtttggatgtcttgcccaaatcttacgttgaattgtaatctccagtgttggaggtggggcctggtgggaagtgtttggatcatggaggtggatcccttgtgaatggcttgggccacactcttggtactgagtgaactcttgctccgagttactttgagatctggtcatttaaaagtgtatagcacttccccccaagacttactctctcctgctctggccatgtgatgtgcctgctcccccttcaccttccaccatgactgtaagcttcctgaggcctccccagaagccaggcagatgccagtaccatgtttcctgtaaagcctgcagaactgtgagccaattaaacgtcttttctttataaattacccagtctgaggtatttctttatagcaatgcaagaacagactagtacaggrtctctgcctttcttatctgttgttgaatatccagcacccagctccaggctcagagtagacactcaatacatgttggttaaagaactgagtgaattagtaaataaatacgctttgggaaagcagaggaccacaaggagagcataaaagggattagcattcatggaaacagctgctatgtgcattgcacatctgccatctcatctcatctatcccacagatggctttcagccatcttgtagcctagagagtttaattaacctgcccaagttccacagccactgagtagcagagctgatctgtactctgcttcatcttagcctggagttgttttagctttggcatcatgacatttgggaccacatcattctttgctgtggggtggagggggtggatataatacgcattgcaggacatgtagcctctacccatgccatgctagtagcaccccctgcccaatttatgacaaccctcatgcatccagacattgccaatgtcccttggggtgggggtgggaatgtgtccccagtatagaaccactggcttagcctgtgggtaatctcagcctcccatctgcttctactccaatccctgcccaccccactcctctcagctgctgtttttctcctggactctttctcaccctgtcttcacgcagtcctccctgggtgtccctccrggcatgcaacacacagatggcaatgttccgagtgttgcaatacacatttgtgtttctggttactttaatatcagccccatgtcmtgatgttcgtgtcattggcatggatgctaacaggctgtctagaaaatgtgcaatatattttttattttgcctaaatagcacatctaattgttcagcatgagataaaccagtatgtttacggggagataacttgtcaaaacagacttttgtggctccaccgttggaaaaacctagcctcctcattcagagatggagtgtgaatttttcgtgggtattttatgtggatttaaagcaaattatttcctgctgttttgtggacagaaaaaaatgagggaaaaaacggcttcagaaaaagccccagatgcaagtgtcttttaaagcataggggatgaagaaagagaatagaacagaaaagaggagaaagaaacagcaaaaaagagggaatttgctagagaaaaaatgtgagagagttcacagctgggggatccagttagaggtagggtgctctttttttgctcattcatttattcatccamttaaaatatcgtgagctagggagtgtgctggtgtagcatgtatcmgaatgtcctttstttttgaacgctggctaatatttmattgtatgtatttacattttgtttacctgttcttctgtcaatggacatttgggttgttcccacctttggctattgtgaataatgctgctatgatgggctggtcttacatatcagtgttaaaggtgacatttcccaagtgcctactgctgagctgggcaccatgctggcctctgcacacgtggtatctcatttaaccttctcaatctcctgggaggttaaccctctgccatgacatttagcaaacactgggaggggcagcttaagatgcttcagtcactcatcctaaggtctcagagtgatagatcctgggtggaaacatgggtctctttgtaggtcatcatttttataatcagaataagtgattgtgagtgaggtcttactcagtgaggaacatgaaatagcccatagttttgtccctgttgactttgacgccctcttgcatttgtatggaactgctattttgcagcatacatctgtcttcaggtaccatttttactctgcaaacattggttaaccttgaaactctctgctgctccttcctcctctccttttatgacagagataaataagttggtgatgtttccagaaggacacgatgagacagacaggattagactccaggaaggagcccagcggccacttcgtgagctagtgttcaggcaaccctccccagatgtgcagtgtagcagaagtaaaggcccctgagaggcacagagaggaagacgcatcccaaacttcaaaggctggcagcctcccactccaacaccgggggatatgaaattctgccgtgatgaagagcatcgtctgctttctaaagtctgaagaatatttctagtcagttcctaagatgtgctgggggtgagatggactatggaagtgtcaggaggacagataaatgatctcttagttgttggattcatgatgtctaaatccatttccgaaagccctctctcaaggaacactctttaaggtatgggtaggtgactttcagctctctattcgtaagagacccatgtttccacccagtatctatcaccctgagaccgtgggaggaatgaccaaaccatgttaagcgccccccctcccaatgtttgtccaatgtcatgacagagggtcaacctcccatgaaattgagagggttatagtcttggcttgagatggggttggagtaaataatgtatycaatcctcttccagcttagcattcacttggtggccaatgagctcttccataattattaacactactgagcacacgctacaagtcaagaactatgctagatgcccttcatccatgctgtcactgaattcttttaaaaaccttatgaggtaggagctatgattagccctattttagagataagaaaattgaggttcaataacttgcctgaagtcacacagtgagcaaatgacagagatttaaacatgcattaaaacaactttatgaaaggatgaattctgaagatctgaccttagagagatgggtgtaattaacctgaagttgagagactcctgtggcatatgtattgtgctagatagagaaagaaaatcgtggttgtaacaaggaggccgaaatagaatgtcacaagagtagatgctctgggttgcaggtgcattcttttgctaacaagttttttctcacgtgagtaactccacacagcatgctcttggctgggtggcagcaggctaccattttagtgacagttaatcatttaatgatggttaataattctcccaactgatgccaggcaggcgaggtaccttaaaataaagtacagaacttactggcatgtatgaatgcccaattgcatcagagattaattttctgtttgtgttgaatgctgtgtggagagtctatgttatcaccagactttgctaaatttccctgtaattttttgcatggtcctgactctcctctttcatttatctgcatatggattctccacgttacggtgtattctgattttcttaggtaggtgacattgaaaaagtgtaacaattgatgaggcatggggattcgtccgtttggatgaatgcactgaccgtgtgaatgcttgccagccataaacaaccagctgaatatcaatcttgccctgaaacaatggagatttccccatagtctagtccatgggatcaaacagtaatttgcatttcactgaagcacatggagaagtcaaaacagactatgcaagtaagagtcagagaatagcatgtgaagcaaagatttgcacctggggttgttagtagcagggtctattgaactatgacatctcttgatatgttttagtcaccatattaatttctcttgcmatttcaaatagcattagaggaaaatgtgaggttaaaaatgtttatcaaggagacctggatcataaaagcttgagaaacatcaatgtagaggcatgaacagtagaaacaagcataggtttgatggagtcgctgggttaacatggagtgaagctgtccatctttttcccgttgataaagtcctagttgaaaatgtttgaggatctctggtgcagggctttgggaatcaggcaagacctcagtccccagggagtgaagatgaggttagaccagtgacaacgttgttctgatgcaccaaaatgggcgaacgaagtgaggtgcctgggacgcattcaccagcattcaagtacctgttgatgcagggcccctgcatgttgctgtggctagttttgggggttgtttgaaaaatagaagagtcagcccctgattctgaaggaatatctgttctcgtggaagaaacaaaacactcaccaacaaagtcagttcaattctatagacatcgattgagaacctaccatgggtaagaaaagctctctgtttgagagtaacttaaggatcattgaaaaatgacacatcagtatgattcgaataaagcagaacagaacaatcctattgttctcaccatactgctgagacataaaatcccagaattctagaagggctctaattaggaaaggcttccaggagamggtgactgtggggtcatgaataaagtggcagcttcctcaggggagcctgggaagagggtatttgctccattatcagcccggcttttggcggtgcaagaaatgaaggctactgtaygtctagaagtttccaatattttcaccacctagtgttcttttttattattttgactcctatggacactgtttttaggaggattttatctactgataaaagtatattgaagcagtggttctgtactaatcaaacctacctgtaacatgtaatttagatcctctgatttgcttgagaattatttattcattcaacaaatattcacgggatactaaatcaattggattcagtttggtggtttatgacagaaaatccagattatcaatggcttaagtaagaattttatttccttctcatgttaaagaaggagagaatagatttttgggtgggaggcttatggttgctgtcataagcatctactagaagccaaataccaggttatgtactagaaatggctaggcggggctcatgcacagtkatttgctatgattctaacccatttttaaattataatttcaacttttattttagatccagtggatacatgtgctgggttgtttcatgggtatattctgtgatgctgaggatatgaatggtcccatcatccaagtagtgagcatagttcacaacaggtagtttttcagccttgctctcctcacrcttatcatcatccccagtgtctattcccatttttatatccatgtatacccagtgtttagctctcacttataagtgagaacatgaagtatttgtttttctgttcctgtgttaatttgcttaggataatgtcctccagctccatccatgttgcggcaaataacatgattttgttcttttttatggctgtgtatattccatggtatatatgtgccaaattttctttatccaatccaccactgatgggcacctaggttgattccatgtcttcgttattgtgaatagtgctgcagcgaacatatgagtgcatgtgtctttttgctaacccaatgtttttcttttcttcttctttttttttttttgaaacagagtcttgctctgtcacccaggctggagtgcagtggcacaatctctgctcacagcaacctctgcctcccaggttcaagcaattcttctaccactgcctcccgagtagccgggattatagacatatgccatcacacgcaactaatttttgtgtttttagtagagatggagttttgccatgttggccaggttgatctcaaactcctgacctcaggtgatacacccacctcggcctcccaaaatgttgggtttacaggggattacaggtgtgagccactgtgcccggcgtgttaacccaatgtttttcaaactttagtgtgtgtcagtcacctggaaagcttgtgaaaacagatttccgaatgttatttctggagtttgtttcattaggtctggaggcaaagagactgacaatttgcatttctagaaaggtctggatgctgttggtctggtgaccagttgaacccagtgacataggtcagggcatggccatctacagcctacaggtcaaatccagctagctatttttgtacataaatttttattggaatgcagccatactttttttgttttctactgtctagggctgctttttactacaacagcaggggtgagtagttgtaatctgaagtgtttcctatttgaccttttacagagaaagcttatcaactcctgccttaggtagaagtggatactcgcaatccataaagaaggtatgtacatcagtggagaagtcagcaagtaccggacctgggtttccatctcatcccagttcagccattcattttttatgtgactttggtccggccattaccctatctgatcctcagttgcctcccctatgtaatggaggcactgagcaaatggtttcaaaaatcccttttagtacttctctgatttcagcagagaagctgacggaatggtttgttgccattgtacaaagtgacaggctctggctgaatacgtcccattttgctgctgagttcgattggcctttatgttctgtttatgaaggtgtcccctctgccacttttggagggaactccctttcttcacttttgattgatatgtgacatttactggagctggcattctttaattcctactctctgagccactttccaacatgttctattcatcactgtgacttttttgttgcctttgccactaytaaccttctaagagttcggaaaagaggcacttagagtttataatgacatatataatatcacaccacctctctctgycccagactgacttcactgtgggtttgggagtctttttcagaagcaacaagggagaaaattttgcttttgatggcaccccatcaatcaaagtgagacacacagttgactgtatttaaatcagagtgaatgagtggaaatgagtatgtaaaggaatctcaggaatctctattcattggattttagtattcgggcaggtgcatatattggttaggaattgtgtttgccaataaataagcctggaaatgctaaaacaaaagagaagtttatttccttctcagattaaagcagcctggaggtaggtggttgagggttgccaaggtggcttcatggtgtcctcatagattaagcctcttcctgtatttctgttgtactcttaagcacatggtttgcatcattaaagttgcttcatgatccaagatggctgctggagctccaggcatcacattcacactcaaagcaggaaacaagaataaggaggagaagagcaaaaagggcacactctagctgtatgccccttcttcaagagctcagaaatcctaccccagcatttcagtctattgttggtcatctctgatagggaggaaggctggggaatagaatattttacctagaaacattgtttctgaattaaactggagttctaaaaaggaaaaggagaaccgacattgggtgggaaaccagcagtttctgctctgatgtctttcagaatgaatactttgatcaatatggtaggaagttagatttggggatggtttttggcttgcactgttgtgggtgtgttatgaatggaaggccatatagcttgcactcgtaaagaggaaacgcagctttcattagatatccctggctttgaatctgccatttactagctttgtgacttggggcaagatatttaacttttctgagtctcaatttcctcatctgtaagttgaaaataataatagtagcaaagatgatgataatgaagatggtgctaaaagtaatcatgactttcttgcaggaacaaatgatacattgaagatcaagcactaggaacagtttttagcatgcagttagcatttaatgaacagcagataatcctctttgaagaacaatggatatcagaggaaagactataaattttgggttcctccagacataggtttaggtgccagcttagccactggctagcggaggaaccctaagtaggtttctgaatcttgctgagccttaattttcttatctataagataggtcacagtaggggctaaacagataatgtgtgggacagaactgaggcaacatcagaaaacgtgaagcacagaccccggcatgtggttcgtgcctagtacctattgattttccttctctttctagtatagaggattgggctgtgaggactttgttcccgggtctgctccggtagcctgattgttctcaatcctttctctgacctttcccttctctgttctatatgcaaggacatattttatccaggctataggtgatttctccctcacttcctcttccttgggaatgtccccatctagctcttgatgggcagcctccagggtcccaattcctatcaggtggtccctgctgtgggatttgctactgccaagcgacccagcttctgaactttggtaatgtctcctgcatcccccttttcctccatccctaggatattaatggcttcctcttttccttttctctctgtgtcccagtggctcctatgtaaccaatttcctgtattatctctgttggaaacacctggagtggtttccgtttccctgactgggtcttaactcattcacgaatctaaaattgtataaacacataatgcccaaacattctcttcacttacctcttacctctcaccaccctctaaaaatcttgtttgttttttttttttttttcggtcacgatggtgtgattttatttctttagttccatggcccttcattagctacaggagaaagtcaaaagtccttcctctgttgtttaagacgctctgttgtctgaggcatgggctcctttctaaagttattatttgcttctgaacttcagaaatttttagaacaaatttgattttacctccaaaatatatcatcaacctacccatttctaccaccagtcaaagccaggggtagctgaatcctgcacttgcatggccctgagaatgagttcttccttgaattctgtacccgtagatgcctcagtagccccagccctggatcaagtcaccactctcttacttggatgaatgcaatggcctctaaactggtctcttctatcaattatctttttctttacaatccattctctattcagtgtccaaagaaatcttttaaaacaatataatgtagatctgttattcccctgcatacactgcttccatggctacccactgcacttaaggcacaactaaaacctattcccatagtctgtggggcccagcacatctgcagctgctccatctttgtcgccatttcctctgtctcctattgctatgttcactccagcaacatggactgtcctcctgttcttctgatgcccaagttcttctcctgttacagggcctttgtctgaatccctcttccatgtattatgattccccatcctgctgcataatgtgttcatcatgggtaccaacaccaggtgaacctcccctttccccatatcactctgttgattctttttcacaatctattgttatcacagcctataactatcttgtttatctgcttattgactgtctctgcccactagaatataagctcattagggaagacaccacatctgtctttttggccttgtatattgctagcactaaccatattgtcaggaatgtcagaaacattcagaatttgggggatgaatgagcgagtaaatgaatggacaaatacataaatacctaaacatataaatcacataaacgggcccctaaggggtctgtggatggaactcagtggtctgtaaacttggatggggaaaaattgcttatttttacttacctctaacaaaagttttcattcttttcattttgaattgtagcaagaaatcacagtaatagcagctgtctgattttttttcaccaagagaaattacatatttcttatcacattatcattgttgtagatatttcagaattatttacttttgccaaattattttgaaatcattgtagttagtagacacagcacagatcttgtgatttagcatgttaataccgacataaacataacacaagtttgttttaaaacatcattatgactgtattttgatataatttgttttctttgtaatctagcggtttttttgtttctttgttttttgttttttgtttttttgttttttggtttttttgttttttggttttttttgagacagtgtctagctcttttcaccaggctggagtgcaaggcttgatcatggctcactgcaacctctgcctcccgggttcaagcaattctcccgcctcagcctcccaagtaactagaattacaggtctgcaccaccacgcccagctgatttttgtatttttagtagagacagggtttcaacacgttggtcaggcttgtctcaaactcctgacctcgagtgatccaccctccttggcttcccagagtgttgggattacaggcatgagccaccacacccggccacgtattttattttacttatttgacagctctgttctgagaaggaatttgaaggcttcaccagcctgccaaagtggtcgttggcacataaaagtcaagatctcttaaaatgaacgagtgatgtctgcgcttttgtttattgaggaccacgctaaaaataggtatccctcccattacttaactgtcatttatccttcagtatccaggcagacttttcttcaagaaagctttgcagtcttcagtggactccctgtcctctgagagtgtgtagcacttacccaaagcccaatacttccctgatcgtgtaagcctctttgggaagtgattttttttttttaactacttatgagtttgttttgtttttccaccttacagaggctttctgttactccctaatcataattagtgccctgtcccctgcacccttgttattttctttgtagagctgtatttttttccttcatagaattcaacraaattgataaatatatatttacttgtatgatttatttattgtctatatatccayttgggaagaggccttggatattttgctcctcatctagtggaggccccagaacatttatattggaagggcctaagtgccaccaacatagttacaagtggcaggaatacctagggaacttaccttgaagttcagtttgcatagcaagcccattgtatttacttagattgtatttattcttgaggtctggtgatattagtggggttattagcatatgtcagaggaagaacccataatatcgtgctactactgttgtcgccattgtacacttagcacacagaacaacacttggcacatagaccctaaataaagtatgtgtgaatggatgaatgatggatggatgggtggatagatggatgcatggttggatggaatgaatggggaattgggtggatggctggatggatgggtggagggatggatgggtagaaggctggaggggtggagggttgtatagttgagaagattactggctgggggttggagagatggagtagttggtaggggaggtggtgtattagtttcctagggctgctcaacaaagtcctgcaaacttcgtggctcaaaaccacaggaatttattatatcacagttctagaggctagatgttcaaaatcaaggttctggcattactgttctctttccaaggatgctaagggaagaccctcccctgcatcttctaacttctggtggttgccatcaacccttggcgttctttggcttgtaggtacatcattctagtctctgtttccatatttatgtggccttctccttgtgtgtgttcctgtgttttctcctcttcaggacaccagtcattggactggggtccaaattcagtatgacctcatattaatttagttgataacatctacaaaggccttcttttcaaatatggtcatattattaggttctgagtgagcatgaatttttgaaggatgctgctcaacccaatacaggtggttagagggttgaagagatggatgtatgaagcaatggaaggtggcttaatgggtaggtgtagaatgggaagggaggaccagcctggctggaaggggaagaggatggattggtaaaggagttgttgtataaagagaagggtgaatgattatttgaatggatgagtggaaagatgtagggttgaatgsatcaagggtggaaaggtggatgagtgaaagggtaaatgggtggagggatgaatggttggttgcttggatatatgtatgggtgaatcaattatattattaatttcttcagagtagaaattctggtacrtgtatttatcttctctgttattagtatgacactgcatttaggaaatgctcattaagtatttgttgcctggttttctctgcattcagaaatgctgttaactggaatgactgctaccagctgtccagggatrtgaacttctagtgggtgagggagtgtatgtgtgaattcatttggtgcaatrtccagcctggagctgtctctagcctggagtatgcttagtgaaaccctgagaaagaacttaaatgttgggtataattcctgctgttwagggagtgacaaaaatgtacatgtatagacaccactatttcatatttcaattattatttatttaacattttaaacctgatggcagaaaaatatgcctcagacaggcacaattgcttttattgtttcagattggatgggtaaatgtagcgtgggtgatcctaaatttgggctacattggtttctgttgaagcttttatcttatttgcctaaggaagggcttagttgaatttaaaagcacctattctgatgttgtctattgaagtgactgagtttgccagtgcactgttaatagggagtttgcagcttggtgccagatggattcacttcatcagatgtgacaaaggtcttcccagatgttttgtctgctcagagtatcctttttacattgatctggatatctgcagtgaactaaggagtctcagagaagtcatcctattattgtgtttaaatcttttctttttctctttcaaaaccaggatttatcaatgstggaatatttcagacatgctgataagtacagagaataaaataacaaacaaccatgtactgacaattcagatttaacaaatgttaatatttttgtcacatttatttcagattttaaaaatataaagatgctgctgaagcctgccaccctcatttcattcccttatctccttcctcagaggaaaccactaacctaaagctgataaatgtgtttttctatatgtacatgcaaacctagggtataatggtattagtatgttttatgctttttataaacagtactatatttttccaactactgttttttttttcttttttctttctttctttcttttttcytttttttttttttttttttttttttttttttttttttgagatagagtctcgctctgttgcctgggctggagtgcaatggcgtgatctcagctcactgcaacctccgcctcctgggttcaagcgattctcctgcctccagcttcctgagtagttgggactacagacgcgtgccaccatgtccggctaattttttgtgttcttagtagagatggggttttaccatattagccaggatggtcttgatctcctgacctcatgatccgcccacctcggcctcccaaaatggtaggcttacaggcgtaagccactgcgcctggcccaaattactcttttttactcagtattatgttattgagatttatctgtgtttataaatgtagctttagtggatttattttaactatttatattttaaatatccaccctatggatgtataaaaattttacttatccatgaactgaatgatgggcactttgtcattaaatcaacgaaacacagaacatctttgcacagatgagaaattttcttaatgatatatgcctgtaagtaaaatttctgggtcataggatgtgggcatcttcaacatcaccagagattgccaatttgttctgcaaaaggattgagcctgtttatgttcccacagcaaggaatgaaaagttgcaaccttcttatatctctttaaatctttgtattagtcctgttcatttttgcttatatgatagatgtaaaacggaatctaaccatggtcttcaatttgcawttatcttattaagaagttgaacatattttcacatttattggccatttgggttttcttttctttggtttgtttttcttgaacagtcatgtcagaagattcatttaatgtttttcctctgaagatcagcttatagttttatttggcttcttttttttcgcttggtttacttttggtttctgctttatccacgtaggatattttcctttttttrgctttgtttctttattctgttcggttttttaaaattaaattttaacttcttattgtcactccatattcaaatatatccatttatggatgtattagattggtgcaaaagtatttgtggtccttgccattacaaaccacgattacttttgcaccaactaataatacagctcttgtgtggaggtttctgctttatccacgtaggatcttttcctttctttggctttgtttctttattctgttcagttttttaaaattaaattttaacttcttattgtcattccatattcaaatatatccatttatggatgtattagattggtgcaaaagtatttgcggttcttgccattacaaaccacgattacttttgcaccaactaatacagctcttttactgcatttcatgagtgaccctgacaacagaaggacgttgtaacagcaggtggcaggatgtagactaggcaaagtggtctaatcctggctccattttctccccagggcaatccaccttagtgcaacatttgccctcctaaaactcctatgaacttgtcaccacctgctcaaaagataccagtgactctgcttcattcgtcactcacagtccttaagagagacggtgtgtagtggaataattatgggcttcagagaggcacacatttcaggtttaagctccagctcttctcttgctagctggctgactttgggtaatttaaagtgggaatattcatagagggttgttgtgaagaatagacaagattagattctgatctgtggtagatgttcaacaaaatatattatcttccttttagcctgacatttaaggtcctgtagatcaaaccaccttttccataggatcctctgctagtcaactacagaaatcttctgtctcagtcatttgattttcttgctgaatttggaaagtttcagttaaaagctttctgtctccatcctactcttctccattcactgttgtggccctgaacagtggcagaattactagtggggcttgttcaaagttcagattcccaagttttactcagactcactgtctgtatttttttttttttttttgagatggagtcttgctctgttgcccaggctggagtgcaatggcgtgatctctgctcactgcaacctctgtctcccaggatcaagccattctcctgcctcagcctccagagtacctgggactacaggagtgtgccactgtgcctgggtaattgttgtatttttagtagagatgaggtttcaccatgttggccaggctggactcgaactcttgatctcaggtgatctgcccaccttggccttccaaagtgctgggattacaggtgtaagccaccatgcctggcctcactctctgtattctaaggatagggctcaggatctccatttaggagaagctcccagtttgggtggaatttgctctagtgattgaagcttcctgcctcaacagatcttttctttatatccagcacaggacctacattttccgggaggtctttaccgccagccagccctggtcacacttaccctcccagcaacctgaaggcggaatatcttagcccacccctctccctggctagaagcatcattcatgtcccctggggcagatggcgattccttaaggacagggcctaggtcttggggacttgaccgttcctgttggaagttcagtgcatgatatgtaaaaggacttagggtgagcatgggaaggagcacaggctttgtagctgccmaagttcaaacaccagctctgcaaaactggcccacggggctcagtctccttaactgtgaagtgatgatagcacatccaacccacaggtctttaaaggaagattaaatgtgatcagctctttggaaagtcatttgtttttctcttattccagatggagaagagcttgaattatcatgagaatacatctgtcattgggatcatctttgtgttaatttcctcctacagtagaatttaatgacctcttgaatttcctgatgacaatgttttgggcatgtgtgccattgtctactggccactatccttgtctttcagagacatttccttccaggccattataattctgtagtttcccccttgaagtcttcagtaaaagaggtagtttgagatctctcagcacaaacaagactttttagtatgtgacagtgatctgacaaatgaaaatgcattgttatggtgcccacgtaacagtgcaagtgtagtctttacaaaatacctacctaatcccattacccttctgcttaaatgtctgagctggctcctgtggctgacaggagcaggccagcctggcagagaaggcagggtctggccagtctctctgccccatcttctgtaccacctgcacagtattgcactcaccctggcatgctctggtgaccgttcctggtattttctacctccttgctcttgtacatgcagttctctctccctggaataccctttctctttgccaagttgtgtgaattcggcaatattcaattcgaatggtccagtccctgatacaccccctcagacacacacatgcaaggcagaattaattccttccagctttgtatacttggagcactttaaaaactactttgagttactactcattcattcactcaacaaatatttattaagtgcctactatgrgtcagccattgatcttggctctggggatactcytgtgaaaaggcaatgccctgcacccatggagtttttcttcccaatgttttattactactcacttacgactgccctttccatcagactctgagacccatgcaggaggtgtcttgttcctgtctgtgcacttttacaactgactgcagttatttgagcttagaattccatggagaggaaaaacagtcccaaagtacagagtgggtgctgaagagattgcagggtggaatagtcatgaccttatagcaccaaaatcccaggaactgagtgttgcacacagtgtttcttattgtttgatcaactcccttgactttgtacagaggacaagaggaagagtgtggagttaagctgactgcacttacatctacatcatcctaccacctaactacatggggggcctgggacaygctctcgagtcttagcttcatcatctgaataatgggtctcttactttcctattgctgccataacaaattaccatgaacttcttagcttaaagtggcacatatttattatataaattatatgttttggaggactgaagtccaaaatgggtttcactgggttaaaatcaaggtttgtgaaagcagggctgtgctcctctgtaaactctcagattatgattcactgtctctacagcagtggtcctcaatctttttggcaccagggaccagtttcgtggaagamagtttttccacagaccggggttgggctgatggttttggaatgattcaagtgcattccatttattgtgtactttatttctattattacattataatatataatgaaataatgatacaactcatcataatgtagaatcagtgggagccctgaacttgttttcctgcaactagatggtcccatctggggttgatgggaggtagtgatagatcaacaggcattagattctcataaggagcatgccatctagatccctcgtatgtgcagttcacaatagggttggtgctcctatgagattctaatgctgccacttatctgacaggaggtggagctcaggtggtaatgcaagcaatggggagcagctataaatacagataaagcttcacttgctcacctgccgctcacctcctgctgtgtggcccagttcctaataggtcatggactggtactggtccgtggcttggggtttggggatccctactccagaggtcacctgtatttgttccttggctcctggcttcttccttcatcttcaaggctagaagtgtagcatcttcaagtccttgtctccctctgccctttctacctccctcttagaagaatacttctgattacattgggccaaaccagggacttcaggataatctccccatatcaagatcctcaatcacttctgtgaagtcttctcggccatgtaagttaacatattcacaggttcttggtatcgggacatagacatctattgggagacctttattcttcctatcaggtaggatggtatgggtatgagtataaatatgggagtgatgataacagtggcttttccactgggttatcagaaagattccaggagattcatttattcatcctttcagtcagcaaatattaattgaaagcttcctatgagctgggcactgctcacaaaaaaattgcacaaaatgttctgccattatagagcttccatcttaatcaggagagacagacaaacaattcattatataatgtattggagggtgctaagtataatggaaaaaaatcaggagggaagaggactgcggagtcccaggcaagttgtgggctggtcgcggtgactcatgcctgtaatcccagcactttgggaggccaaggcgggtggatcacctgatgtcaggagttcgagaccagcctgggcaacatggtgaaaccctgtctctactaaaaatacaaaaaattaggtgggcgtagttgtgggtgcttgtaaccccagctactcaggaggctgaggcaggagaatcgcttgaacctgggaggcggaggttacagtgagccgagatcgcaccactgcactccaacctggtcaacagagcaagactctgtctcgaaaaaaaaaaatagtaaaaaatcaataaataaggtggtaatgctgtgacaacttgagaaggtagcatttgagataatgagtctaaaatgcttagcacagtgcctgagatagagtaaacacagagcatttaaatgtaaattaaaaataaatttaaataaataggcaatccatctcttcattgtcatctcaccatccataaaacaaaactctgttctttctgggtggtatcattcattgaaattcactgggcttttgccaagcggaactctgatctttggaagggtaatttcagtatggagtgtgtcatatcaggaaattaaaatactgttatagattttcctcccctctggctctcttttggaatagcaacgactgggaggtaaatagcttagaatagagacagcaagtttctgatgcatgaatgggcaggggctggggccagagagatctctccctcggctccttcctccacgtcagcaggaaggaggcttgtagaacttggccctggagcttgcactgatcccagctgccatgaagaatagcattaggaacagaaaccctccaaggttgagatggagagaggaaatggggagagaagtcttttatgggttgagacattttgagccccttgtggcaccagcccaagggaggccaagtgtggggtattactgtctttcagaatggaatactgcttagccattcaacagcccgaggaatgctcatttctggagggcacagacctgggctatgttagtgtttggagacactaatatctctagtcttcttcccaggccaggagagattattgagcaaatgcagacttattcaggcatatttcctgaatgttaattcaagtggaggaatccaagcagtttgcaggcaacatgtccccacatatgtcttcactaacaaagtctggaattatcctttgggcaaatagaagttttctttttgctgttgactgtttttgaaaattagattcttaaataattcctgatatgttggcttgaggtagtaggcagttctcccaagtcctagaaacttgactctggctgccaaggagactaggattgattacgaaggaattaaaaggaataattgcttacatagggcttactaagtgccaatcacgattttaagtattagacaaatattaactcatttagcccttataataaccttgtgaagtgagtattattatctgcattttacataaagaaaactgagtcataggtgaaataacttgcccatggctacaaaattaatacatgtttgaaaagggattctaatcaggaaatataactattgagtctgaactcttaatcattaaagtaaagggatagtgttttagttgggtccctcagaaacagattgtgattaaatattgaatgtacctagtttatctgggacatgtaggggggtcacaggcaggggagacaggaggtgataaaaggagagggagcccaccagtgagacatatgttagtaagccagataccaaggtggtgaactgaaagttaaccctgcaggtaagctctgagatcaatgtaaaatgcacacctgagaattattcctgccaaggagtggaggagctgaggtatttatactcctgtgcccattagtcatctttcaaaggctattccagggcagaaaaggatatattaactctcagacacttctgacccaccatgcatgctggcaatgtggggtccaatattcagaggggtttctctcctacaaagatgaaggtgctggctattgggattcagggtggctttgcagaaatggtaagaagatctgaggcagttcaggtggagcaccaacatctatatcaggtatgggactcaagtctgtaagttcatagaacaaagtaaagaagattaacaggaactgaggtcctaattcctaaaagcagacaataatctttaaaccaagaacacaatagtatgcaaagctaacatttattgggtactaattgtttgccaggcactttgttaggtgttttgcagtccttattttactgaattctgaaaatgatctagagaggtagactttatcaccccgattttctggatgaagaaactgagatcgagacagtaacatccacaagctagcggagagtgggacctagatctatctgctaccaaataatggttgtggttgttttatgttataaaataaatgatcatttatagaaggatataaattacttgagggcaggaaacaaatctttttatctgtatgtcaccagggtgtacaccaatggttttcaatgtgaagtaattttatccttcagggacaaatgttctctgtttggcaatgtgtggagacagctttggttgtcatgagtgaaggtgagtactactggcatctggagggtagagtccaggggtgcttctacacatcctacagtgcacagaacagcttccttccacacagaattaaccagctccaactgtcaacagcactaaggtagagcaactgatatacacagcacttaacatatagttaggcttaataaacgttagctgaagtctgagtgttgggtggtgaatatgtagacgtgccaccctctgaagggggtggtagggactgaaaatgtaatgatacccacaaagcacttggagtttattatgcattttcatacacactatctcatttgaccattacacaatctcaaaagggtgcagaatttatggtgttatcaacatggaagaaatgaaggaaattaagagctgtgtgtgtgtgtgtagctgctgctcaaacttagctgtttgcctcagactccagggctctttaaaccatcctatacggcattgggatgcattgaaaggtgatgttttgactactaataagcgagagaagcaaagtaggtttgttatggaaaagatgggaaggtgtttatattgggatgcttttggctgcaagtaacaaaaccccaactcaaatttatgccgtcagtaatgaaatgaatttcatttattatgtagtgaagagtcttaaggtatggtgaccctaaagttgcttaggttaactgaggagccatggctttaagaaaaaaaaaaaaacaatttaaaaatgtatttcatccttttttattggctgcatcctcagggtggtgataagatgtgatctagatatgccagcaaccagaaagagacactttcagttttgtagcttcttaagagtgagagaacatttctcaaaaggcctcaatatgacttcctctcatgccacattggtcagaactggatcacgtgctcacccctaaaaccatcactggctaaggcaatggggctatcatattggcttagagcagtggttttcaactggggacaattttgtctttccctccccgaagggtaatagtctggcgatatttttggtgttcacaggtaggtgtttgtcgggagatgctactaatatcagcatgtagggaccagggatgctgtaaaatatcttacaatgtacaggacagcccacccagcaaagaaacaygatctggtcagtagtgcagaggttgagaaaccctggcatagggcaaaagagatttaatcctgagcctcctgtaggcaagtaagcacttgaacaaaatgaggactccatcagcttggaaaagggtggcatggaagttgggtggggcaccccaagatgatctgcttcaggaggactttgcacatttttgatgactgatgtcataggagacaaatacagctcttttctgcaaaacgtttctggatgcctctgtcagacagtgccatggccagaatgggccattggtctgacccagtctggcatttcttatcttcatcaggctcactgccaaaccccgaggataggttgtcacctctggcagaagatcagtcaggattaactgatggtgaagctgtgtcccactttgaacctctctctcacgtagccagagcagtgcagattcggagtcttaggagcagaacattcgggagccagtgcaaaaaaaaaaaatttgcaagaggcctgagagagagcctgctgtacaaaaggatgtaaaccagccagagacccttggtaaacataagaaggaagaacatatttaccttgcttctatttagggaaagaaaataatactttcctgaaggaggccatctgtgttcttaacaatagtgcttggcagttttgagctcgtgggatacattttcctggccagatcttaccagaaatccttgaatcatgtctgcaccctggtgatggaaggcaccaaggaagacttcggccaattggcaaggaactgtcaccaacttgaagaagcctatgacatcaactaaagatcctccccatcaaacattttcaaaagaatattttgaacaggcacaggttttttttctttgccaggtgataatgtacggtaaatgttttattcaaaagcagtgtctttgaattgctcaataattccctggtcattgattagggaatagtaacacatttaacccttgactaaatagatcacagttgtcacacatttatctacaaatatttgaatgctcgccttgtaccctgtgatttatgttagagataagaatggtgaaaaaatcaatttcttgcccttggtaacttacagtctaaaagaggaatcagattcgaacacatgattggaatgtcgtgggatgagagctgtcataactgttgtaggaacacagcagacgtaggctatcctttgaatgataaacgtgtgcatccctttcataacatttattgagcatctagtatgaaccagacattggtgcttagggaatttttaacacatctgattgtctaaaaacttttcaaaagcaaataatcataaagcaataggatgtatattaaagatatgtatagaacacaatgacagcctagatgaagaatgacttaatttgggagttagggagtggcattaggaaagacttcataaggactcagcaaagacatcaacagaggaaagaaaaagcataaaggagggcaggcaagtcaaacttttctgtgcagcaaaaagccatgtacacatgattttaaaaatgatattgtaggccgggtgtgaaaaaatattgcaggccaggtgtggtggctcacacccgtaatcccagcactttgggaggccgaggtgggtggatcacgaggtcaggacttcaagaccagcctggccaacattgtgaaaccccgtatttactaaaaatacaaaaattagctgggcatggtggcgagackgaggcgggagaattgcttgaaccgggacctgggaggcagaggttgcagtgagccgagattgcgccaccgtattcctgcctgggctacagagtgaggcactctctgtctctgtctctgtctctsyctctstctctctctctctctctctctcwatatatatatatatatacacacacacacacacacgtatgtgtatatatatatgtgtgtgtgtatatatatacatatatatgtgtgtatatatacacacatatttatacgtgtatatatatgtgtgtatatatatatgtgtgtgtatgtatatgtatattgcagcccccttccattgatcaagcagtgggcaagtgtatattaagcatcaaatgctgtaatatctaggctcaggggctgaacaaaaggagtatttggcacaggagtttgaccttaagaaggaggtagcttggctgatgggggcaggttaagatgcttgaaacaatttgaaaacccttcagcactaagctgtgtggttctggttatcagtacagtgggggttcagagcagggagccttgactgtgggctagaatggttgcagaagcttccctagctgagataattgaaagttggtggcatctttgtaggatactgagaaacaataccatatatagtgagaagtggaaaatcacatcaagacctgtcctgctttggaaggcatcatggcagaggataatgtttagctccacaaaaagataaggaggtagcgagtgagcatttaaagtttgggcttgctgctgatgtgatcccggctgcctttctgagcaaatcctggggtgctttcttagcgtgccactttgatcatcagcctggtgggttggaacgaatgtcaactttgagttcaaaggcctgtactgaatcctagcggtgcctctcactagctatgtgacctaggaaaagttayttaacggcatcaagcctcagtttcctcatctgtaaagtaggggtgataatatctaaattgtaggatactagagagattagaaagaatctgtaaaaagtgtctaagatactrccaaatgtaaaatgcagagagcccattacaagtagctccttgaatgagttggggtatgtttagctgcaagtaattatgagaaccttgactcaaagtagmttatacgatgtataaacttattatttcacatgaccagaaactctgamgtagatcaaagttggggactgatggattcagtggcccagtggtatcaacaagaatccaccttcttcccttccgtctgttctaccatccttagtgttgagtctactcataggctggttccaaaagggttcctgaagtttgaggcattgcatacagacacaaatgtggcagaagagagattttatcttcctatggcccccttaggtgtgagttagtaaatgtttccccatgccgcctccatcccaaccccagcagattcctcttaatatatcattgtccgggattgggtcagcatcagaactatgtactgatggctgtgttgtgtattagttagctattggtgcataacaaatcatcccaaaacttagaagtttgaagcaacaagcatttattatcttactgattatgtggatcatattcgggagcaacttagttgggggattcttgcctagggtctcttgtgaggctgtggtcagtacattggccagaggtgcagtgatctaaaggctggactgaggckggaggactggctggcatggatggcttgtttccgaggctgctggcagggggcctcrtttattgattttgagaacctctccgtggggctgcttgaagtccctcatgtcatggcagccaacttcctcagagtgagtgatccaaaagagagaaggcaaccacattgcctttgttgatgtcatctcagaaatcacactgtcttttgtcccccactccattcatgagaagagagttgccaagcacacagggaggattaagctttaccttttgaaggaggggagtattgaaaaatttgcagacatattttaaaactaccttatgtgtggtacaacagaaattccattgttatctggtggtcagggggtggagtgctttttttggagccacctacaaggtctaccacactattgctattaatcacctaaggaacatttatggagcccctactgtgtgcaatcattgcacaaggaggactcagacatgagtcttgctaattatggtgtaaagggagtgtaagatgcaccgggactatattgcgatatacaaagctgaatgtggaaaggaacaaataaagtaccagggggtgactgcagattgcagaaggaggtggtttacttccaattagcatattcatggaaagacttcactgagaaggtgggctttgaactgagctcagcggagtaggttggatttatacactcaaggatgggtatctgggttggtcaaaagcatggtcataccaaagttatcagctagcaattattgagcacctagtctgtaccagacactgaacatatattatctttaactcttattgcatccctgggagacaggcaatattactcccattttacagatgaagaaacaagcccggagacattaaatgaccccgtgagaccatgtagctaggaagaggccccactcagagcccttacctaagagatacttgtgttttaaagaactgaggggacaccaccttgccttaaggaacttccctagcttgttcaaagtaaggcttttatataacaatttagcttcagggagtaggtacagcagaatgagtaatctctttacaaaagaatttgtcattttattgaacctttacagaagattctccttaattatcaagcccacaccccacccaatacattgaaaatatgattcaaaatttattaagatttactttgcacatctttccccctggaattcctactctgcgttataccttttgtaggctgggttgttggaagaattagctggtaaaaatgagcttacgaaaatgggaaggtctcatggaagaagtgaagtcttacacattcccttcacttttttatgataaaggtgataagattcattaaagtaaaaagacattaattgctgctgattaacatctggcactctacccactcagaccaccacctgtgtattggaggtgagggggtgccttaacctgggttactttgccagggggctttgatgtcaggtggaggcagagaaggaagggcttaggataagcacagagaaagccacctcttccagcctgcggcagaggggagtgttcctggctggggccgctttcgcagagcatagatacgacggctcatcggcacagctctgacctgccagcctcccccacagctgcctccagcctccagagcggcttattcaggaacagaggcagatgcagtgtcggagcgcagctgcgtgagggttgcgtgggtgtgtctccatgggagtgtgtgcagtgtgcctatggtgtgtgtatgtgtggtgtgaatgtgtaggtttgtgtgtgcacatgtgagtgtgtgtgtatttgtgtgtgtatgctatgtgtatttatgtgtgcgtagttgtgaatgtggtgtggatgtgtgttttgtgtgtgtgtgtgtgtgaatatgtgggtttgtatgtctgctgtgagtgtgcagcattatgtggtgtggatgtgtgtttgtggtgtggatgtgtggtgtgaatgtgtgttcatgtatttgtgtgtggcgtggatttatatttgtgactgtgttcatgtatttgtgagtgtgtgtggtggtgtgtttgtgggtgtatttgtgtgtgtggtgtggatgtgtgtggtgtatttgtgtgtgtggttgtggatgtgtgtggtgtatttgtgtgtgtggtgttgacgtatgtgttgggtatgtttgnnnnnnnnnnnnnnnnnnnnnnnnttgtgtatttgtgtgtgtggtatggttgtgttgcgtgtgtgtgcagtgtatttgcgtggtgtggatgtgtgtgttgggtgtgtttgtgggtgtgtgtgcactgtgagcgtgcgaagttgcgagcgtgtatgtatagtgtggatgtgtgtgttgtgtatttgtgcagtgtggaggtgtattgtgtgtttttgtgggttgtgctgtttgtgggttgtgtgtgtttgcatgtgcgctgtgagtgtgctggattgcgagtgtgtacctggtgagtgtgtggctgccgcacccctcctctgagcggtgtggaccaggactcctctctctctctctctctctctttctcccccccctccccctccccctccccctccccctccctctccctcccttgcacatttgctcaggctcctcattgctgagggagggagggggcttctgcccagcacctggtccttcgaaaggcccctcccaggagtagagcgagcagaggccccgctcccgggtgcggaccctccccgcgcagaccctccccgcgcccaacgccaccggtccctcccgctgctgcgcagtcctcgctgccctctgttctgtaggtggcagccttggtaagccttgctcccatcctgcccctagggagaggagcttcagcaaaagacttagagtttagcgtctcgattttcaaacaaacaactctatcttttacagtttaaaaatgaaaacagaagatccagagaatgcgcttttaaacaaagccacatttacctgagaccctggggatagagagcaggtttttggtgcaggtttggagtgcagttcatccctgcccccgctacgaatgcacattcgcattcgcctttgagtcgtgagcaagagagcatctgagaaaacacgctagatgcagccaaacctctttaaaccctggcaccaaggaacaagagtgggtcccccctctgcctttcttttccactcactstctatcatctagttgatcaacagacatcagtggggacattggggggtgggaggggatgtctgctccctgccrggcgggcactgtgctagcgtcaggggcacaaratagaagcagacctggtttcagtctgatgtgggaaagagctaaagtaaacacgcagtgaatttgctgctgtttgggggatgagggggccagggggcttcctggaggaggtgacactgccctgatttttgaaggactagttgsaattatctaggccaggggacatttggcaatatctagggtgggtttttgttttttttgttttgttttgttttttgttttttttttgagaaggagtctcattctgtcgcccaggctggagtgcagtggcgcgatctcggctcactgcaagctccgcctcctgggttcacgtgattgtcctgcctcagccaccctagtagctgagactacaggcgcctgctgccatgcccgggtaattttttttgtgttttttatagtagagacagggtttcaccatgttagccaggatgatctctatctcctgacctcgtgatctgcccgcctcggcctcccaaagtgctgggattacaggcgtgagccaccgcgcctggccggcaatatctaggtttttctgttgtccaaactggggataaggtggagttgctactggcatctagtaggtrgaggacagggatgcttgtaaataacctacagtgtgtgsaggacagccccctccaatgcagagttatccagccccaaatgttcgcagtgctggggttragaaacacaggtctagacaagaggaggaaaagtgctgtggtttgaatgttagcgtccccctagaattcatatgttgaaatcytgatctccaaagtgataggctgaggtggggtggagcctttgggaggtgattaagtcatgaatgggattagggcaagccaggcaaggcaaaaatctctagacccttccactgtgaggacacagtgagaaggcagtgcctgtaatccaggaagctgaccgtcaccagacaccgaatatgctggcaccttgatcttggacttcccaacctctggaactgagagaaataaagtctgttgtttttacgcgcagtttatgtgttttgttacagcagcctgaacagactaaggcagaaaagcattccaggggattatgatgtagactgggaggagctgcagacagctgggtttgtctggaaggactgctgggtgtgggagagggcttagaaatgggagtagagccaggcacaatgattcatgcctgtaatctcaacaatttgggaggctgagacaagaggattgcttgaatccaggagttggagagtagcctgggcaacatagcaagaccctgtcactgtaatacaaaaattagctgggtgtggtggcatgcgcctgtctcagatactcaggaggctgaggtgggaggatcacctgagtccaggaggtagaggctgcagtgaactctgatcactccrctgcacaccagcctgggtgacagtgcaagaccctgtctctaaaaaataaaaaccaataataaaagaaataggagtagagaagctgtcagatggagatgaatgaagacccttgaatatcatgctaaggggtttagactttatcttagggaaggggaaacattaaagtgttttaagcaggttttaagtaacttagtccaatatactttttagaatgatcactctggataatgcrtgtcgggtgcggtggagggtggcagggctgcacacggcggggagaggcttcaaatgcgggctgttagtrcatgcaagcggagaagtgatcaccatgtttccacaaaagaacttagaattggtttagttaatgcagtgcaatggaatgcagttatacaacagggtcgtttttatatttcaagaagaagaaagcaatgggaagaaaagcattagggagatagagttttgcatggctgccgtgccctttcatttaaatgaccgaccaggtcagcatgttgcataaggacacgggcaaattacttctgctaaccgaggcggaactctctggtagcccaaattccagtgctccatccatccagggaggtgtctatgagatgacaggtcatcaaggcaaataatgagttgtttgtctccacggcatggatcctcctgggatcagaggtgtcatctgacaaggcatcatgggctgtatcccccaccaaaacaaaatatatgttgaagtcctaaccctcagtacctcaggatgtgaccttatttggagagagggtctttacagaggtaatcaagttaaaaggaggtcattagtgtgagccctaatctgataagactggtgtccttataaaaaggggaaaattggacacagaaacagacatgcagagaggagagatggtatgaagatgcatacaatcttaaaaaaaataatactggccaggcacggtggctcacgcctgtagtcccagcattttgggaggccgaggygggcggatcacgaggtcaggasatggagaccatcctggctaacacagtgaaacgccatctctactaaaaatacaaaaaaaaaaaattagccgggcgttgtggcgggtgcctgtagtcccagctactccagaggatgaggcaggagaatggcgtttgcaatgagcygagattgcgccactgcactccagcctgggtgacagagtgagaatccatctcaaaaaaaaaaaaaaaaaaaaaaaaaaagaaaaaaaaaaagtaagtactaatatttttattatggcataaatagaacaccatctatgagccaaggaatgcctgaggctaccagaagctggaagaaaggcatgaaatagattgtccttcagagactccagagggaaccaccgacaccttgatcttacactttcagcctccagaactatgagagaaaaaaattatattgttcaagccaccaagtttgcagtactttgccacagcagttctagagaactaatgctaataccaatcacacaaagtgattgaaaaggggagaagtcctggtgaatttcagaaaaacccctgatctcagttatgcaagtgagatcatcaggggaatctgaatcaatcatcgtttttacctgaaagcagtaggcagaaaggaaattaaattccatagaaatccattaatcgtgctgggcatggtggcttacgcctgtaatcccaccactttgggaggcccaggcaggcggatcacttgaggtcaggagttcgagaccagcctggccaacatggtgaaaccccgtctctgctaaaaatacaaaaattagccaggcatggtgrcaagcacctgtagtcctagctactgggaaggctgaggtatgagaattgcttgaacccaggaggcagagtttgcagtgagccaagatcataccactgcactccagcctgggtgacagagtgagaccctatctcaaaaaaaaaaaaaaaaaaatcgatcatccagtgcagtggttctcaaagtgtggtccctggaccagcagcatcagcatcacttgggaatgcagattcttgggcttcccctgagatctcctggtcggtgactccagtgggtgatgcccatgcacactcaagtttgaaagcccctggcctagggtctgtgagaccctggagaagtcaggcagagcttcacaggggaggtgacacatgagatgtgccttgagggataggtaagggctttgaaaggagccagggaaggacatttgaaatggagcagaggcagggagatatagatgtgtgagacttcttcagaggagcagtacagtttggagggtatatggagaggagggtgagagaaaggaagtacagacacatggtgggcagtgaggatgggtggggagtggtggctcacatctgtaatctcagcattttgagaggccaaggcaggaggatcacttgagtcttgacatttaagaccagagtgagcaatatagcaagaccctgtctctacaaaaaatacaaaaattagccaggtgtggtgacgtgtgcctgtagtcccagctactcaagaggttgaggcaggaggttcactggagcccaagagttcaaggctgtagtgagttgtgatggtgccactgcactccagcctgggtgacagaacgagaccctgtctctaaacacgttaaaagaaagtgaagatgaagtcaaagatgttgtcatgttgtaaaggatttgtgagccaggatgagtttatatttaatgggggccgctgaagagttttagaaagattactgtaggctaaagtatcaatgtgtaatttgggtatatgtgtgatattcaaattagctgacctattaggactgtctcagccaacaaatcactgaatgcagacagtcaaccatgctttctgaaaatgcaaagtcctagtggttcttgagatgagtggaggggtcacaccaatgtcaggagaactctagatttggggaatctttaagaaagccaaggaccagtaagtctcctgaatagatagaccagttttcttccacctgggactattaaagatgagtgacacctttacctcttgaccttaatcattcattagccagcaagtcaacatccttctcaaagtgtggctccatcagttctgagccagttttttttttttttttttttttttttttggcttttttttgacgtggggtctcactcttatcgtccagcctggggtgcagtgacacgatcttggctcactgcaacctccgcctcctgggttcaagcacttctcctgcctcagcctcccgagtagcagggactataggcatgtgctaacattccggctaattttttggatttttagtagagatagggtttcaccatattggccargatggtctcgcacttctggtctcaagtgatcagccttcctcagcctcccgaagtgctaggattacaggcatgagccaccatgcccggccctgagccagttttgccccaagttgctaagcttccctgatcactgaccagtctgaaggcagataaacacaaagcctttgtctatgggacacttatgatttggttgcagagaaggtggaccttcacactgccaatctcagttctcayggccgcctggcatcaggaaggcattaatctctgccaaggctctgtcctcttcacctttcagcaggtgttccttgctggttgtttggcccggttgataggaaaaaaagaagagagagtgggcccgtgtgcctctgtctcctctttgctcaatgacccaagaaggcaggagaaggaaggcacttctcagctgcctttcctatggttggctgctgggctgggatggagctggggaacttacctcttgtgacgaacgatgaagaagcagggatttcatgcagcatcagcatacgcacaaggctgtgttgggaagaacaaggacagggctccagagaggactgactgcagctgcccctttaatgctggtcgcacatgcttgcttctgtctggctcccctcccggactgcatggatagctttgttcacacctgaatgcctggtgcctgggttccagaaaggcatagctttcatttctgagcattttatatgtgccttgagattaaccatcaccatgaacagatttggaaacaggtttggagggattacgagacttgcccaaacacatttagcttgatggggagaagatcatggccctgttctaacccctcactctcagttttgtttcatcacatcatcctgtttattttcatcgtagcttgtatcacaattgccaattttcttgcttgttgttgtgtttagtgtctgtctacccctccaggctctgggtttctgatagcggcacctgtgtttcctgggtttaccttggtatcctgagttggtaacacaggcccatcatacagccaaagctctacagtgtttgttaacaaaatgaatgaatgaatgatttgaacccagacctatttggccaaagcctcactctgtaacctctgctcactgcagagttccatgtggtacaatcttgcttggcaaatgttgatggaattataacagttcacggttggtaggtgggggtgtcagatacatgcatctgggaaagtcacagaaattcaccccaatataggtataatcacgtgcccaggaatgcagggcaaactttgcccacaggtgcaaaccagctggggcacctgtggtatcctaggagcctggtgtgcttaaaagcatggtgtagtcatgggttcgagaaactctccactgggtaaggacactggatatatggacacaagaaactctycattggktaaggacaatgataaggaaactctccattgggtgaggacactgaactctttcacatgagcagagacttatgttaggagttgcagctgggagtcaggcagaagctatgatgaaagctctctgggcctcagtttccccatttgttgtttggtgtgtgttccaccactgttgtttaatggctcagagtggagaccggcattaaactgtgttcgttcaaccctgaatccaccactttctaggggtgtgcctactggaaagttttcattttccttggtgcctcagttcctcrtctgtgaaatggggataatgatagtatttacctttgaaggtgggttgcaagggctgaaagttaatttatataaagcacttggaacacatgstaaatgtctggctgttttgatgagaagattcaatgagatactgacttttcataatgcaaaaggcgctaaaagaaactcagcagaggtggcatttagatcaaggtatctctgtggaaggtatcaaattagatgaaaggcttagaggtgggtagacccacatttaaaaaaaatcacttaatttgtacagtgtgcgccaattgttgtttataaaatatcatccattttatgtcattgaagtctcccatgtctctctggcatagccatcgttacccaaggctcaacaagcttgaagtagcttgtttgaaggtcacagctctttagttatttgttcatggatttcttgaaagcctactatatgctaggctcagcataaaatggggtccaaaaccaggtgctgtttctgctcatgtgaatctgacagtctagagaaggagggacatatttcaaaaaagtatcatgcaagtaaatacgatgcgctgtaataagtactgtgtgacccacccaggaaggtcagagaaggttccctgaggacatgggctgaaactgagatgtgaagactagggtgggtgacagagggaagggaaaagcattgcaggaagtggaaagagactgggcataggccctgtggccggagggatcatagcaaatgtctggtctgaaaaaaattgcctgagaagaccctggtgcttggagggtaagagtgaaggaggtcagagcagaaccgtgctgagaccctcaggccacatttgggtgttgcatctttgytataagagcagaaagaaaccactaaagattttaaagccagggtggatggtggtgaacatgagatttaccttccagaagcatcctctggtggccacgtggagaactggctgcaggggagaggagtgcaggcagtaagttacrgttgctaagaaacattcaccattccatgggtaattattgtgcaccactgtctacgggctctctgctgggtgccaggaacgcagcactgaccacgacaaagcccctgccttagagagatgacgtttctgtataaggacagagacggcaaatggacaagcaagtgaatgaatgtgkcaggaagcagtgtggctgggaagaaatacttaaaagcagggcgagagactagagcatattggctgccatttaggcaggaaaaacctcttgtgctgacatttgaagtgaagggacacccatgtgagtatctgggggaagggctttccagggggcagcacagcaatggcaaagaccctgaggtgggaacaggctcagggtattggaagaccatcatagaagtcattgtggctgcagagaaggattaaaagaggcagattgtaaaggccacattgaggatttacgtattttatttagagggtgagaagaggccattggaagccagatctgggaagtgacgtgaactaagtgcgattccagcgtaggcttcttctcttctcaaattctggcccccacaccactttcccgagttcagatttctccctggcctcatgatagtagtatttttaacaagtcagcagccagtatggcagagcctaccccctagatggtgcatgagacataccaaagaagcttcacttttcacttttttagggcaacaaataatacatctatttattgctttttccactagaatgtgggcactttgacagcaattttgctcactgctgtatctctgaagccttaaatagtatctgagattgtagctgtcgataactatttgctgagttaatagatgatcaccctgcacttaagtttctatgtaatgactcctggccagagagcagagattcagcaaagaagaaggtaaaaagaagggaaagatgagagaggcccctttataactcatcaatgtaaaaaacacaaaataaaaagtcttgagcttaagagagaatgcagtagaaaacrtcaacaagaaaacctttctgtctgaaaacgcctgatccttgtgtgagacctttccaggatatgtgggttttcaggtagcatcttcacccccagggcaacagtaagtgcaggcaggagaccaaaaccaatacccttgccctcatccccatagcaggggtgaagtctgagcacgtgactggacacagcagccacacgcctttggtgtcttccaaggaggcagtgtctcacctgtgcacatgctattcatacaaacacaacatgatctggagcagagaagggcataggaaactcagcaggggtatattatattttctgccagaactgacagtaatattgaatgatgagagaaatgcagtaatattgaaggacgagagaaatgagagttgtataacatttaatgattttttttwwaaaaaatcacccaagaacgtgaagatgatttgaaacgcctctgaaaatgatcccttcctgtccataggcagcccagcttgcacatagcccgtgcttgctttacacaatcagtgataaactttgaagatgctgcagcctccattgagtttctttttgtatatatatacttttatttatttatttatttttttggagacagagtstcactctgtggcccaggctagagtgcagtagcgcaatctcagctcactgcaacctctgcctcccgggttcaagcaattctcctgtctcagcctcctgagtagctgggattacaggcatgcagcaccacacctggctaatttttgtatttttagtagagacggggttttaccatgttggccaggctggtctcgaactccagacctcaggtgatctacacccccttcggcctcccaaagtgctgggattacaggcgtgagcattgtgccaggtctgagtttctactttaattggctgccttaygcaaaccatgaagaagcccctgcatgaataaggcaggaaactttttagtcccagactaggtgagacatatgccgtatccccaaaataaatgttggggcattaacttttaattgctgcattatgttttactgtttactgttttatacagcattcttgttcttttttttaaaatactgtttttcttttgagtctacgtgactgcagcctttacgcctctaatcccagcacttcgggaggccgaggcgggaggatcacctgacctaaggggtttgaggccagcctgaccaacatggagaaaccctctctgctaaaaatacaaaaatttgccacgtgtgggtggtgcatgcctgtaattccagctacttgggaggctgaggcaggagaatcccttgaacctggaaggcggaggttgcggtgagccaagattgtgccattgcactccagcctgggcaacaagagcgaaactctgtctgaaaagaaaaaaaaaaaagtgtgtgcaattggggtggggaggtatagtgctcttcttgtagactctctctcccaattttccatagataaatggattcagtggggacagaaagagggccactccagctctggggagaaatgagagagttgggaaagtgagatccctctgcatttggttgtggattattaggagactaagaaggaaaccaaagaggactccccctttcctatattacttgattaacattagctataataacaaataattcctgcaaaattttaatgccttagcacaagatttgacaagctgtggttctccagcccaatttgggcccttgtttgtttttgtraataaagttttattggaacacagccacacccatttgtttacagatcatctaaggaagcttttatgctatgataacagagttgagccattgtgagagagactgcatggcctgcaaagctcaaaatatttactctctagctctttacagaaaagtttgctgacctctggcttaacaataaagcttactttttgctaacctgatggtccratggtgggtattcctggggtcagcaggcagcttctcttcatgtggggatttaagaastcagtctccactatcttgtggctctgccatcttctaataacttaggattttctgcaagcagccagaaaatccaggaarcaggaaggagagaagaaagggtgtcctatctctccaaaactctggcccacatcctgttggatgaacgagtcacatggctacacccagatgcagaggtgctgggaagtgtccatggctgggcagctgcctcccagcgacagtgccacactgtgtaaatgggagcacacattcattttggacctgtagccatcaccaccatgctctttccctactatgccagatacctgcatttgaatcatggctgtgccacttactgactgtgaaacttgggggaatttaacaaaacactctgtgtgtcccaggttgctcgtctttgaaatgggcacaatcacagttcctgcctcatagagttgctgcaagcagtaagtgacatattatttactgctcaacacagacctggcgtggggcatatgtagaacatgtgtcactgatcaaggatgatgtcggcattttcagtgactagacaaaaaccagaggcactcggcaacatccttcagagcactttgtaataagtccccaacctcccgcactgttctgtgagaagccaggtggatgtaggagaggttccctggagagattagtccaggctaaggcagtggggacagctcgagggtggaaagggaactctgcccaaaagacaagggtgcttttcggaatgccttggacgagggaggagagaggaggagcacgcagggcagaggaagcacttggttggtgggtgcagcatcatctctggtttagtcctttactgcatcaacattgccttgcttgtgacgagtaagggtagggacagcttgtggatgggaagtcgcagaggcaccaggccagcccatgctgaaagctcaccaactccagcactcaccagcgaggactcctcatgtctcactgggttccccttccatcatcagaagccaaggatgtttccaaaatattccatcgatgtccagagcagcactggaaggtagtaagagcaggatttgtcatcttattttgcatatggctagatggaatcactgagagacacaccaacctcactcagctagtaaatgcagacccaggatgggcagccaggctcctatgacgctgtggctgtggatgttgcttctgaaacaaggcaggatgaacgttccttggagcactggcagggggggacattcactatattctaacgttaatacttgggttktcttgatagctgagatgctaaactttgctgtgagagcttggaaaagtctgttctctctgagcctcagtttcctcatctgtaatatgggcaactcctttataagatcccttacactttatgtggatgctaggtgttggggagggctataaacaacttattttctcatgtaacaaatgctacttgagccttcaatgggctgtgcatgctggagatacagcagtcaacaaacctgtcttctttgtgtgaggagaggccaacagaaacataacaaatatttaatgtgtcagctgataataagcactrggcaaaaagtggattagggaaaggcaaaaggaagcccttgggtggtggtgcgatggggttttgatttgaaatagagccatctycacgggagggtccacttgagaacaggcaggtggaataggagagaacttgatcgtttctgtgattgagaaagagaggggactggaagtgcagttsttcctgaggttcgttcacctgaatctgaaagcacctgatttcaagttctgcattgttttggggtgggaggaagtgagagaaaagcagacctggttcttgtttggcgtgtttctcactgagtggagctactaggctttcctggggccattgttaagagctgccatggcccatgtctgctggtggtggtcttctttccttgttctctgcagtgccccccagcttgactgtgcagtgaatggagcagatccatgttcttcagttgacagaaagggagagttagagatgaacctaatgccctgcttaaatcagagggcgaagtgatatgaagtttraatttaggaaggactttytttytctctctctaatggcctggagatatcctacaggctatgctgggtactttgcatagactaccttcaagatgcagagaaaggaaatgcatctaatgctgttagtamcaataataaataatagcaatagattccctgtacatgctggacagtgcaccaagcattttattttatttttcacaataataccatgaggaagctactttttattactcttgttatacagaggagcaaactgagscttaggaaggtgacgtgacttgccccaactcatccaattagtgagaacctaagttgggatttgaatttggctctcaatctccaagcagtcatgtgtcmaagtggttgccactgggtgggggattctggaagtcctttctgtgtcctcatgctctagatatttttttatttttttctgtagtgagcatacagagattctatggccaggaggaaggttgggctgagaacagtgatgatgtagccagacagtattgtgtgagtcaaagaggctgccttgaggttggctccaggaccctggctacgaagctcgctgtgcctgacttcctcaagccacttgcctcccattttttctttagaggaaacttccactgcctcggatacataakgtcattgcaatcctgtctaaagtctggcctccagggtttgcagtaagatttctctgaagcaaggctgcatctctacccatgagattttgcatcccctagcctgcctgtctctgccagccgatatagggaggcaggggatggctcacatcagtatccttgagtggaccccgctctggtgtctttattttcatctctgggaaaaagttatattttccctggagtcaaatgaggyggtattccagcctccttgcttaaatatatctcaaaggttctgctgtgtcaggcatggtgattcacgcctataattccagcacttagggaggccgaggcaggaggatcacttaagcctaggagttcaagaccagcctggggaacacagggagaccctgtccctccaaaaaaaagaaaaaatagycagatgtggtggcataggcctatagtcccagctacttggaaggctgaggcaggaggatgcctgagcccaggaggtcgaggctgctgtgagttgtaattacaccactgcactccagcctggatgacaaaacaagaccccatctcaaaaaaaaaaaaaaaaaaaaaaagaccctgctgcktccctgatctggcaaattaaaaatataaaacctttcgttaaaccccagagccacgagtttcctataagcatgrtagttttatgattcagctgcaccattagtaatctccagtcttcttagcccctcccatctctctgccacctctttcaattttcttctttactcattcctctcttctttcctcctctcttttcctctccatctcctctcatctctcgattcctctctccatcatmctctcttccctcttcctcccttccctcttcttttctctcctctctgactcttccatgacttatctccatttcaactatgctttttttaaaaaattcatttaaattttggattattttgtgggaggctctgttttgaatttagtgcttattttatttgctcaaaaaatgagcagccagccaaccaaatagccattctgtgtctacttgtggtctctcatgccatccaacagctcttacttgatataattgctaagcagtgagaaagctattgtgcctacctcttcagtgaggagtgagtgggaagttatggctgaacgtgggctttctctatgttgtttaggcttctcatcttgacactacactaaatccatggcttgaatgggtctgcaaaatgagagtctctaaaagccagacccatcttggcatatcttgtgatctctaagcggcaatgggagacagagaagacgtggtaatgacatagtttagctgagactgaaacatagttttgcttaaaactgtgcgtgacattggctgggcacgktggctcacgcctgtaattccagcactttgggaggccaagacgggtggatcatgaggttgggagtttgagaccagcttggctaacatggtgaaaccccatctctactaaaaataaaattagctgggtgtggtggcacacacctgtaatcccagctactcaggaggctgaggcagaagaattgcttgacccaggaggtggaggytgcagtgagccaagatggtgccactgcactccagcctgggtgacagagcgagcctccgtctcaaacaaacaaacaaacaaacatgcataccattaatgagaccacttgtgcatcattagtctgcaatgagccaaaaatccaaatgaactggtagatagctgatagaagcctcatgggctcgatttgagcccttgtgtgtcctagggagaggtgaatgccatggttcttaagaacatgtctttggattcgaattctggctctgaggacaagctatatgacctcggatgagtcatttaacctctctaagccccaacctgttcttctgaacaagaggcacaatgacagtttatggggtggattaaatggcataatgtgtgatgtacctggcctaaggtttatgcttaataaatatgtgtcatcactgcaatgttttgggatgttttctctgtatgtaaaatggtgcccatgtccacctccctgrgctattgggggattaactgagacactgcatgacaaaactctttggaagtccagtgcaaatgagtggacttgtgacctctcacattatttctgtttgtaggttcaactggcaagccaatcatgctyatttatagcgacacgcastgaaaacttttttctcacaagaggttattgaaccaagatgagaggaaataccaaggctctttttggtgttttaattccttcacatctatttctttcatcaccagttaatgaggacttagtactcacatcagcagtaagagtagaaaatgggctcatattggtgttcgaatcctgatgtgttctcttactggttttaagatttgtgccaggttactaatcaaatcttaaaccttagttttctcacatataaagttgtaattataatacccacttcgaagggtcattgtaaaaaccacacctgaatgtacccacatatatacagacacaaccactaaagaaaatagattatgtaatatttattcaatgtattttacttgtctgttgtttatagagccctgcytcagttggatgagttatttcagatttggaagtgtctcgttctctagcttgggaatgcagctgaacaytgggggcagctgtggccctctttttgtttgttgccaactcggtctaagatcagcctgagtggactcagtcggaatctaccatctcaataccaggtggttaatttctcattggtagagccctctttttacaggcttgggaagtctggctgatcatctcgggttgtttaagcaagaaagttaagctatatccccctgattagtaggattttctcctttagattcctgtgttaatctacaaactgagcagtttatccctggtagacattggaataccaggtgtggtagtcatactgattatgcatgtgtagtactttctagtggtgccgttcttagaccacattttcagttcttgagaacagtgtcattgttgkcatttttctcccaaagagctggcataatactcaaaagaaacggggtcttattaagtggttgttcattgactgataggaagagaactgtgggaatatatatttatggaaaaacagttccaaggtattcattcactcattcagtcactaaatacttatttatcatcctcaaaatgtcaactgtgtgctaagtgttcagactggagagaagaataagacctgctatggggaagcactcagtctgaggtgagggaagagagggtgggaaatagactatggtgcagcactgatgtatgttttatttttgtttatgaaatgttgtagggatgtagaggaaaatgaaactagcatcagtgctggactttaaagcgaggctaaacctccacaggtgaaggagatggggaagacattctagacagaaggaagagatttgtagacatgtcaaggtgggacatggaggaacagcaagatgttctgtgtggctgggatggtacacgtatgtgcgtgcttgcgtgtgtgcgtgtgtgtgtgaatatgtgcatgcacatatgcatgtgtgtgactctgtgcatgcatgtgtatgtgtgtgtaaggctgagctggaaatcaaggcttgcattctattctgctagggagtttgtattcacttattcaacacatatttatcaagcacctgctatatgttggatgctgtggtrttttgatgtgtgcctcataatcacagtaaaacctccacaggtgaaggggatagggaaagacattctagacagagggaagagatttctagaggtgtcaaggtgggacatggaggaacagcaaggtgttctgtrtgaggtattatgagataggtattatgaccattactctcattttactaatgagaaaactgaggctcagagaggtgaagcgacttgcccaaggtaacacagcatgatgatccccatcactgggggcagagagtccactgagaagagaagttaggcagatggggcagaatgcagcctaaggtcactcagagtgtcctgaacgggcttgatggacattgactttggcagcctcctcatttgctccagccccactgaccctgtctcccctgacaggggagacaaccccaaggtctcccctgctttggggcatttgcatatgcttttctttccacctggaatgctcttcccctcattccctcccttggctggctatttctcatcattatscatcatctcctgagaaagggcttgcttccgctcctgtcaatcccctcctgcctatctttgctgtcaatgtggatttcagcttccttttttatttcctttttcaaagtctaccattggtaactgkgggaatgtatcacagttcactgagtggcgaagagcttggagtctgcggtagactgctgaggtgagaattctggctccaacacttaccagctgctgggatattgggcaagcccttcacctttctgggcgtcattttcctctgctataaaatgggaacaatagtagattcccctcacagggccatccaggagggattccaggagggcagagtctgacacaacatagatgttcaataaatatgtgttgaatagagccgtcattgascagtccattcattcactacctaggtctcatggctgccttagagctgggaaggtacaggctgcttaggggacccagctgtggtcttccctctcccacccacccagtgactgctctccaaaggctgtgggcttgcttctggggattctgccagtcacctgccccctgaaaggacttctgctgaattgcagccaattagggctgattagatgttaatgagtctgaagctgcttggtaagcggtttagcacaaacttggaggtgagagggagaagtttggggaagtggtgacatcatgcacaggctggagaagtgcaagggcctgaccaagacgtacagcatctcagttgtctgtccagactgtcctgtggctctttatgttggagctggtacaggtaggacccctgctaaacctggcaggggagtagcaatgataataatgatgatcataattatagtaaaatmatgctttttattgagctcttaacatgggccaagcactatgcttggtgctttatatgtacttacttttatcttgtccttacarcatcataggtggcaccatgattatttatcctcattttgcagctgagaatcagaacaattaaccttgtatcgtatagctagtatgactctcttgaatccagagttcatgttctccttagtttttcagaaactcaatgtggaaaattctaattctatatttattgcacacacagctgcagcctgctgcactaaactcccacctcgtattgaaataataacgtgcagaactcccttttatatttattgatcatctacattgtgaaaggtggttttttatgcaattgacttctgaacatcttggaaaaataatggaaaaataatgtaggttaggtatgagaattcccattctccagatgaagaaactgagcccaaagagtttcaatgagcctctcaagtagctgggactacaggcacctgccccacgccccatgccctgctaattttgtatttttagtagagatggggttttaccaggttggccaggctggtcttgaactcctgacctcgtcatccacccatctcagcctcccaaagtgctgggattacaggcgtgagccactgcacctggcccatcttttcatttctttggtatactgtttttttcctyccagctttattgaggtttaactgacaaataaagtggtttgtattcaaggtgtacaawgtgatgttttgatgagtgtgtagactgtgaaatgatyaccaccatcgaattaattaacacatctttcacgactrttggttaccattttgggtgtctgtrtatgtggtgtgagtataattaagatctaatcgcttcacaaatttcaagtgtatartatgatattactaactgtagtcaccatcctcagaacttattcattcaccttataatggagagttggtaccctttggtcaacatatctacattatggccatttctaagtcagccaggaagtcagtgtaagatgaatccaggatcactccttctgactccggtagtcctgaaccctcgctgagctgacacagacctggctgcaatcttagaagaaagcatttgccaaacaaatgagtagtaaagaggcattgggggtacccggcagggttgatttaatctacttgagggcataccgttttctagccttgggtagataaattgtttatgtacaaggaatgctgctaactagaaatgtgttttatcttktcattaaaatgggtccacaaatttctgcttagaaatacaattttagcttccctctttgaaatscttacagattaaacatttcctccttgctatcmttgtgacaatatcttccatttattgtgcctctgctgtatgccagackgtgatagatgctttccatgcataatctaattctaatttttacaacttaataatagtgataattataaaacaatgataaacagtagctttcatgtatcaaatgcttgtcacatgccagacactgtgtcaaatgtttatatcttattttatccttatactcgccacacatgaaggtactgttagtgtccttattttactaatgaagtgttagcagtgaggtgacttccctctttttattaatggggcaactgaggcacagacagatcctgcaatttgctcaaggtcacaaacttacgttgrgattcagttttttttttttttggagatcaacacttccttggacttattgggaaatggatgatcattgttaaaaacacgttttccaaaaaaaatattttttcttgaggtttgggggaacttgggagaaaaagtggggtctgagctgctggcatggtccaaagtcactgaaggcaggccacagccagtgctcagattgggaaggtggagctgtaactctggggcattcttgcttatgacaatgaggatttccaaggtgtctgcaactcagagattctgggacctagagaatcagagcaacstcgggttgggagatgagttttctttcctgctcatcttcatggtgaaagcggagctggggtgcacggtgtgtggggrgtgactggcagtgcaggcatgcccagctgtgagtgccgtggcaccaggacaatcacctccctggatagagtttccctcgtgcagcatcagcaataggtggaccagaggttcacccctctctcagcagaagtatcattagtgttgacagcgtgaaatagcctctagggttctctcagccatctataagaaggtcaggctagaattgagctgagagccacacccccttagcacgcagctgctgkactcccctttcacgttttggtgaactsttctccaggggcttctgtcacatcaactgcagtggkattgctgcctccagtttgtgtcttctggtgctagcacagaaaccccaccttcttctcttmtgtttctggaaaacaccagcctcctcttaccttactgagatcagaattcttataacacccaccactgtttcatcttagggtcctttttcacatacagtcttatggttttctatttgaaatggcccacgtgcatctgctttgcctcctaaacgaagctaaatgtcttctgatcaygtctccttttaataactcatctctttaaaaaagtcatatcatttgattcttctaaatgtaaaagtaactactctcatcgtagaaaattggaaagccacgtatcagggccaggacaaggaagargagattaagaatccctccttggatgcaaaatttaaaagggtgccaaacaattaagttatcaaggtaaataccatttcagtgcaatattttagagaatagaaattaatgccaagaattccatgattaacataataatagaggatccagcagggctgagactaaggttgggcaagtacagtcggatcttgtctttatttcaaattttgatttgttttgcatcattttttttgcattggtttttatttgtaaaaatatcatattaaaatattacttatcttgactgatgagtcatttatcaccctcttaaatgttgcacccaaaggaagtgcttcattggccttgctgtacttgcagtcctggttatgatgaccaatgtatactgagtactcacagtgtctcaggctcattcttatgcttttcttatgttatgcttgttcttttgtacaacccccacaacaactcacaatagctgggaactgttactgttcatatttctcagagcacttagagaccctcagagagtagtgacttgcaattaacatagctcgaaataagccgaacaaaccaagatgcaaccaaggctgtttggctctagaacatgcactcagtctactgtaacctgtgcagaaatgatttcccctcctgccttctttcatgatccccagcccccaggtagtcttctctgactgccgccccmccaagactcatcaagtgccctatcatgctgccattgtagcacttaacaacgtgtaatgattatctattaatcgtgtaatgattatcttaatgtgtaatgattatctgtttctttgtctgtattcctcataaggttccttttaaaaaaatggcagtgtctctatgttcctatggtgtttttgtggtcagaagatgaggggcttgtaggccatttcacttggggcttgatcacctgctcattgtcggctctggactcaaactcatttgccccagtagcagcatgctcttcagaggacagaaagaggsccataggctctgatcccttagttggtaaacaatcatttctctagatctgtgttcatccatcatggcccattaagcagcagtggcctggggccattttccagtgtgactgatgatatttgaagatttggcagaggaggtgtaggaggcttgtcttctgtgccagctccatcctgctgctcatgtgagtgatgatagtggggttggggtggmtctggtctgcactgattggaagtatgaggggtagtgggatggtgcccttgtgcgagtccaggcygggaggcccagagagcaggtaagagagatgtgagctcactttgccctaatgtggagaagcagtgcatgaataatcacccagtgggggagagaaactattgcaaaaacacaactacaataaattcttcgtctctccgttgttatccatttatcctatggacaattactaggcacccaccaggtgtgggatgctatgccagataggaggcacagggctccctgccctcacaaagctcatgatttaatgctaccctttgcattgtccactgagatgggtctgtggttggcaagaggctgcagccccttagcaatactagatgcagtgaatytgtggggcaatagyccttcttttctttcccatgcatgtgtggaaatccagtgtgtatgaagtggagatctgaccccatcttgtttgagctgtgtgctgattgttggatggggtgacagatgaaacatgtaccatgagaagtccacaggctacatgggaaaccaaacaacgctcaggtatccaaagtgtctttcctgactgtcccccactccactgcaccattgcaggctgaattagggggcctcttctctgcgcctctyacattaccctgggtttcccgtgctcaggccatgcctaccacttttttttttttttttttttttgagatggagtttcactcttgtcacccaggctggagtgcaatggcatgatcttggctcactgcaacctycacctcctgggttcaagcaattctcctgtctcagcctcctgagtagctgagattacaggcacttgccatcacacccaaccaatttttgtatttttagtagagacggggttttatcatgttggccaggctgacctcaggtgatcctcccacctcgacctcccaaagagctgggattacagtgtgagccactatgcccagctaccctaccacatggtttaatgaggttctgtgtggctgtccatttcccacactgatggtgaattgcctcattgcaggggctgagttgttgcacctccctgtcccctgcagttgccatcacctcgtaaatagtatgttcccaataaatgtttgctgggggaatgcagccaatgggtgatgaagcaggtgaaaatgcttagaagaaagcttacactgcaatgttatatacatgcaaatgaatctagtgcaaactgcctatcttgcaaaatgattttccaaatgtaagtatgttcagaaatttaaagcgcattcggaatcagggagtctttttttgaaaaaaatatttttgttattattttgcctgagtgaactagttgttgtgtcactgagttaaaataagtcacctggaagtaggtctccaaaggtaggccacaggtctctgtacttagatctgttttatagacattgtggatctttcaagtctttttcttcctctctattctttcctcctacccttagtaagattctagttatttcttttttttcttttcctttcctttctttttctttttttttttctttttttttttttttttttgagatgaagtcttgctctgttgcccaggctggagtgcggtggtgcgatctcagctcactgcgacctccgcctcccggttcaagtgattcttctgcctcagcctcccgagtagctgggattataggcatgtgccaccatgcccagctaatttttgtacttttagtagagatgagatttcactatgttggccaggctggtcccgaactcctgatctcaggtaatctgcccaccttggcctcccaaagtgctgggattacaggcatgagccaccacacctgtccagttatttcttatttaaatgattataacaaccttctaatgycctcctgcttttctattcactcatcctcctgtagatgctaaatwtttttttctgaaatataaatgtcatgttcctattaataacccattacttgttgataaagtccatattgcttaactcactgcataastctctttgttcatggccttctaggcttgtctctctccactctgacctatgtttaaatgacttaaaacggttgtcacttcttgagacaccctcatttcttggtaatgagtttccctttgtctgggactcctgtgccatcctcatctcgttaactcctacttacaccacagaacccaactttctttataatggcattcaacacttggtttcagagtggtccatttatgcctctgtctgtcctgctagactgagtaatctaagggtggggctcatgctttgtttacctatttatcttcagctaccctctgagcctggctcatagtagccactcaagacatgtttgtagaatgaatgaagacccgagttttctaagaaatgtgtacatttataaggccaggagaaaagaacatatagtggccaatgaaatcaagcttcaaatatggtttactaaactagaatgcagggtaaagttgtcaaggtatcctttaagagacatacatactggtcttgcatttaggttataaaatttattctacaagtgccaggttgagaaggggaaggtatccagccatatgaaaatgaccaaaaactggagttttcatttgttctgataataaagcagaatattgacaagtcagactccccyacacattcactcacaactcaccacctacccatttattagctgggctaggctatacaggcttgcactctgctctcacagagcttatcaatctagacggggacacaggcatcaaataacgaagtcacagtaactgtgtgtaattacagacagagctgaatgttctaaaggaaaatatcattcaacagaggagcttgacccagactggtagctggtctgagacggcttcgttgaggaagtgacgcttgagcaagagattacaggcatgagtagaagctgaatcaatagctggatttctaggaagaggaaggaggccagagagagaggtgtgggtcaaaccactttaagcaatttttctcttcaccaaagaaaatctctttgcctggaaaaagattgaataattttaaggagagtttagatgatttgtagttaaaaagaaacacttcagtggtcatggtttcgctgtccttgctcctgacccaggaggatgctggttggtaccaatctttgcgttttagaagggtcagacagaatgagcacagagagaagagctatgattccaggaaggtctcaggaagaaaggcagagggcatgagagagcagtcttcaaacatacgaaggrctgtcctgtggaggagaaacaagagccactagttactgtcccgcagggaagagtaggacctgtgggcaaaagctataagggagagagaaattagctgtgcttgagagcagaccctttgaaatattaaagctctcacttattgggatgatgattaggaaggcagtcagctgccatcatgtggatgcttaaggctggatggccattcttcaggataaagcaaggggaaggctttcgtgggagaggaacagaggaaaaagggcagcctatgggctgaatccagcccatagatacaccctggacctcagaggctgtaaaaatccaatgagtattcacgaaaatatctagggatggatctctttttaaaatccagatttttgaaacttttattttaggtttgggggtacatgcgaaggtttgttacataggtaaacacgtgtcactggggtttgttgtacagattatttcctctcccaggtattaatctcagtactcaaaagttatcttttctgctcctctaccgcctcccacccaagaactggtaaattgggccagctttctagaactgcaacaattgtttgcagttgwtacatggtgtattagttgcctattgctgaaataaattaccgyaaacttactggcttaaaataatacaaatttattatcctacagttctgcaggtcagaaagctgaaatgggtctcatggagctaaaatcaaggtgttagtagggctgaactctttctggaggctctaggggaagaagctgctttttccttgcctgatttccttggctcaaggccccttcctcatcttccaaggcagcaccagggcatcttcaaatatctttctcagactctactttcaaatgtcctttctccccatctcaagatctttaccttaatcacatctgcaaagtcccttttgccatgtaaggtaacatattcacaggttccagggattaggacatggacacctttgggggccattgttctgcctgtcccacatggccacccttttagaatcgattgaacaaggtttacattattttctttacctgcttctccatgctagatgttgcatttgtgattcttgagttaaagggctggtctggataaccattyttcctgtggttatcctataattagaaatgaaatttagcatatgagggttaaatgcattaatacaaccctttgaggggctggagatcaggtataaaakgtgtgagaaggaactttaagttctttaaaagtgatgcttttattgtttgcaggatgtcacataatcagttcaattcaacattgaatctgtgctctgttctgtacaggattaaagaatatgtaagacaaagcataacacattaaaaactttttccatttcgctcccactcaagaaaacatttcagattgtaaatgagtaagaatgatgttattatagaaatgaccttgaatgtgctgtagcttacaaaaaaagccaaaatcatttccaagtwtcactgattggactgggatcctaactaattagtgcatcacacctcacagctgctcatgatccattagttttgaggacctcttatctatgctatggtctccagcctccagaaaagcttttgtctgtctgcagagacaagagttatagggtgaaactatgagcagcttggtgtagcatgtgattaagtacttacatgtgtggtacagacactaggtgctcaggggtttggacaggcatcatggtgaaccagccctgaacgatgcttggtgaacgtcatcccrccacaaagcagattcccactttctgattctgcagtagggcagcaggtagatgaaaccaacactgggtaacttagattaaaaaaaaataattaattagcatgtttcaagggtgctctgcaaaaagcgtgcatctgcaatgaataaggagagcctctctagggatccrtgaaggaggatctgacaggcagttacttcagcacacagcagtcagtgaatcggccctgaccttgtgtttttcctcctgtgttggaaatgtttggagaatgagtggttgatttgggtcccgccttggccctgggagagtagacacgtagactgatggacccaccaaggcaaaaggaaatagaatattgctacttacagaagaatggttggatgctgatgtcagttgtaactttttacttgcaatgtcttaagagtcacaactcaggcaatcccacaggtaccttagcaccttactaaatattcaggggtgaacttgtstccacttatctccaaatctagaattctttctaatgtaaacacctgggaagataatcttagcattaaaaacttagtttaacatacatctgtaattactgataagagccatcttcaaaatgcaggcacaactattaccgtgtaatttcaaactgattcataaataagaaagagtggggaaggtagataagtattcttcccagttgtttgtggggttactgatgctaaagaagagtctggcattggtggctgggaactttggatgtcaccatgaaaagttggactgggatatagaacaaatgttacaggaataacccagcaagcctgaacgtttagcacatggggacaccatgttccacaacttcaggtgaagggtggggtggaggactatgctcacaggatataatatgattgctgccccctggagttgtgcagcatagcagtcctggtgaagagaccagtgcagtataaatacatggcctccctggagagacaaggtaagaattctggaggagcaaggggagatattcctttttcagcacgtacctgggggtggaggcatgaaccttcagtagcctctcctctcctcctctctgagctgagtcctagtcatcacttgttaatgctgcaaatccatagtattcacagtgcaataataacggtgggaagcatttatgaacctatgaagtacctataaagtactatgaagtatattaaacagttcctatacatgatcttatttaattttacaacatttttacaggtaggtactattgctaatgctctccaggttccaaatgttatccttttaaaacttttatattaagttcgagggttcatgtgcaagtttgttatacaggtaaactgatatcccaagggtttgtagtamagattatttcagcrcccaggtattaagcctagtacccattagttatttttcctgtctgtggaataagrttctcttgaaaactctggaggactaagaaaaataaggctgtggaaactcacctaggtgaggattcttcttgtattagtgtacaaagtaaaagctagatatatgtgctgaaatgaacagcttgataataataaaataaggaaagaaccaggtasgccttgctgttctctacccttatcagaaaggagaaaggaactgagatgttcatctatgtgcctgagggcacagtactagggagtagaaagcaggaattcaaacagaattcacagtcgtgcttgtttctttgggccttgctcctcactcgtagagtagaggggactgtgctttggtctggcccaagacaagtgactgtgcaacgctgtgccagcatctttaggaacctcagttccagtttcattgtgcatttggccatcatccggcctgtctctgcctcttgttcattgtggtcccacgtgacttctttctgyctggtttgtctccggtcatgtgacttagctgcctggactcttctgttctatgcaggaacagagctagttttcatttactgcaggaaagaccagattggcaggttgattttttttttttctttctcatttgagcaaggcactgggaacactgagggtgataaagggaaggcttagttttgcaatctgtgcttatatcactgagctccctgcaagcaagacccttgaggaacatgtggggtgggtgcccaggtgagctcaggcacagactctattgcaacccccatcctgyccaggtctccctgtttgttaccactgcctttcctggtctgagtctaggggttgtgccgtccttgggaattgagccgaatcacaaataaaagggcacttatggtttcgagtggcgcatactctattacagtatgtcgctctcacctgcctacttttgcattgaaaaaattcacctcttcttagctcctaatcctcacttcatccttacctaccttctacctctctgtgtgtcaactctattgtgtttctatgattacatttttaaaaatatttatttsttttgaataggcaatacccacatgggattacaaaaattaaatcagcatctgtatgtgtctagcaagtattttttcttctaagcttccttcctggaggaaytgctgtttcttgtacatcattttgtctgagtatgtatttggctaagcctttcaaaatcaccttctttatggatcaaagtggtcacttaccagcaaattgacatgattcacccaaattccagcataaatacgggactttatcagcacttgacrtataacgtattttcatctgtattagtgtattgcctgtctctctccatcagagtgtaagctaaatggagccagggcttgttttgtttactgctaaatctccaatgtctggcaccaaaaagacccaacaaataaatatactactttttattcacaaatggtagccaactctgtgctctgttctacaccttgctttcttcatttactgccatgtttttcaaattattatttgttggtacctgtaaatcagttttgttttctaacagttgcatggaatgtgcatccatggtgaaaatgtaccctaatggatgtgaccaattcccttctgatggacacctagcttgttcctaatctcttgacattacatgcaaaaaatgccttgaacatccttgcacagatctctgcctaaaagtgtgagtacctataggaagttacctatgtgtggaactgctgcttctgagattatgttgctgttttgggtaaacattgcctagttggtttattgtatgctcagggaagaatcacagtgctcatgggtccggtctttggtcctttgattgttattgttggaaacaactccacccacttcttatgctctacaaaacaacagcagtaggggagtgactgcacgctgttcaagcttcttaaagttagtcttactactccctgtggtcaacagcagtccattctttgtatgctaatctgttacatttgtattagaagatggatatctcagcatgacacaaccarattagttttgctgttggaagccaccatggggtactagttggggcacagctgttgcatagccatgggatatccaaataaggggattggggaaggcactgtcataagatcatgacctctcttagaagcaggagccgtcaaggctcaagaggacagatctccaataccttcattccctgcctcctctctgtggtgttattacttccccccaagatgttcaagttcagctcatgttcatagagtgcctactgtatgccatgtactttctgtccaagatcgaatttaactttcttaagagccctgtgaaaaaaagaatactacttgtatcttatakaggatgtaccagaggctcaaagaggtagaatgacttgtcagagtaagcttttttaaagatacaaataagactgtccttcctgcttaggaccttccattctaaagtcctcctgtgttcttatctgcccatgtcagtgtctccaagtcaatcatattttcttcctttcaaatctgtctccagctacacagcctcttgtcacttacatctatgtgttcattcctgtcaaaggccatttgcttttctatttccctttaccgagaacttttagccccctaaattaaaatttacgtggaccccgacagcacaggcaaccaaagcaaaatgggcaaatgggatcacatcaggttaaaaaacttctgcacagcaaacggtcaagaaagcgaagagacaacccaaagaatggcagaaaatatttaaaaactatccatctggcaagggattaataaccagaatatttaaggagctcaaacaactcaatgggaaaaagatctaataatccaattaaaaaaattggcaaaagatctgaatagatatttctcaaaagaagacatacaaatggcaaagaggtctatgaaaacatgatcaacatcactaatggtcagaaaaataaaattcaaaactacaataagttatctcactccagctaaaatgacttttttacaaaagacaggcaatgatgaatgctggggaggatgtggaggaaggggaaccctgtacttttttggtagaaatgtaaattaatacagccactatggataacagtatggaggttcctcaaaaattaaaaatagaactaccatatgatccagcaattccgctgtcaactatatacccaaagaaggggaaatcagtatattgaagagatatctgcactcccatgtttattacagcactattcataatagccaacatttggaagcaacctaagtgttcatcaacagattaatgcataaagaaaatgtggtacatatacacaatggagtactatttagccataaaaagaatgagatcctgtcatttgcaacaacatggatgaaactgaaggtcactatgttaagtgaaataagccaggcatagaaagacaaactttgcatgttttttacttctttgtgggagctgaaaattaaaacaattgaacacagaagagagtagaaggatggttactagagtctgggaagggtagttgtgagagagggtgctgggaaatagggagggttaatgggtaaaaaatatagttaagatggaatgcgtaagatctagtgtttgatagcataacagggtgactgtagtcagcaataatttgtcgtacattttagaataactgagggagtacaataggaacgttgaaagaaatgatgaatgcttgaggtgatggaaacctcattttaccctgatgcgattattatgcattaaatgcctgtaccaaaatatctcatgtactccataaatatatacaccyactatgtacccataacattttttaagaaataaaatgaaatttacatgattgggttcttctagccacagccagaatgtcatctctttaggagtgatagatcctccttgaccgctcccccttagcactctctatctcatggcccattttgtcttgcacacagctcttctcactgtctaaaaaagtcgttttggttgttcacgtggtttatttattgatgcagatgttgaagttgcattgtaaaaaaactgggtttaaaaatctgggtgcatgcacctttgcctgagacgatttcattgcagtcctgaccaagggccaggagagcacagttggtgacttctacgactgcagttaggatggtgtccaggttcctgggacaattgtgcttagattgaccactgaggctaatcacattgtatttgggagcttattttctcttatatgaagtaggttattattacaacagcctacatccttacatagatcttcactgaaaggaaaacagtctttgctcagtgctggccaaagctgtaatattgaggtaaaaagctatcccttaagaacttatggtttcaaaggtagtttattcatacactcagaggtttgtgtaaatgtgtgtgtcactgtgtatatgtggttgcmttagaaataaattcaacacaaatgtgatcatgtcatttcactggatgaaaacttcccctttttgtcttaggtttaaaaagtgaaaagtacttaatagaatttataatggaatttgcaaagtgacaggccacaggatgaatgagttttattcagcccacatggtgctttgacttagtctccaacattkacaaatcaggagatgttacatgaaattctggatatttgacttctcttaaagatttaaaagctccagtgatactgtctgttgaaatggcagtattcagatggaagtgagtaatatctttttctccaggtagggcgtggacccccccagtttacctctttacgtatctggaccacttcactcactcatggtacacacttggcccctataaaatttggttttgtgaccatcgctctgaaatttctccttcattttcctttggattgaaaaatagcagttaatgtgagtaataaaaaatgttatactcatgtttgttartttgtggaattgcacaagcttacaaatataaacagcagttgtctgagagaaagcaggagagaaatcaacttttaagggtacattggcccagaatataagtagcttctgatatctaaatcttcgctgtcactttttatatcaatagttatttaaaataagtgctggcaaagaagtaatttcttaaactaattactttgatgcatgttgctagatgcaattttttcaaatgattattttatttgattcatgcttgtaacctacatacttaccagtgccccatatattctagcctcaamactttgtaaattcagagaaacacagagcttttataaaaataaattttcgttttacttttgtcttttcaataaaattcatgggcatctaatttataatgcactttaagtaacaattcttaaaattgtctttcctttccacttctactctctcttgccccgtgtagtaggctgaataaagggccctcaaaatgcttatattctaattccttgaccttgtgagtatgttaccttacatgacaaaaggggctttgccaatgtgattaagttaagcatcttgatatggggagattttyctgtattatccaagtggacccaacaatataatcacaagtgtcctcatcagggaaagacagggagattctactaccagggaagatgacagtttgatgaccaaaggaaaatgctgtgcttcttgctttgaagatggaggaaggggccatgaaccaaggaatgctgggattacaattctaggaactggggaaggcaaggaattggattcttccctagagtgtccacagagaatacacccctgctgacaccttgattttagcccagtgcaactgatttgggaattctgacatccatgactctaaggaataaatgtacactgttttaaaccacctggtttgtagtaatttgttacagcagccgtaagaaacatcccataattgtccttttttttttttgagatggagtctcgctctgtcacccaggctggagtgcagtggtgtgatctcggctcactgtaacctctgcctcccgggttcaagcgattctcctgcctcagcctcctgagtagctgggactacaggtgcgcaccatcatgcccagctgatttttgtatttttagtagagatggggtttcaccatattggccaggctggtctcaaactcctgacttcgtgatgtgcccgcctcagcctcccaaaatgctgggattacaggtgtgagccaccatgccgggcctaattgtcctctttatttgtgwgttctcaaccctctccgtgaaactttcccagcccccttttgattccctttcatgggtaatagtgagaggcagcacacacagggaaccaggacagtaaacaacyttcttacccttttccaagatttcttcccaggagagacacagtaaaatagagcaggtgaggcaatgcggacgtgtgactgcatgatccattacctgaaataacttgaccaaaatcagtgggagaaccaacaagtctgtggaacccacagtctttctcaagcacttattcctcttactcatagctcagtgtctttgctttaatgacctcattctttgctgcataagcccactcagactattccctagatattctgccgacatggcctcatctagactccatgtggctctgcctctaattactgtgtgcttcatttgcataaggttttactcattctcatgtcattcgtataaagtgggagtctcattgctaaggcaaccagaagtgggagtgtgcacaatttcagccttgtccaagaactcagctctacttggtatactcccactgtgttcttggtttcctgccttccatatccaaaataatgcaaacaataccatggtcatctctgttcgttttttctctttttattaatcttttagcaggcctatccagctttttcctgaattcactaactttgttctttaattatccctagctaatcttgatgtcttttccttttcctgcataatagatatcttatctggaatcctttatggtaattactgctgtgaacactttccacatgggtttttctctttcttctaccacccttttgaccattccatgcctctcccattggaatcagaatccaggatttctgtttctgctcttcatctggacagggccactcaaaaatagatgaaggatcagggactccatactccccatgtaggaagacagatggaggcctctaagaaatgtggttctaattttaaactgattgcctcgtattcgcttcccatgcatcaagagctagtttgagttctactgtccataattgtcagttgctacacactcactcagcagcaatatgscagatttttctgctagttaatgcttaaaagtttattccattttacaaagtactgatgaatttcgacaagaataaaaggccttatggtttccagtaggaaaattgcctttctcctaaaggccatgaaatgcctttctccaaagtccattgggtgactctcgttcacaaatgtgtcctacacaaaatcttaaatgtgcatggtttaccaactgttaaaataggaagattttaacacaaaatcctgaattctggattgtcttgaaatactgaaagagctggcaacatcaagttgtattcttctatggccacagaccacagaagctggagttgtgtagtcattgccccttgggataaggtggtaacccttcgctcatctcacactctacacaccctactttgctcaattttgttgcctgcgtgctttctgtaggcatctcagtttccaacttctctcatggagttccaggcttactgtgaggaaggtacctatagatgactacactgacttccttctcttacccacctaatccgtgaaaccggtcattcagcctccagagatgaatttctcattgccttcctgaatagccattccatctgtggtcagctctccctaggggaatgtattccacagattaggtgtttcatctattatgtcttcttgtcccttagttggagatctattggcaataacccattttgattattctgtttctccaaaacttgatttccattgtatttccaagggctcagaggaactatcagttcaccatttgcactgagctgatgttaaagcattaaggaacctgatgcctcctcatcttgtaccttgttttatctgattattttatgccatttgcaagctctagtgtgatacatgaggccatctcagagatttctcaaggttcacctggtaagagccaaaggaagctgtgttagtttctatagctttttctctagtggtaatggtgctgataataatgatgatattagtagctacattttattagaaaaatgctgccagggtaaactaaatgccagaatgaatgattgataaatatccctgcatctaatcctaattaaaggtaggtgttatcctggtttatcaatgagtaaactgaaactaagagaagttaaatatattctcaaaggccgttgtggtggacattttatttgtctctcctcaaatttgctcttttttcttatggtaactgccataatttcccgttggatatccgtgcctaccccatgaatttcatgtcctttggtaaaagcaggccatgtgactcaggcttaagccaatccatgcaattctgattcactggccatggtgactggctcattgattagcatgaatcatagttaagaacgatgagatgggagattttattggagggcttctgagaaccttctaaagatacaagarcatgcatggaagcacttgtggaatgttggcaggttcccatgttgtgttcacgatggggcaycagccataagatagtttcagcagagggtatgtagggcagagagttggaaggagcaaaatcttgatgacatcattggtctactgacttgaaaactcctgaagccatctttgccactggtcattccagtcacagaagcttatgtatctctattgtttaagatggtttgaattttctgtcacttgcaaccrggtgaatcctacctgatagatgcacccaggtagtagataatagagccacaatttaaacccaggacttcatggttccaatattggtgccatttcttctcctctgttcttggtttggataaacactctttgtatagactcatagaatctcagagtttgaagagacccacaagatcatcctgctcagcctctgatgttacagataaggaaactgaggcgaagaaaggaaaagtaacttgcccaggacaattggggcccacgggtaaggtaggctgacctcagtatgctgcttttcttccccatatcacaacacctttatttatttttctgtttatcatcctagttaaattaatgggtctcagggatggagagtcattgcctacagattatggccatggtaagcaggacaaacttcctgggcccaggaggagtctagagttcatttgtgaaatctgccctttgagtataaccaagactaggaccaaagtaatgggagtacaaaactgaagaagctgaagatatgcagtattgcacccatttctggagaaatagaaaartaaataaatgaagacagcagcggaagagaagaaaaaggagaaagaggaaaatgatatttacaaggtgctgtccaaaaccaaagaagcatgatggatagggaagaatctttgtttttttgtcttccttaatacaatgaaatcagtgtagatccggtaggccaaggtacccagaacactgttctctctcctctgtttcctcccttattccatgctaaagtaccttaaaggactctatagactattaatagtgctttagaacataactcactgcttaggacttccaacaagtggcccactggtggaagaaaagcaatatattaagtaattttagaggaatttcaaggaatgagggtataggtttttaccctttctcttgatagctgagacatgactgctacttattttccttttaggaggagaaaaaaaaactttctttctctgtaatagtaggagtagtgtagaaatagccgcagtggttaacacatgcatgttcttcacatgtggtasgagaaggactcaccaaatgtgtccatgccctaatgcttggaaccagtggatgtgttgcctaatttggcaaaagagattttacaactgtgattaagttaaggctcttgaaatggggagattatcctggactattcaggtcaacccagtgtaataatactgggtccttataagggaagaaaggaggcaggagggagagagtcagaggaggagatgtatagtgaaggtagaggaaacagaggtggaataatgagggtgctcaggggaggaatgcaggaactccctggaacctggaaaggcaaagacatggaatctttcctagagttctggaggaacacagctttgtccatactttgatttttagcctagtgagcccatttagaatttatgacctcagaattgcagaataataattgtgtgttattctaagtcgttgtgcttgtggaatttgttacaacagcaaatggaaactaataccccctgtgtgagagcctgtgatcagtgattagcctccgtatcttgcttgattcttttcttttttatatatatactttcagttctggggtacatgtgcagaatgtgcagttttgttaaagaggtatgcccatgtgatggtggtctgctgcgctcatcaacctgtcacctacattaggtgtttctcctaatgctatccctcccctagcccccaacccctgacaggcccagtrtgtgatgttcccctttctgtgtccatgtgttctaattgttcaactcccacttatgagtgagaacatgcagtgtttggttttctgttcttgtgttagtttgctgagaatgatggtttctagcttcatccatgtccctrcaaaagacatgaactcatccttttttatggctgcatagtattccatagtgtatatgtgccacattttctttatccagtctcattgatggacagcttgattcttatcaatccttcattttagagattacaaaatgctgtttagagtggtaagtttaatatgccaaggtcacttcttgagttaagcagttgagtcaggatttgaacccaggcagtctgataccagaacttggattcttaaccactgactctactacctctctaatatagctggaaactctttgacataagaacatccttcttgggccagcaggtgcctgggaagctgctttcagtgtaagtttctgtgctgtttggaggaaaatactacacttgtataataggaattgtgagttgttggaacctctaatttaatattgtttgttctgctgatgtaatgcttccattggctctgagctgactaaagaaataaggattctttgtatattccacaccccctacccgcacccctaggatgtttatgtccctcagcaagccatccaggaagtcctgaaggagaaagcaatgcatgtaattgaaactgatacatgacctgaaaagtttttgcaggagggggaggaggagtatttgtgactattgtcagaactgttagagagttggagaggaaggcaagggggagagaaaaggagggagggagaaggagagagagagagaagagtgagactgattctgaaattagttgagaaagatrcatagagatatatacagtaatacaaaaacataaagggagtaagattttgcaaggcaatttgccaatttttataaaaatttaaagagcatactttgtgatctggcagttctatgttttttattgcagtaaagtgcccataacatagagtttactattttaaccattttaaagagtacaattcagtgacattaagtacattcacaatgttgtgcaaggaccttcgatctctacttccaaaacattttcatgactccaaatgaaaattctgtatctattaagtattcacacaacatgccccatccttccagctccctggcaaccaataatctaatttctgtctctatggatttgcctattctggacattttatgtgaatggaatcatacagtgttatgcctggctcctgtcgtttatcatgacgttttcgaggttcatgccactcttatataacaacagatatggactaaatatcaatcgcagtgccatggctaacccatgacacatgagcaccatgggaaagattcatctagtagaataaagtagagcctcatactggtatggagaggtctccaagacatgtttttgggtaaaaacagacagttatagaacaaaaagcataacctattatttgtgtaaaaagttatggaatgaggtgttataattctataaataaatgtagtaggtacatgtattagtctattttcatactgctatgaagaaatacccaagactgggtaatttacaaagaaaaagaggtttaatggactcacatttccacatggctggggaggcctcwcaatcatggtggaaggtaaagcaggaacaaaggcatgtcttacatggtggcaggcaagagagcatgtgcaagggaactgccctttataaaaccatcagatcttgtgagacttattcactatcatgagaatagcacaggaaaaacccacctccatgattcacttacctcccactgggtccctcccatgacatgtgggattatgggagctatgattcaagatgaaatttgggtggggacacagccagaccatattagcacatcaatgcatagacagaggtttgagtggatacacaacaaacatgtaacacaagaatggtcgatgttggggatgagttgagattagggatggcagtcaagagggctttagctttgtctcttaatgtttggatttatcaaaggagaatatattcatatgtgtatataaatgaatcaaattgaaagaaaacatgaaaagaaaggaaaaacagaaggagatcaatgataccaagaaaaagtgtagggggaaggctacacacaggaagagatcccccgggatagaatctggatggacctatcatcacaccattactgtaccatttggagtgggaacattgkgagtggggagtgttgaatggtgagagcttttagactcagccttttccctgttgtcataagctgacttcaattatagcatctccaacactagtgattactggtttgttccagtgttagaaagtctacaggccagttcaggacagagctcctgttttgagttttaactcagcaatcagtgtttcgattttggaggaaattttccaagattaatcaagttgttttttcttctgtgttgtcaggatgatacatttttgggctggtgatgatgaaaaaaatcatggtttccttaaaggaacgaaagagcatgacttaagttgtgtaaaggttggcgtttttttgtttgaaatgtcatagcaattagctacttaatatgtgagagataattttatgatttaaaaaaacacctggtgttagaggaatcagaccagaaaaatgaacattttatttttattctgttttctttkttaagaactgtgagtcctggtttgaaatccccacccctattcatctctccatcattgagaatttttgatgagtgattagtctatgtgctaggtgctgtagtgttaaaaaataggtatagcctcttcccattggtggagcttatggtgtattgggaaagacagaaactccataaaaaccacaacagctatgtgtatatgattataaatcctgacaagggaaattatgtgtagacaaatgaagttggaatattacttacaggtgtgcccaccacaatctgctcagggacaggtcacttgggaggagatgtctagttggatttcgacactctggcctcaggcaattaattttctcccttaacgattacagtgatgggtaggagcaggtcttctggagttcagtttgcatttagctgaactcaattttcatgcgtgcctgagtctgaaagaatagctgctcaggggagcccagggagcctgcatcgtgggagggagtgtcagcagtggtttcacgcaatgcaatgtggtagaagagaatgaggtctgctccctctggaaggtgaaagaggcaggttatgatgcaggttggggtaattgttggagatgcccttccaccctacgtaactctgtcattttcttggttggctcgcatcttctctttctgacattcaacttatcccattcttttattattttatttccatacttctttctccttagtttctttactttccaaatcctcctttctctgtttccttctgttctcttccctcttacttctttctttcttttttttttttttttttttttttgccaccctctgcctgctttctttttattcctcctattccttttcttccttgatctattgttttacctctttgctcactcttggtcaatgcccttctagctctcctagtttatttctctacctccctgcaaatccctctgttattatcttagactcattgatgatcccacatagatcccataagccttacttctctatcccctctttaaatggaagctagtgttaagggggtcatttatcccttgcattgaaaaagcatactgaggatatagggggacccactcaaaggaaaggggatgagggctttggaaaatgtaagtgcaagaatcacaaacattataagcatagcatacactgggagrtcagaggtgttattagatgactgggaccttgggtgatttatgtgtttggggaagtttcattatgactgggagtgaatagactggtttggacccctccttcctttgctcacttgtacccaagccctccttggaagttgtgttactgtagcctgaaagggctggtcttcttcacaatatcttgaccaaaacaccaccaccaccaccaacgacaacaacagcaacaaccttcttgtctttattaaacctgaggggattaatgcttagaaatccatttaaaaatcctaattcgtcatctatcccctccatgaacctgcttaaaaatgtctcttcttttgtttgtcccccagattctcttgaccacatctggcttgtgctgtttgacctctttgtgtcttagatgggcttagccttgctttccctcttcccttttccaaaccctctgcagtctccagggggctgatttcttataattcaggcctcagctcagatgctgcttcctcagagtggccttctctaaccattctctcttgcagatactcttaaccttaaggggatgataggaggaaatacattgaagaatttgatgaaaccaaggaccaacagtcttcctttctcccagtctcaggggattcttcagctcgtccctggacttttcaggtgtctgtttgaccgagtcagtctccaagagcccctcccctcccttgtcataccctatcaccttagcttgcatttatttgcttgttaacccttaaaaccagatgaaatgaggttgtatgtttgtttgcttattcaccatcatcaagatcccagccaggaatacctctaattaccatagcaacaggagacactggaaaaagcactttcagggtaaaggagttccaatggagatggtgagccaagaattctcccttacgtttttccatgctgtggtgacgcaggtacctctgacctgaaacttagttcagaagctcccaatgctatgcctggtggtttccatttgtattcaaacccttccctgcccatggtcttctcttctatttgcttcttgtctgttttgatasaaatcaataattwccctyatcttgctcctgcatttagaaaagtgaaccaactgtccagtttccctgcttcattgacacacagaggttaacatctcggggacgtcaatcctcagggcagaacttagtgaagagaatgctttcctcctaattgatgggatcccattgctgagactctctcatttcacctcccacctggggacgaggagggctccacattctctggaacaatgacagtttactttattgccttagagagaaggagctacaaggcctgagtacagagaagatgggggaagtaacccaggtcaccycttgaaatagctgaaagaaactatccaggaactgacaaatgggctttgcattctgacaggtgcagggccctcttcagcagttcgcrttggaaattggaaaaatgagcctattgttgaagatctagatcattcattccatttttaagtgagaaaggaggtatttcacactattacctttacttccgwgmgtttgtgccaaagatgtaagatgataacatggagggtgatattccatgtgatggatttcttcttcccttgcctcactacagaatgttcaaaaataaactttccatctgcaattcctgtagaatatcagactactctttgcaagtaagaagacatgatggtgcaacagaagaccagaggattacaatgatgtgtccgaaatctgagccaggagcaaaaacaaagaatgcatccttttccccacatgagcygcctgtcctgactcatgatggacctgggatctcttgcctctgttgacttggagactggggtctttacgaatgggggttggagttaggggcagatttaggttttagtctgagttctctctctgacagagtttttgggtgactttgggcaagccacccatttcctctgtgtctttgtttcccaacctgcaatgtaggagggaagcatgcccattgcacaggagagatttaaaatggaagagcctcaatttttagggaaaacaaaataaaacagatttatttattatttattttattttagtgatgggttctcacttcgtgtcacccaggctggagtgcagtgtcatgatcgtagcttactgcagccttgagttcctgggctacagtgatcctcctgcctctgccttccaagtaggtaggattacaggtgcaggccaccatactctgctatttctttttaaaaatttttttgtagagatggggtttcactatgttgcctagactagtctcgaactcctggcttcaaataatcctcctgcctcagcctcccaaaacagtgtgatttcaggcatgaacccccatatccaaccttattttatttatttttacttatttatttatttttgagacagagtcttgctgtgtagccgaggctggagtgcagtggagagatctcggctcactgcaacctctgcctctagggttcaaatgattcttgggcctcagcctcccgaggagtagctgggactacagacgtgcaccaccatacctggctaattttttggggttttttttttgtatttttggtagagatgaggttttgccatgtttgccaggttggtcttgaactcctgacctcaagtgatccatccaccttggcctcccaaagcgctgggattacaggcgtgagccaccgccaccggccttattttatcttattttttagatatgagagtttatcattattatggcaggaacgggtagtgttggaagcaagactgagaaggagataatttcagtcccaggtagtatgcacattgtgctttatgttatgcaccgatttacatagccgagtattgtctctctgtgtcagatttgtccactgtccacacttccatgtgaactgtattttgcacagctgccttgatttctctgcatcctgatttattagccctggttgatgcaaagtgagcctctgcataaattcaagaacaatttataacctgccccatcagcaaatatccagagcattcgtttcagaaaacatgttagttggtcctgttccttgcctccggtggaaggagctaaaacgaggcgggttattttcaccacggacaccttctccttaactttgggaactgagaaatatattggcctgtttcttttctttgatggtacaaagaaatagggcagaaacaatttgctgtttgtgaacaactggctgagagtgaagttggccttttctgctgagcaaatagaatctgtcttccctgttccatcttcacatgggaacatcagcttgagagacaatagacttataaagcctcctctttacctcatccagcttcctctataaactagcttatcctctgagaaggcttcttattaagaaccaggattgcaacttggattgattccctatcttttcaagtgtccatgaacggatcattggataaagaaaatgatataaacataccatggaatactactgagccataaaaggtaattacatcatgtctttcgaagcaacatggagggaacttgacgtccttatcttttttgtttttaattattatactttaagttctgggatacatgtgcagaacgtgcagktttgttacataggtatacatgtgccatggtggtttgctgcacccatcaacccrtcatctaggttttaagccccgcatgcattaggcatttgtcctaatgctatccctccccttgcccactaccccctgacaggccctggtgtgtgatcttcccctcactgtgtccatgtattctcattgttcaactcccacttatgagtaagaacatgtggtgtttggctttatgttcctatgttagtttgctgagaatgatggtttccagcttcatccatgtctctgcgaaggacatgaacttgttcttttttatggctgcatagtattccatggtgtatatgtgttgaggcccttaagtgcagcaactccaaaacagtcaaatgtgacatgttctcacttataagtgggagctaaataatgtatacacatggacacagagggtggcataatagacactggagactcgaaggtgaggggaatgggaggaggtgaagaatgagaagttatttaatgggtacaatagacacttttgagtgacagctacactaaaagccaagacttcaccactacacaatatatccatataacaaaaatgcagttgtatcccttaaatctatttttaaaagaaccatgattgcaacttgaaatcatatcatttattttacctgtaggaccacttactaattcagagctgaaccctggagccagaggaccaagattgaactggttctccaccttggggatgccatttcctctatctaggacttggatcccttctttgcaaatggagttaataatactacctgatattaagtcgttggaagcattaaatctgataactcctataatgtgctgagtgtagtgtttcattaagaaataccaggcatttgcctttttccattttccttttaatgaggacatcggcatcttagaattatcaagttatttctttttttttctttttttgagacagagtctcaccctgtcacccaggctggagtgtagtggcgtgatctcagctcactgcaacctctgcctcccaggctcaagccattctcctgcctcagcctcctgagtagctgggattacaggtacccgcaaccatgcctggctaacttttgtatttttagtagagaggaggtttcaccatgttggccaggctggtctcaaactcctgacttcaggtgatccacctgcctcggcctcccaaagtgcttggattacaggcgtgagccaccgcacctagcccaagttatttcttaaaataagaaaatagtattatccaaaacctaccttacaaactctgttaggcgaaatttctcctgctcttgaccttttgagaaggagacaggtgaaaaaaaaaaatgccaatgtaagaacatagttgagactgttgagtcagtatctagaggcagcattcattttccatcaaccgtgtgtgkgtgtgtgtgtgtgtgtgtgtgtgtgtgtgygcgcgcgcgcgcgcgygtagagagagagattcagggggtgcgtgtgcaggtttgttacatagacatattatgtaatgctgaagtttgagcctctaatgttcctgttgcccaagtagtgtagtgaatgcactacctgataggtagtttttcaacccttgaccccctccytccctcctcccttttgggatccccaatgtctattgttcccatctttatgtccatgagcacccaattttagttcctacttattagtgagaacatgtgttacttggatttctgttcccttgttaacccacttaggataatggccttcagctgcatccatactgctsgaaaggacatgatttcactcttttttatggctgtgtagcattccatagtgtatatatatcacattttctttatccattccattgttgatgggcatgtgggttgatgctatgtctttgctattgtaaatagtgctgtgataaacatatgagtgcaggggatttttggtggaaccatttattttcctttgggcatatacccagtgatgggattgctgggtagaatggtaattctatttttagttctttgagaaatctccaaactactttccactggggctgaactaatttatattcccaccagcagtgtataaatatcccttttctctgcaaccttgccaacatttgttatttctgattctttaataatagccattctgactggagtgagatggtatctcactgtagttttgatttgcttttctcttatgattaatgatgctgagcattttttcatgtttgctgaccactgtatgtatgtcttcttttgagaagtgtctgctcatgtcctttgcctgattttaatggagttatttgttttttttcttgatttaagttccttatagcttctgaatattagccctttgttggatacctagtttgcaaatattttcccccattctgtaggttgtctatttagtgtattgatagtttcttttgcagtgcagaagacctttagtttaactagattccgattgtcaatttttttttgttgcatttgcttttgaggacttagtcataaattatttgcctaggctaatgtccagaacagtatttcctaggtttcttctaggattttttatagtttgaggtcttacatttaagtctttaatccatcttgggttaatttttgtatatagtaaaagataggggtccagatttagccttttgcatatggatagccagttttcccagcaccatttattggatgggggttctttcctcattgcttatttttgttgactttgtcaaagatcagttggttgtaggtgtgcagctttattttagggggtctgtattctgtttcattggtctatgtgtcttttaccagtacyatgctgtttgggttactgtagcattgtagtatagtttgaagttaggtaatgtgatggctttggctttattctttttgcttaggattgccttgcccattcatcaaccctatattttttattttgaggcaaagaagatggatgttcagagagcaccaaagtcttatcasgtcacgtatcaagattcaacattgtttcctttccttatttggacagaataatggaccaagatatcaagtcttcaatattggcttgaagggaaaatgagagttagttgtaggaccgtcctcctgtctggttatcatggttctgttctgggggatcttgggctacattccatcaaaagtgggagcatggagggacctgcagtattgtggaaagaacctgggccgatagttagtcttatttgagattaatcatatcttggcttggttctaaccatctcaacctggggaagttatttaaattccctgttcctcataatggagataataatggcttcttgagagggttgttgtgaagatgatattgtttaaggcacctatcactcagcctggcatatggaagatgctctttgaatattcattgtctttgctaaaaatgtgtgtttgtgttagagagagagagagagagagattaattggtacacacagagaaggagagagatggctggacaaccatggtggggatttgatatagacttgggggagctggaggaaggtttctggtgttctgtatcttgaagcttgattttggaaaatggttgtatggatgtgttcaaattgtagaaaattgagtggtataatttgtccactgtttttatgtattaaaaatttaaaaatgtgtgtttgtaagacctctytctgtgtcacacacacacacacacacacacacgcacacacacacacacccctatggatctctttccttcagtgttcaggagagacacactccccagacatcttgacatctccttttcttcactcttgattcctgcccctgacatcaactgtagtgatgcaggctcctacttctcttgagatctggtattcttctrttgygtctaagtggtaggttggtgttgtggaagccatatgggctttggaggcagaaaaaccagggtttgcatcttgggcttattttttacaagctgcagatttcttgtctgcaaaatggttgctgtgagaattagagatgattcaggtaaaccactgagcatgatgctagacacgtccaagtattagctgtacagtctttggatttmtstcctgggtagagagaacctcctgccccaagtctggaaagatgttggcttttgtagagtaaactctcgaaatgtattaaattgactccatgcttgggaattttctccatttagaatgggtgtttctacctggttcagatctgagttcaacctagatcctcctaaaactatttaagaccattacctctgacataggctgtgcagagtaaacagatctcacatgaatgagaccttctccatctttctttgcttttatttaagccaaatatacagaatttgaatgtctaataattttcttctattggggtcattggtttaatttccttagcttaagggagagctgactagatattttttgtatgctactcttgaaatatgttttggcgtatttgtttgctttcttatgccctcatttattttactgcatttggataactggatgttatcaggtagctactattcttagtgaataggtggaattccacttctgtgcctaacagtatacaaagaaaacaacattattctagctgcattttttttgcttccatagtttctgagttataaatgggagtgagttggctttcatatgcacctacaaaattaatgttttataaaaggaagaaatataaaaagtctttaggccatctgtattggcctaatgcctaaaatcatttagcgaggtctgggccatgttarggttagggttagattctgttttttcataattagtaatctggttgcagggaccagacatgctctgcaataacaaacagccataccagtaagtatcaaattatgtgctyagtgaaaagtggagtccctaatacaatgtctcttactggagtctatggacctcctgcatcaatgatgccaagtatgctggttcagaatatagattcctgggtaccatatccagagattctgattcagtggtgctggaaggaaactcgggtatatgcacactgaaaagctcattagggtgattttgatgctaagttattgaattactagcactctacacaaytggaggacagaaaatacctatgtgaggttgtagtatttatggaagaaggaaaaggtgatatctagatcttgaaagataaaatactgacaaaataaacattttcttctttttttttttttttttttgagacagcgtcttgcactgttgcctgggttggagtgcaatggcgtgatctcagctcattgcaacctccgtctcctgagtttaagtgattctcttgcctcagcctcccaagtagctgggattacaggcacccgccagcacgcctggctaattttttgtattttttagtagagacggggtttcactatgttgaccagactggtctcgaactcctgacctcatgatccgcccaccttggcccctcaaggtgctgggattacargtgtgagccaccgcactcggcccattttatttctttaaaagagccttttggttattgtacattgttaaaacagaaatacactataaaataaaatcgacaaagatcacttgtaatttcaccacaactgtaactctttggtgaagtttttcaatcttattattttacaaatatttttatgattggcttgtatatacattttgttttcacttttattattcacctaacgtcataatttcagttcatcatgttatgacaacttctccataagcactttttcttggtagtagcatatttcttttccttggttgtaggattttctacagatttcctttcttatctcggtacccagccagaaggaacaatgctgttgatttctgtttccaaaggaggttgggtaattgtcttttcctttaaagttgtgtgatcattccattgtatatgtatataaaaacatcatattgtacctatgaatttatataattataaaatatcagttaaaaatgttttttatttctaatttttgtgagtataaagtaggcatatgtatttctggggtacatgagatacttcgatacaagcatacaatgcatgatagtcacatcagagtagatggggtatccatcacctcaagcatttaccctttctttgtgttacaatccaattatactctgttactctttaatgtacaataaattgttgactgtagtcaccctgttgtgctattaaatattagatcttactctatctaactatatttttgtactcattaaccatcactacctcataccatcccccaactacccttcctagcctctggtaaccatcactctactctctacctccatgagttcaattgttttaatttttttttttttagctctcacaaataagtgggaatatgaagcttggctttctgtgcctggcttatttcatttaacatactaacctccagttccatccatattgttgcaaatgacaggatctcattctttttcatggctgtacagtactccattgtgtatatgtaccacattttctttatccatttgtctgttgacatttaggttgattccaaatcttggctattgtgagtagtgctgcaacaaatatgggagtgcagatgtctccttgatattttcctcttaattcactgwctaataaacatcacttcctaatgataaaggcaggtaaaaaccaaaataataaattaaaatttcattctattctaaatgcgggaccatataaaatgaacatataaataattggccccatatctggatgttgtaataacatcattaggtttgttcttactgatgacaaggaagttaacatctttaggtttgggcccaacgtaactgagaagcacacctagagagttgggcacatcaggaaacttttgtcaatagtttagtttctggcagagtctcatggagaatcaagttactcggtgtgtgtgtgygygcrcgcatgcatgcatgagtgtgtgtccacatgtgagtgtgtctgtgagagaaggagaacatactggtatgtgtgtgtttgtagctgaaggagtgtcatatcgcagatacgtttattagggaaatctggaagatagcagcagagtttttgatatctttgaacccactcctcaaaaaacagacaaactaacaaaagtaataaaaaaccaaaaactaatggataatagctacaaaaaattatgagacaggatgcccccatgaattctaaaatgagcatgtagataaaaatcacaactataaatcccatgtggtgttagaaactgcgtgtgagaaagtaaagacaagaccaagttactcgtgatgcctctgagagtttgggaagttcaagatcatcatcaggtactactggaaaatgaggcagaccattctgaggacaacagctacagcagaaatggtgcttggaaaagtggatattcatatgcagaaggatgaaactaggcatctatctctcaccatatacaaaatacactcaaaatgggttaaagactgacgtgtaaaacctaaaactgtgaaactgctagaagaaaacagggtaaactccagggcattggtctgcaaaaagatttttatagagaagacctcaaaagcacaggtaacatcagcaaaaatagacaaatgtaaaagcttctgctcagcaaaggaaaaaatcagagtgaagagacaacctgcagaatgagagaaaatatttgcaaactactcaactgacaagggattaatatgcagaatatacaaggaactcaacagcaaaaaaaaaatccgattaaaaatgggcaaatgagttaaataaacatctcttaaagatatgcaaatggacaagtttatgaaaaaaatacttgacatcactaatcatgaggaaaatgcaaatcgaaaccacagtgagatataatctcagctcagaaaagatattatcaaaaatacaaaaagtaaatactggcaaggatgtggagaaagagaactagtatacattgctsgtgggaatttagaacagccattatgaaaaacggtatggagtttcctcatactaaaagtagaacttctgtatgatccagcaaccccattactgggtaaatattcaaaggaaaggaaatcagtatgttgaagagatattctttacccactgccatgtttattgcagcactattcacaggggccaagacattgaatcaaccactgaattaacagatgaagaaaatgtggtatgtatacacaatggaatactattcagccattaaaataacaacatcttggctgggcgyggtggctcacacctgtaatcccagcactttgggaggccaaggcgggtggatcacaaggtsaggagatagagactatcctggctaacgcagtgaaactccgtctctactaaaaatacaaaaaattagctgggtatagtggcgggtgcctgtagtcctagctactcgggaggctgaggcaggagaatggtgtgaacccgggaggcgaagcttgcagtgagctgagatcacgccactgcactccagcctgggtgacaaagcgagactccatctcaaaaaaaaaaaaaaagaataaataacaacatcttgtcattcgtggcaacatggatgagcttggaggacactatgttaaatgaaataagccaggcacaaaaaaccaaatatcacgtgttttcacttcatgtggaagctcaaagcattgatctcatggaagtagaaagtagattagtggttactagaggccaggaagggtgtagccacaggttggttaaaggatacaaaattacgctagacaggaagcataggttctagtattctatcacactgtaggatgaccatagttaaaaatatattgtgtatttttaaatagctagaaaagcagactttttaatgttctaaatacaagaaatgacaagtttgaggtgatggataagctaattaccttgccttgatcattacacattgyatacatgtattgaagtatcacaccgtaccccataaatattaatatacaatgtcaatttaaaaagtatcagtatgaacttatgatgtatttttacttaaaatacatatatcctagaacagtaaccaacctagtaaaactaagtactcctccacttagagtttggtttttaaattattttccactgagggagaccactgggaaagtgggtgattcaaggtgtagggtggaaatgaacaagataaaccttyctagagtgtcttgtcactgcaatgagcaaagcagttaccaaagactacaggtcaaagggactcagaagccaatctgaaatcaactggccaaagatggaacagcttgggcatcaatgaagatactaattgcagggcattgaaatacataaaatccgtgagtttgtaataataagatattttaaaagataactaattggtaacccttggaggatgctagggaaccaattcattgttctgaaaacatacatgggggaagaagcatgcgtttactgtattctgcccttcttgtatcagttcttcctcaggccaaatagctgacaaaggaagatttctctttttggcrtagttccgggtaataaatgaagaaggaatagtagaattggaatatccctacattgcaaacgttaatgaactaatggatccaggcaattattgtcaatgcctgctaatgttacaaaagacaaccagaaaatttattttttaaagaaagtacacacatcacttatgaagtattcctggcaaaataagtgagatctgcatctacctctggcctgaactgccagcaaatatgggagggggcataagcctgttagatgacatcatgggcatgtcatcagcaaaatccagactattggaaactgcaacaaaagacccagtttttaaaaccaaaaatgcaatgaaataaaaagagtctcaagagtcatattaattacactggctgcggggctcacacctgtaatcccagcactttgggaggctgaggtgggcagatcacttgaggccaggagttccagacctgcctggacaacatggcgaaacccccgtctctactaaaaatacaaaaattagctaggcatggtggcacatgtctgtaatcccagctactgaggaggctgaggtaggagaatcatttgagcacaggagtcagaggttgcagtgagcagagatcacacccctgcactccagcctgggcaaaagagcaagactgtctcaaaaataaatacataaataaataccatattaatcatatagaccttgtgtgtattctaagtcaaaagaatacgatttttctaaaagtatatagaacaatcagcgaaatatgaacacagaccagacacttgataatattaaggattaaggtaaattttgagtgtgatgatggtattgtgatgatatttgtaaaaaggagtccttgacttttagagatgtatactgaaatatttacagatgaatgatatgatatctggagttcacttcaaaataatgcattggaaggagaacattggtaagaatrtggacaaaacaagatcagtcacgaattgaaaatagttaaaattgagtggaggatacatgggggtttgttatactattttttctgttttctatgtttgacatttcccatgatgacaagtttaaaaagaatataaagtgacccaagtttatgtgaacctttctggaaatgacctaatgggatcataactaagctttgcagataggtaaacatctaccagcccaattaccttgagacatgattggaggcgctgagcagcatggcagtgctgccttgagatcatagaaggaatcctcctggtcagtaagtgaacaacaaacagcatggatggcattttcagtttttattctaatggtaatttgtgcatttcctgtcttgtagttctttagcacctttagcccaggcctgctttttttcctcctctaaggactttacagggtgaaactattctctctctctctctcttttttttttcctaatataatattttatttatttattttatttttattttttattattatactttaagttttagggtacatgtgcacaacgtgcaggtttgttacatatgtgtacatgtgccatgttggtgtgctgcacccattaactcatcatttagcattaggtgtatctcctaatgctgtccctcccccctccccccaccccacaacagtccccggtgtgtgatgttccccttcctgtgtccatgtgttctcattgttcaattcccacctatgagtgagaacatgtggtgtttggccttttgtccttgtgataatttgctgagaatgatggtttccagccttcatccatgtccctacaaaggacatgaactcatcctgttttatggctgcatagtattccatggtgtatatgtgccacattttcttaatctagtctatcattgttggacatttgggttggttccaagtctttgctattgtgaatagtaccgcagtaaacatacatgtgcatgtgtctttatagcagcatgatttataatcctttgggtatatacccagtaatgggatggctgggtcaaatggtatttctagttgtagatccctgaggaattgccacaccgacttccacaatggttgaactagtttacagtcccaccaacagtgtaaaagtgttcctatttctccacatcctctccagcacctgttgtttcctgactttttaatgatcgccattctaactggtatgagatggtatcactctctttttttttttttgagacagtctctgttgtccaggctggagtgcagtcgtgtgatctcggctcactgcaacctctgcctcttgggttcaagcaattctcgtgcctcagcctcctaagtagctgtgactgcaggcgtgcaccaccatgcccagctaatttttctttttctgttttttttgttagtagagatgggggtttcaccatgttggccaggctggtcttgaactcctggcatcaagtgatctgcctgccttggcttcccaaaatgctggaattacaggactgagctaccatgtctggactattccctagttatataggggaattttccaatatcaccagagtctatagtttcattttcaatataatataaatatcttgggtatatatacttttatctcatacacacacacacacacacacacacacacagaatataagtcctagataaatacatacatatacatatatatatatatatatatatagtcccatagtcccttatatgtatataggactgtatagcctccaagcgttttctagtacagtcattcattctgtgaatattaaatgcttaaatgcctggcattgtactagagaatgaggatacagtcttttcatgtccagattctagtatagggagacatcaatacacaggtgaaaaaactaattacagattttggacagtgttatgggggaggtaataagcagagctgtggtgaagactgatggacaaagaccctgctctagcaagaaaaggcctctcagagcatgagacgtttaagctgaaatctgaaggataaaaaggaggtcctgatgatgggaacagcggaggaaaaagcattccaggtatagggaacagacagtgcgaagacactgaggagggaaaaagctggtgacaggaaactgtcaaggtctattgtagagcaaaatgagaaagatggagagtggcccaagggataggagctgatctcgtcttcagaataaccatgtggcactgtcttccttgttccttagatttcacagataaggcaactgaggcaaccctctgtgtcattgctagtaagtcacagaatgagagcttgaatcttcttcaccagactccagatctagtgttccttttgagtagataaaataaacctgttagaatcttagtctcctcttggcttactttctcacaaccagaggggtcagtttaagctgtgcttggcataaccagagtgagggacccgcattgtaagakaggcaagatcccacatgctcctgaaatcaacgtcaggatttcttcacaggtttcgttgtgggagtcggaaatgtgggcactactttttaatgtcttagaagtgtctgtgggtacatagcagaatttactgtcacatccatctgcttctctccctctgtcttgctgagtaacctgccatttcagacgagaagcccgtgccacgttatgtcatcagggtccattaagagattactctgattccagaggaacatccgttccraakacagaggaacttgctttcatcttccaagggatgccaattgttgattccttgctcctcttcaaagggaaatgtgataaaaatccttctggaggaattttcctactggcagtgatcattttcatagtgaacttgagccaggtcatggagtggaagaaatgtaatgttcttacagagggaagatcttgcttcattaaggaggagtaagaggaggatggggaggaaagggaggaggagaaagaggaggaagtagaggaggaaggggaaggagaggaatgagaggaggaagaggatagggaggaggaggagaaggactaaggagcagacaaagtactaaccaccttccatactcatgttaatcatcacaataaaccagcaaggctgggaattatcacctttctcgaaatgagcaaactgagggtaagcaaggtgaaaagacttgcccaagttcacacagayaggaagaggctgagccaggtccctgtaactgcatttgcctgagtcacatagcttctccgtggatactttgaaaagtgagtggcccttgctttctagaccaaatcacacacaactctaacttgcattgggaactgacaacccattgctttttctttatcagttggtgctttcgttatgctgtagcattgtcatgtttasaagtataacatccaactgcctcattttgcatggaagaaaaggctcagaaaggtgaagaatgtgtccaaaatcatccagtgaatatatggcacagccagcatccaagttctaactccaagtctagtgccttcttctcaaaccacagctgtcttgttcttgcccaagatctttttcttcatcttcgttgttaagctgcagggttgacctaattaaaaagttttatttttttatttttatttttttgtgaattagtagagattttcaatttgcttggagctgagattgagctaagagaggtatttactcaccaaagtctactccccaaggaaaagccgaccgaattgaagtgtgtgtgtatgtgtgtgtgygcacatgtgagtacatgcacacatgggtgtgcacgtgtgcatatgggatatgaggaggagagtgggacacttttatatatgtactggttaaaatttagtggcaaarctgcctgaacgtgtgctgtggttaatgattgcttgagctctgccttccactctcagctttggagtgggtggtacgctgtatacagagcacctagcgtgcgcacagaactctcctttcatttctacacataaagggcttaacatagtatctggcagatggcatgcaatgaaattaactttaattataattatctcatttagggtgaggtaatactattttttcagttttacagattaggaaatggagacttcaaggcttaaataacttcctaaaatcactcaattagcaaatgataaacccaggactcaaactccggtcagtcctccctccctcccccctccstcccttgctccaagagtattgctctgttgcccaggctggagtgcagtgacacagtcatggctcactgcagccttggattcctgggctcaagcgatcctcctgcctcagcctcccaagtagctgggattacaggcatgtgtccccacacctggcttgtttaatttttgaaaatggtgtcttgcatgccagctttagattgagcaggactatgtaataaactggctggtgagagattaatcactatgatcagttagagaaggyggagagtcaactctttctttgttgtcggaatcagaaccaaaattattttgggccctcctgtttcaggtctccagtgaatcttatttacagcagtgaactgaacacatgcagaaaactattttgtattccactcatgtggcagcctttgcctggtacgacttggttctcagatgtcatttgtcacgcgatgtggtgtcaggctggccaccggatggatagtggcttccctcggagggatatatctacaagtgacgccagctgaatggcttcagaggacatgcatcatttgtgaggctcctaaaggtgggagctgtgcgcctgtgatttcattactggaattagagtgccgrctttcatttttctattaattccactgatggtattagtcgtgttaaaaagacagcacaaacttggctctaagtgttcttggatgctgaatgccaccagcacttctgagtctcagttggttcagggtcctggagcttgcagttttctgttgggtttcaaacgccaactttaaagaggaggcttgggttccactcttaatgctaataaaagactcacagaacagaggaaggaacgttcaacaaaggatcagaacaccgggatstggcagcaacttgtttggttacaggagaccagttagtgtcctgtcctcctttggacatgtgagagagttaggttacataagtgtttcccagaatatggggctgcatatcacctcaggtaaatgagatggctttaggtggtacacagccccagttaaagaacacagactcacatagtagtcatgccatggtgtctggccaggatttaatgatatggtttgctttatgttcaaggtgattatttatgtaagtgacacgaggctccccatttatgtaagctataaaatttcctttagaatagcttaattacattttaaaaagttggtttatagactaataataaataatgggaaatatctgtgatggaagttgaagagaaactgtgattgtggagttgtctatttttccttttagttccattctgtatttttgggggttctgttattaagttcatacacatttatggttattatatctttctgatgaattgaccyttttctcattatgaaatgcccctccgggaatactgtcttgaagtctgttttatctgatgctaataaagatggtccattcttctaacattttctggttgtgtgttgtatctttttccattaatttactttgaatctgtctgcgtctttacattgaaagtacatctcttgtaggtagagaatagttggtcttgtttttgtttgatccattctgagagtcttcaacttttagtccacagtcatttaatgcagttatcgatgtgtttgggtttggcatgtttattgttgtttctgtatttcccctctgtttttcatgtctctcttctccctttcctgctctgttagttttctgttgctgctgtgacgaatgattcacaaaccgaagagttgtggaactgaggttcccatttatttgcagtctgtggatggcaggctggtctttgctcctagagacttctttctcatgctttccatgtagctcctccagcaatggtgaatgaagatcytctgacactttgagtctctctgacttcttctctgctacttctctgactccagctggagaaagttctctgtttttcaggggacttgtgagtaggatccatggaataaaccwggataatctctccgtttttaggtccataatcacttttttcatgtaacataacacattcagaggttccagggttaaaggtgtggacatctttgggggatycattttgcccattatatctgcctttttatggatttttagagtatttacacactttgttttaacttatttattggcttttaatctatacctctcatctcaatagatgcagaattatcttaatagatgcagaaaattatttaaaaattttaatactttaattcctataaaatttaaactatttccttctataaccagttttctgagtgttttcatgatagaagtatatccaataaaggtcaaatacaacaagcccacaacaaacaccatactcagtggtgaaaattgagagcttttcctctatgatcaggaacaagacaaagatgttcaatctcaccacttctattcagcatagtactggaagtcctagccagagcaattaggccagaaaaagaaataaaaggcttccaaattggaaaggaagaagtgaaattatctctatttgcatttttaaagtgattgctctagggatcacatgaaacatctttagcttttcacaggctacttagggttggtattgcattgcttcacatacaatgtagaaacttttcagtatagggcctactcattccccttgtagcaggacgagccgcagacaaaactcctcagacacggagttaaagaaggaagaggtttattcggccgcgagcatcggcaagactcctgtctcaagagttgagctccccgactgagcaattcctgtcccttttaagggctcacaactctaagggggtccacgtgagagggtcgtgatcgattgagcaagcagggagtatgtgactgggggctgcatgcaccggtaatcagaacgaaacagaacaggacagggattttcacagtgcttttccatacaatgtctggaatctatagataacataaccggttaggtcaggggtcgatctttaactaccaggcttaggtcaggcaggcccaggcctgatttcgggtctggttccttggttttgggtctggttcctaggcaccaggctaactgcctttagtttcgcttctctttctttttctgagtataaaaccgtataaaacaatgtgagagggcctgtctctcttcttccaccctcaccatcctgtatgctwtagtgttatatgcattgcatctgtacattaatacccyaagaggcaatgtaaggatttgtgctttaaatagtcacatgcatatgtatttttttaattaaaagaagagtcttttatgcttatccagatatttatgcttctaatgctcttcattaattcctgaaggaattagagttttcttctggtattattttctcttgtatcagcttgaataacttcctttagcatttcttgaagggctggtctgctggaaatgaattctcttagttttattttatctgaaaagtctttaattctttttcattcttgaagggcattttcactaattatagaatttgttttttttccccccagcacttataaagacattattccactgtcttctggactctgtagtttctaatcttaagtctgtgaaaaatttgaatcattgttctctatatataatktgctatttttctcttgctaattttgagattttctttcttttgattttcatcagtttgactgtgatgtgcctagcatggttttctccacatttgtcctatttggggttctttgagtttcttgaatttgtaagtttatgtctttcaccaaatttctttttggccattattcttcaatattttttccccttctccattctctttcttgtaggaacttttgaaaccacctttgcaaaaattataactgagaaatcatggcagtgaaagagatctgacttaagtgacttcatcttgcttctaacctccaagttgtccttgtttttcctgggcggaggtgtaggccaaaataaccttcagagaaacttagtttatagtttaactttgaaacaaagagatattagccctttcccaaaacaaacacccttcctgcctggggattgcctaaagccagaggatgagaaattatggtttaggagtcatgcagttgaaggctgcaagactctaaasctccccaaattgctcctggggataacatcactattgtamaacctaagatcggtacttgagatattttgcagacccttcatctgatggatcagttagcaccacccagattgataaactggctcatctggccttgtggcccccacccaggaacggactcacagcaggaggacaattttaacgccctgtgatttcatctccagacagccaatcagaactcctgaatcactggccctctacccaccaaattatccttaaaaactctgatccctgtattcttggggaaactgattttgagtcataataaaactctggtctcctgcacagctggctgtgtgtgaattactctttctctattgcaattcccctgtcttgataaatcggctctgtctagacagtggcaaggtgatcttgggtggttacactttaatcacatgtatgttagatctcactctgtcaatttataaaagcccctctgcttaagtcatttctattgatctatcttcaagctctctgactcctgcctatgtcatcttcattctcatgttagttctatccagtaaattctttatttcagatattttgtttttcatttctaaatgttcttttttttattttcctcttctgaggcttcctacctttttctttgtgatgagcatattttcctttacctcattaagtgtattgttagaatagctgctttaacacctggatcatattgggattggcctctgttgattgtcttctttccttgagaatgggtcagatttccctatttcttatatgtaaagtaagtcttttttgcttgagaatgggtcagatttccctacttcttatatgtaaagtaattttgaattgtactagcactttgtgaatgctatattgtgggttatatttccttaaagagtattcatatttgtgtcttagcaggtaactaacctggttatacttacatttccatatctgtctctcaggtggaggcttagttctcagtcctgttgggtttaaatgcaaactactytgagccttgtctactcaccctttgttcaaggactggccagaggcttgggcagagtttacatatacatgccaagaattcccttctctaagtctcctctttctggggtttttatattctgctggccgtggacttccaggtctctaacttccacctcctcaggccagaaagaggttggctcttccactagatgttgagccacccggtgccattttgggacagcagcatgctgtcagacctaggtggcaaaaatgtagaactctatgatgagcccttcttccatgtttcaatgtccctgtgaaatctactggctatttttactctacagagccttcaggtatatwttttttttccttctagctttaattttttacctgtttgggtgtgggagggaatctgttaagagatttcctaccataccagaagcagaactctggctatcttctgctgttttcttaaacttctacactgctggaactatttttcagataaactagatcagataatttttatggtaaagttagactgacatgtcatcatcttcagccatctcattttcttacccgacattggcagttttacattcttatatattcttgctacaagatacaggagctagaaacaagaatcattttattgtcagtcacagttctgtgggttgactgggctctactaggtggtttttctgctscatgtaataacagctgaggctacagttccctgagagcacagttgggctgaaatgtatgagatggctcatgacatggctaagtggatggagctggctattggcttgggggcgtagctcactgcctaatgtaacctttttawgtggcttggatttcacaaagcatggtggttgagttttgagttgacatacccaagggmaattgttatatcagggaagaagtggaagcttctgttttactgaaaattaggcttttctattggtcacatagtcactgtgctggtcagattcaagaggagaataaagcaatccacctgtcaatgggaagaataacagaaaacagtgtgggcatccttaattcaccccacctcatactgtctgctcttatttgtcacccatagcctttgttcatgccttgatcatctctttatagaattcctgaaatagccttctagcctctccccttccccccagtcttgcctctcaaatgactatctacacaactctttgtcttctccagaaaggcttcctttatttcccagggtgaatragcctytcatctctccattattccatagcattctgtaatactttaacatttactacattgttctgaaatcataaaatctatttgtctgtctcaccaaccagtctgcgtttctcaggggaaggaactatatttgatatatccaatatttctcctgttgagagtttaccagcctgtaattttcttaaggtaggggactctgcctgctttatttattttatcttcagtacctaactttgtgtctagctcatcagagatccttaatacatatttcttgaaccaaaatgattttttttaaattcacattgtcagttaaggcagagcaagaactcgattccagatttatttcccctctaatttacttctttctagggccctccagcagccaagtgaatctaaacaatcctcaaggcctcttttccttagcagatctatcgtatctttatctccatatctcaaaagcactttctttcatatgttttaaaatataaactgagcttaataagatgaaaaggtttcaggattttcctgcattggtctctactccagtctctctagtgggcaatgcaccaaaacactgctctatttcctagctttaaacttgaagaaataatctccaagctccagggctaagaaaaggattgtacattaaagacttgttgctttggactatgaaccttacaggtcaatttttttctggaatagtgctaataaagagaaaacaagttaaattattcacctggaggcctagcaggttgtatcctgaaggctgaagtcaagtgcttactcaaacattgaatttgagctgcttttttctgtatcagsgatcccaatgcttggtgcagaacaagaactcgagatttctttgacgtcaaggttggctctacctagagtgtgattcttgaactgtagtgtgtataagattcacacggagagtgtgttaaaacaccaaccccaggccccacttcagagaattctaattcagtaggtctaagatggcgtgcgggagtaggcgtgcctgtgagtctcctgtgagctgctgatgcagctaaggctttaaggcagagttgttcagcagtggaattcttgacattttgggctagataattatttgtgaatagggagctttcctgtgcattgtaggatgtttagcagcaaccctggtctttacccactgggtgccagtcataccctgccycctagctgtgacagctaaatgcatctccaggcatagcgaaatatcccctggtggagcacagtcattgcatgttgagaaccactggtctagggtatctggatggctgtggattgaggtatcactgagtaagtttgggtggtggatgacaaggtcagttttagagtctgctgagcttaactggcttatggggcaccrtgaacatccagttctttaaatatcaaagcccagtggaatgatctggatttggaaggcaytggcatatatttaaaaccatgaaggatggataaaatgtccaagtaaatgatgtacccagtgaggaacaatggatgcaacacagagccttggggaacactaactcattaagtggcgagtgaagaaagtgtgcatctaagaaggaatgatagggggatataagagaaggacaaggagaaaaagatgtttcaggcagcaatggaggagagtgtgtcaaggagaaaagggaggtgatgtcagtagaggaaagattcggtaacaccaagttcaaaaaaggaccatgggacgaggagatcaccttgaccacagaaacctgttttgtgcaacaggatggccattgactccctgtgtctactgagcatttgaagtgtggctagtgtgacctgaaatgtgctatatgtgttaaattcactstgratttcaracttgctgtgaaaaaaaagaatgtgaaatatctcattaataataatttttatattgattgcacattaaaatgataatatagtgagttgaataagatacattattaatattaatttcaactttttctttttactttaatatatgtggtttgagggcagggcgcagtggctcacacctgtaattaccagcactttggaaggctgaggcgggyggatcacctgaggttgggagtttgagaccagcctgaccaacatggagaaaccccatctctactaaaattacaaaattagctgggtgtggtggtgcccacctataatcccagctacttgggagactgaagcaggagactctcttgaaccygggagtcaggggttgcagtgagccgagatcacgccaccgcactcccgcctgggtaacaagagcaaaactctgtcaaaaaaataaatacgaccaggtatggtggctcatgcctgtaattccagcactttgggaggccgaggtgggtggatcacctgaggtcaggagttcgagaccatcctggccaacatggtgaaaccccaaatctactaaaaatacaaaattagccaggtgtggtggcgcatgcctgtaattccagctacttgggaggctgaggcaggagaattgcttgaacccgggaggcggaagttgcagtgagccaagatcgtgccattgcactccagcctgggtaataagagcgaaactccatctctaaatacatacatacgtacatgtatacatacatacatacatachtacatacatacatacatacatacaagtcaatagaggcaaagaaatgatagatgcaggggagagaagaaggaaggaagcaatacaaagcctagagagattgtcattgaatggatagggggagtgtcggggagattaacttgtatctattttcaacctctttcagcctcctccttttttcctgcaaaatgggagtaagaatcacgttgcaataataacgcctacccactgggttgtctggaggtttacgtgagataatagatggggactacctttggaaataatgaaacactgtatgaattccaaccgcagtcataagtgtctttctttctgacatttcactgtctttgcctcctaatgcattaataattcatactgttttaaaatttttttaatttctatttcaatagtttttggggtacaggtgcttttggtyacagggataagttgtttagtggtcatttctgagattttggtgcacccatcacctaagactacyaactattgtagtcttttatccctcaccccctcccaaactttccctacccctaagtccccaaagtccattatgtaattttttttttgagatggagtctcgctctgtcgcccaggatgcagtgcaatggtgcgatcttggctcactgaaacctccaccttccaggttcaagcgattctactgcctcagcctccccaagtagctgagactacaggcgcacgccagcacgcccggctaatttttgtatttttagtagacacgggtttcgccacgttagccaggctggtctcaaactcctgacctcaagtgatccacccgccttggcctcccaaagtgcggggattacaggcgtgagtcactgtgyccggcccattgtatcattcttatacctttgcatcgtcatagcttagctcccacttataagtgagaacataacgatatttggttttccattcccgagttacttcgcttcgaataatggcttccagcttcatctaagttgctgcaagacatcattttgttcctttttatgactgaatagtattccgtggtgtatatctaccacattttcttgatccactcattggctgatgggcacttaggtttgttccatatctttgcaattgtaagcataattcatattctttattaccacagagtcgcaggaagaattcaccccaaatttcaaaatgtgggacctgctgaacacagaatctaccactgaagtgtsgaacatgagtcacttaatagtgctgaactaatagtgagaatttcatcgtgagaacttaacagtgactcatgtttcactactgctgaaggctgaagtgtggaaaatgagtcactattaaacaaggawgggcactgggtaacctttgtgctgtggttctcaaagtgtggtttstggaccagcatcatcactatcacttgagatagggccaaaatatgcacattctcaggcccatatgcatcctactgaatcagaaagtgaggggcagggattgtcagtctgtgttttaacaagccttttgggtgattctgatcgaggcttatacactgttggtgggartgtagattagtgcagctgttgtggaagacaatgtggcaatttctcgaagacctaaagacagaaatattcaacccagcaatcccgtttccaggtatataccgaaaggaatatagatcgttctattataaggacacgggcatgtgtatgttcttgcaggactgttcacaatagcaaacatatggaatcaacctaaatatttgcccatcagtgatagagtggatcaagaaaatgtggtacacatactccacagaatactatgcagccataagaaaaggatgagatcatgtcctktgcagggacatggatggagctggaggccattatccttagsaaactaacacaggaacagataaccaaatatcatatattattacttaaaagtgggagctaaatgatgagaacacatggacacatagagtggaaaaacacacaatggggccttgcagagggtggagggtgggaggaggaagagagtckggaaagtaactaataggcactaggcttaatacctgggtgatgaaataacctgtacaacaaacccccatggcacaagtttacctgtgtaacaaatctgcatgtgtatccttgaacttaaaagtaaaagaaaagttgagaaccctgccctcgtgcttgtcaaatcagatcaattctctataagtgcaaggattctcgaaccttgggaaactagttaaaattcagattctgggcttaaggtgctgcatatttaaaagatcccaagattattttgataagctaccrgaaagtattgtaaagcagcaattggcaagtgttttatktaaaagccyagatagtcaatattttaggcttggcaaaccaagaggccacacattctgctgctatagcacaaaggcagccacagacaatacaggaaagggcttggctgtgttttggggctatataaaagaggctgtggggaggatttggtccacaagccatggattgtcaacccctgctttagaatgtaaatatcacccttgattgtgatcctgggtgatttcctctccattcatttattccttaattccacacattttattttattgggtctcagctgtgtgctagacatggactggacatcagagatggactgttggcttcctggcaggatccttgctctcatggagcctgccatctcttcaagtgtcgaggaaattattaagtggaatcaaaatcggttgtgatttctgcttaaaataggggaggtagagtttgttcactatcccaaaagtctcttattctatagctcagcccaacatgctttgtgttctatttcctggcttcctcactgcccaacttttaatgatattgaggcagctttggggggcatttttgttccatctccccagttgcctggaattttttgcaaatggttaacaaagttccgtttaccaccaggctgtagccatttgtgagtcagactagaccagctggttgatacggcacagagggttaggagaggaatctgttctagctgttggtatggagatgctgaaacaccctgcagtctttgttctgccagcgtgtgagtatgcaactgatagtatttagtgaagaagycttactttattagaamcttttgcctaaatggaaactctaggtttgtacatcatttggagtagttccctgagacctgagtattcccaggatttacacctaacttggtttatatttgcatgcttattggtccagaggatttggcatttccttctcatactcttgaatcacatttaataatagtaatatagttcctgacaattattaagcacacactataagccagacgttgtgctaaataatttcacgtgtgataggaagaataatggcttccctaagatgtccatgctgtgaatatgttgcttatagtgtaaaggggactttgcagttgtgagattcagggtttagtaccttgagatkcggatgatcctggattagcaaggtgggaccaacttaatcctgtgaatcctcaaaagtgaagagcttttccaggatrtggacagagaaagatgtgaagatggaagagtcagagagatgcagtggtgctggcttgaagatgaaggaaggagtcataagccgaggaatgtgggcagcctctgaaaggtggaaaagtcaaggaagtggattctcccctacggcctccggaaaggaaagcaatcctgctgacaccttgattttagtccagcgagacccatttcacatttcagaaccacagaagtrtaagacaataagtgaggattatttaagcccccgccaagttgatggtaatttgtcatagcagcaatagaaaatgaacgcaccatggctgatcccattaaattgtcacaagaacctcaattaagcactaacagtggtcacattttcaggaagaagaattcaaggctgagtaattgtgcaaggtcccatatttatcaagtggtagatgcaggattgggtcactggttccagggccacacttgtactgtaaattcatgtaagctccatggtatgaaactccatttggatatttgacgattcccttcaagtccatgcggcagtgcctttgcacacatgccttcaaggatgctgttgcctcctccaaagagtcacctgcaatctctgctgcttcatcctcaggctgtgttgtgttttcttgggagccctctccaaatttgcaatcaacccacgtggccccttcctgctgtgcatcaagacaccacatgccctatcacagcacttactgcatggtgcggtgtgactttgtgtctgtctgtccactagactgtgagttctttcattcctgcaccacaagcacttcctctcctccaccaggacatggcactatgtctggcacatagctctaaaatgcaagccccatgargcagggagtttgtccatcattgctatactccagtgcctagaatagtacctggcacagagtagctatatagtaaatatctgttgaatggatgaattattgaatagcagattctcaataartatacagaggctgaaggttaataaacctgtagtaattatctaaaagccttttgtttatgtttcagtggtactttatggaggcatagcttacatatagtataatgcatgaatcttaagtgtaaagctcaatgaatttttacacatatatacaattgtgaccacacagatcgagatgcagaacattttttaaaaaattgtttaacaccacatgttttcactcataagtggaagttgaacaatgagaatacatgaacatagggagaggaacatcacacactggggcctgtcaggggtggggggcaagaggagggagagcattaggacaaatacctaatgcatgcggggcttaaaatatagatgacagattgataggggcagccaaccaccatggcacgtgtatacctatgtaacaaacctgcacatgctacacatgtatcctggaacttagagtaaaatttttttttattatactttaagttttagggtacatgtgcacaatgtgcaggtttgttacatatgtatacatgtgccatgttggtgtgctgcacccattaactcgtcatttagcattaggtatatctcctaatgctatccctccccgccccccaccccacaacagtccccgatgtgtgatgttccctttcctgtgtcygtgtgttctcattgttcagttcccacctatgagtgagaacatgtggtgtttggttttttgtccttgcgatagtttgctgagagtgatggtttccagcttcatccatgcccctacaaaggacatgaactcatcctattttatggctgcatagtattccatggtgtatatgtgccacattttcttaaaccagtctatcattgttggacatttgggttggtttcaagtctttgctattgtgaatagtgccgcagtaaacatacgtgtgtatgtgtctttatggcagcatgatttataatcctttgggtatatactcagtaatgggatggctgggtcaaatggtatttctagttctagatccctgagcaatctaccgatttccacaccgacttccacaatggttgaactagtttacagtcccaccaacagtgtaaaaatgttcctatttctccacatcctctccagcacctgttgtttcctgactttttaatgatcgccattctaactggtgtgagatggtatctcattgtggttttgatttgcatttctctgatggccagtgatgatgagcattttttcatgtgttttttggctgcataaatgtcttgttttgagaagtgtctgttcatatcctttgcccactttttgatggggttgtttgtttttttcttgtaaatttgtttgagttcattgtagattctggatattagccctttgtcagatgagtaggttgcgaaaattttctcccattctgtaggttgcctgttcactctgatggtggtttcttttgctgtgcagaagctctttagtttaattagaycccatttgtgaattttggcttttgttgccattgcttttggtgttttagatatgaagtccttgaccatgcctatgtcctgaatggtattgcctaggttttcttctagggtttttatcgttttaggtctaacatataagtctttaatccatcttggattaatttttgtataaggtgtaaggaagggatccagtttcagctttctacatatggctaggcagttttcccagcaccatttattaaatagggaatcctttccccattgcttctttttgtcaggtttgtcaaagaccagatagttgtagatatgtggtattatttctgagggctctgttctgttctgttttggtaccagtaccatgctgttttggttactgtagccttgtagcatagtttgaagtcaggtagcgtgatgcctccagctttgttcttttggctgaggattaacttggcattgtgggctcttttttggttccatatgaactttaaagtagttttttccaattctgtgaagaaagtcattggtagcttgatggggatggcattgaatctataaattaccttgggcagtatggccgttttcacgaaaaatctcaaaaattttgtttaaatttaagaggtgcaagtgcagttttattacatagatacattgcaaagatatagaacatttctagttccctatgaagttcttatttgctcccttctcaccaaccccaagataaccattattctgaattcaatcatcatagattagttttgcttgttcttgaacttttataaaatttccattctgttctgttataaatgggcttgtatagcatgcctttgttttgtggctggcttcttttgcttcagcatgatgcttttgtggttcattcgttaggataagtgtagaaacctctttactcctgcactctcctagtgatcccccacccctgcacccccatatcattagatgagttccctgtctggagcatgtgaccttctattgggttgtagctgcgtatttccatcagagtggtaaccagagattcagacttggaatgtcttcctccgggaccacagcttcagtgagatagtagttcttggtacatggttgaggcttaataaagagccattaagtaaacgagtacgtgaataagtactgtacttttctaatagtcttttgggtgctaaagtcrtacatatattgaatgcttgctatataccaagyactrtagtgctgagtattttacatccattaaattgcacgtaaatgamaacaacaataacaaactcgcttgaatggtaaatgttattagctcaagtgtataactcaggaaattgagactaagaaaattacagctgggtgyggtggctcatgcctgtaatcccagcactttgggagactgaggcaggaggatcactttagtccaggagtttgagactagcctggacgacattggcaaaacctcatctctgccaaaaatacaaaaattatccaggtgtggtggaacacacctgtagtccctgctacttgggaggttgaggtgggaggatggtttgagcccaggaggcagaggttgcagggagctgagatcatgccattgcactccagcctgggtaacagagccagaccttgtctgaaataaatacataaataaaaataaagtgtataaaaaagaaaaattacacgttaggaacaagtgatacaattaataaaagatagtctggttgacttcacagcatatgctctccctacctacctaggctgcctcgttttccagttaatttttcatttataaaagaaacaggctaattatggaaaatttgaaaaatacagaaaagcagaagcaagaaaatgtaaaggcatccatatgctacaacccaagaacagtcgctcttagtattttggggtgtattatctttttgcattattttctgtgtatagttttttatctgtttatttaataaggttatgataaaagtatacatgcaaaattatatccaactttttcatgtaatctctacttaggttgttataaactctgtgtctgcaatctagttcattcagtatttattcaactgatatttatgaattacctactatgggacattgttgattgagcccctcctatatgcaaagctcatttttttccttttttactactaggttctactatctgttacctgggccagatagttgggtgtcaacctggaagccacatcatctctgcctttaatattgctcaattatgtggtttcagtgagtttctaggtttgctggtatgtgctatggtttttgtttgtttttttgagatgaaatctcgctctgtcaccgaggctggagtgcagtggcccgattttggctcaatgcaacctctgcctcccgggttcaagcgattctgttgcttcatcctctgagtagctgggatcacaggcatgcgccaccacgcccaggtagtttttgtatttttagtagagatggggtttcaccatgttggccaggctggtctcgaactcctgacctcaggtgatatacccacctcagcctcccaaagtgttaggattacaggcgtgagccgccatgcctggccaatgtttttaattagtasacgaataaaaccacaagaaaaccattggcaagccctctagttctttgggctccttgctttagcacagtggaaagcctgtgtactaagtcagaacggcgactcctggaataaatcatcccaggtgaagagttgatacgttgcacatcggtagcttgggtggcatatttaaatactaaccaggctcactctgcaaatagattgaagtgattccaaaacctcggtgccataacttgattttcagaatcaggtggaacctacaagcctattatgagctcctatggggagacatgcagggcatgaggaatagaaataggaggaggagacagaacatcataatttcsctctaggtttagggatggaagctggttggtgggtcaggggtgggaaaatgagtgaggctttttatctcttaggagattggagatgttttcaagagggctgtgaatcatttgaggctgatttcagggcactgtgacagatgagtgcaaatccagcctatttctctggtccaaatgaatacttgtccttgtaacactgaaaaccaaatatttgaataggaatgagtattctrgggtattctggggtagcatggctcagaggctcctagcagttgttcagtgacttaaaagggagatggttgtaaaaatttggggcataagctgaacatttgtctgattcaacataaattagcaccaattctgctcattttgtgccttttccctaccaactcctctgtatttattcattaattcatttatctaacaaatattcactggcaccttctgtacagccagcacaagggatgtatcagtgaacaagcccatgcttgtatcgattttctagtctgttaaggcagtttatgctttagtgtttatttagcacatactatatgtggcttggagacaggtggaggtaaggtatgaagctattcaggttctaatttctgccctctgcttgcaatctggtatgcaaacgaatatatgcaactgaaacctaatacacagcaagcattctttccccagctctctgtaattcctgatagttcactttggcaaagtgcttccatcccatggggtctgtcctagtaccartttgcagactatttgcttcagaatctacttaaaaatacggatttctgggtcacacctcagacatactgtgccagataaaatccgtgggaayagagccccaggagaccattgctaaagatatggaagtggggttgaacctgtgtgtgtgtgtgcatgtgtctgtgtggtcattgatgggcatgaggagtagtaaatttggcaattcacggtctggtttgccaagaaagatgatctcagaagaccaacattgcccacatcagcaagagggagccatggctttgtggcaagtcagcattcaaggaggatggatttagtagtaagttcaggtcaggctggatgttattaatggcaattatgataacaactaaatgtattggaagttaattgcatgccagatgcttttacatcaattgccaattttaatcctcacagtcgcttatgcagaagttatagttatcttcatttatggaggaagaaggcaggcacagagaagctaagcaacttcctcatagtcacccagcttggagatagcagagctgtgattctaaagcagtttatcactatctctctttcctggtataactgagaggaaagactagagaagcatgcacaatcaacatggaaaacaagccaaccgtgttctttggggaagcccttcatatcagtggccaagtgttgctcatgggggcaaccaatgtgaaaaccctgctgaaaaccaacaggcagaggcccaggtgatgttcacctgcccaagtctatagaagagttctcaggtgaggttcaaagaggtccaggaaatgcgagaaaccaagcccttcagagtcatcgaggggcatctttcggttgttaaatttcccaattaaggaagagttgagatagccccattttgacgtgctttgctgtggttggtaattctggccctattgctaattatgatgcgatgacatcatttgggtaatctcccttcctattagaagctgcctcttaggttttatatttgctttatttccactactctggccacccagtgcatgcagagaacaactgtggattgtgatattgttactggtaatgtctttcaaagtgaattggggtttcacatgggaaggcatgaaaaaagtttattaaaggtaccacagtatcaggacccaaatactgaagagtgctcgcagaagtgaaagagcttgttcttccttgggtggtccatgagatagggagtggctgtgtcccacagtgagagcagccctgtgtttggagctcaatcctatatccactgtgtgtgtcctgaacatgggcagctcccttaaataatcttccctgagtaaaattaggggctggcaccagatgagtgccaggctggtccccctggctgagaacaagccctagggagatagcacacagggccagagtgaaagccaagggcattcccagggtggaggaagttaggagcattttgtgatcacagagaggcagaggtatgctaataagggaattaacaccttttctctgattagcagccagggaattattgaaagggattagatagaaactgtgaaaagattcttgggcaactgagaggtcagaggaaggtaatagcctcttctttaggtacaaaggaatacaaatacattttattagcagagaaccagtctctttcaccctcaccccaatggctatcttaaagaccctcacacttgcctcctatctgggtacctttgcatatgaagcaccttctttgcaagaggcattctgtcctctcctctttgcctagataacccctactccagcatctcctgtttggagaagtcttcaaccatctaaattgttctgtttcccccattgtgcattcttaatgcaccataagcttttcttacaaaatgtgaatttcaatggcaattttacacgtgtgtagttgtttaattaatatttgtcttttccatctggatcataagctctttgagcgcaggtttcatggctgtttttgttcactactggattctcagccttcagcactgtacctggtccagagatgaataaataataggttaaatgaatgaattaattaaagacacagttaagtgataattgacatctggctcactgtgcagttctagaagttggtaagattcatactatttgtcattcctgtgaagagactgaagctctaaagatcagtgaaatgaagtgagtttcctgagacacacggctcatacgtgataaaccaggacttgcatagatcccctgagaatctgaatttttattcacctttgctttttaagtatgggtattatgtggcttataggtagaggtttaaaattttttaagttaaaacatgaaaataacagaaacaaaaacagaaaacacaagaaagcccacaggacagtggattctttccaaacatctcacttcagtggcagctacatttgaagaaagtctacttgttgcatttaaattacctgtcacaaatcacagtgttcacccagtagcagctaggaggggctgattcaagcccctgagaattgttttgtgtcttgatcatgagtccgaacaacagaactttacaaggatgttgcaagccgctttaaggggtgatggaaccaatgataggaaccagcacctaacacctggcagagactttgtcagcgtgatgcccaagcccctggggatttctgcccaaaggtgatacagcctgatgggtttcctggtttgttgaagctggcggtgagagagagtttgaaagaaatgacttactcgatgctgtgtgacacagggagctcattcgccttgatgcacttaggcaagctgcctaacctcattcaaaacaagccagtaaactagtaaaccaaaacaaaaccaaaaatggaattaggcttctacagtgctggagatatagtgattagtaagacaaaataaaacagcacacatagcccctgcctttctggacaatttgtttaaatggtggacacatacattcatgaaagcagtctataaatcaatgttgattaacagccacattaagtactatgaaaatattaggttggtgcaaaagtaattgctgtttttgccattaaaggtaggggcagtaacagtaatttacttttgcactaacctaatacaagaaagagcatggaagagcggaaatttgcctaatccgtgagggtatggaagacatcccttaggaaatgatgatctagaaatgaatgaaggaagaataggagttggacagagaaggtaagaacagttcaaggaacctggaacaagacaagcaaagtctctgtggtggacacaaggtggccgagaggtcattgcatccagagaggagaaagcaaggtggggaggctgtgatctgtgacaagactacatatcccattggtatccacaggccatgtggtgatttgtggtatttgtcctcagtgacatttgacactgaatggtcagcactgcagtagtggtaagctcaggctgttgagagagtgaaaccctcgccttgactcaggcaaatggctgcaaggatttattgactgcccatggggatgacaccaaactcatccccaacttcagacagtctgtagaataagtacagtctgatcccaggtgatggaaaccacatcatcacagtcactatgtgcataataactgtggagtaagcctaacgccacttggtacaaacttaccactcaacataatgaacataaaggacgctggcctggagaaaggaggactttgactcatattgaattctggattcatcccactgcatgacttgctttgtcgatgcatttcatttaagtctggagaggacttgagtgccgggtagagagatttatttagaggcagaaggctcattaaaatcccaacctttttgttttgttttgttttaagccaggggtacctctaatttgtggcctgaaaattttgctcggcaagggattgaaaaatggagagatgggtttgtatgccaggactgtctaatcaccatcttgtgtgagctttagaaaaggactcattctgcaggctattaatgaggtgagtgtttaatggccccttgatgctcccccatcagatatagtgtcttgagtttttaataagctctgttctgggtcctttacaaatcagagtgttggaacaaatccttgaggagacatcaacagcaagatgatgcaatgtgtgtgagctggaaagagcagccgtcttaactccagagagtgtctaggaatctgtctatctcaatctgccgaccatgtgcacatctaattttcacttcctttttgttctctggggaacaagacacacttagattttacgttttctctgtaaggaaaaggtgatgtccggggtgaaaaactaaggaatcttgttcttcaacattgaaggtatatcgcaagcatgattttggaattaaaaaggaaaaatgttcacttcgttttcctttagcatgtagggagttattttaggatatcctgtgttttctggcacaagtttctctgtctaggacagaaggattgacwtagaggacattggggaatggggaaaaaagaaagcaggaggaggagccccctgaccccagtttgaatcccagtattcagagaaattcttctctatacctctaaaatactgttgtgtttgagaagaagcatggggcagttggaaagtgttggaacgtcctccactgtcccctttactacttctgcctccttcactcctctggaccactctgaggttgtgcttctacctactccacttgccttaaagtcccaggtgaacatctcactgcaccacacagcagtacctttcagcctttgtcttcctggacactagacacctttcacccctgccttcgtcttcaagctctctactcccgtggcttctaagttatcgcattccccggctttctcctcgtacctctcctacattccttctctgcctcttttccacacacactctccttcttttgttaggggatgccatgcacagctgtcaacaactaccgcccccagcagatagacaacttctaaatctcaagcctcagccctgacccctttctcatcttcagacctgcctatccaccttcttggtggactccctgcagggaggtttcaaaagcagctaacctaaacctgaattccatatgcatttctctgtccccctacctatactcacttccacccttgctcactcattcattcaaaaaacatttacagagtggctactgtatgtcaggtacaagrctaggtgctggagctacaattgtgaggaagaaagcagggtccctaacctgttctccacttttgtaagtgacatcaccattcacttggcaatcctctttcactccccaatctccctgccaatccgatccatgagttgccaagaccagttgaatgtacctcctaaacatctcttgaacctctcttttgtgtatctgtattgcagcaatcctagttcagatctttctctcttttctggagttgcttyagtgagatttctctgggcctgcttttctgccttcattcattccctcctccaagcccttcctcatactcaagctcaagtggtccttcccgaagataaaaacttgctcatgtcacaccgctgctaaaaaattctttcatggattcttctcgtcaaccccagaaagcattaactccttgtctctttttttcactccctgtctgtgtctctccatccttcctcctttccatgctctttcttcctccctctttttcttcctttttccctttttctctcactttcttgttgcctgactttctctctttcattcaataattatttgaatgtctttaatccaatcccacagatataagcattgagttcctctctgtggcaggctctgtcacgtgtacttgggatcaatgaacaaacagaatatacctgacttcatggagcttatattctatcaaataggacattgaacagacagaaaatattaataataagcattgtaagtaaatcatatgagttatatggaacgtaaaggtgacagataactatggaaccagattcaaaggtatttctcattgtgagccagagaggcatggacctaccctcgggccctgcctcttcccctagccacacacttctctggctcttttttctttttttttgcatgtgtttcttcagcactaagctgctcacattcccagtgggtgccatgttcttcattctgtgtgtctctgcacactgtctttgtacactgtcctctctgtactctgtctccagacctttccagcctgtgccaagttgccctccatctacaaggacctcaggggtcactgggaaccctttcaccctctcttgctgggttgggtgggtccccttcctctgcattcccttggtgccctgagctttctttggccacaactctcactactggagcatgctgagggtgggttgagctctgtggctccatgactttctttctgggtgaggcttggaggccagtgaaccctccacacttccagccttaattttctcaggtacaaagtgtgaaggagagccttctatttatttctcgtggttgctacaaagtttgcagcaaatatgaaatacccaagggtgagcggtatcgttgggggctgggaggtcactgggcagtgagtgtcagggcttctctgtcctctgagccctgaggaaggagtgccttctgtgttcatcaacactggagaagacaaacttacctgaggttgaagaacacatgggctgacttgggctctcgcctgcaaccagctctgagtgtgatgggagccaggaagccctggggctcagcatgaacacaaatggaccttatttgattgtgtttttctcctttcaaatagtaatttggacacttttcagaggctgacattcaatttctttttctatgtcacttcggagaaaaaaacaaaccatcatttttttctgttaaaatctctcccttttccaccccttgtttatgctcctaattccatttgtgctcagagtttaattgtaatggtgagctctggtcatattagttcatcctcttcttttgagctgcaagtgggtcttggacaggctgcccagcttagtacttgctgaagagaacaaacagatattagctttttgacatgcacgcctgtgcgcacatacacaaacacaaacacaaatgcacccatgagaatttagcgttgctctgttaaaggggcagatgatattctgtatttggtctgctggtctccaaagcaatgagaggtgaataaatcggatgcccataagatgcttatttacataagttaaaggatgctctgtattgtgttagcttcagtggggggagtgatttgcgagcagaatattatgctccaggaaaacagtgcagattaggttgctaaatctcctggcattagttcagggtgcattcttctgctgtggatgcattgcttccagaggaagaagctggtgatggaggaagcactgtgctggggaagggttgatcttcagatsgtatctgaatatatgggagaatgaccaggtaaaggaaagggagctcacaggttaagcaccgataaggagggaggtgcacgttgtcagtggtgaagagcaagggttttggaatccagtaaaatttaaattaattagttttgacattagacattaatactaccttcttcatggggtttcgttaaagactgaatgagataatgtggaagaaatgatcggaatgcaataaataatcagtaaacagctactgtacatgagctcatctgrtctatgaagttggtggaaattgcttttcctgttttacagcctaggacacggaggcttaaggggttgagccagtttctcaaggcaacacgggtagcctgtggaagaactgaggtttggacctagatgtgtcttattccaaaatccttgcgccttccactgcactaagccatctcccatgatttggctgggactctgctcctgcaaagcaattatagctgtcctgtttgctatctgcttagtagcctcattagagaaggctgtcattgtagcctattcaagttgtagggctctgcaaagtgagaggggtgaaaatgatgcttgcaaagcttcctgggagctttggatacctagaaggagcaataagatgtgggtctccaggtacccacatctgatgggtggtgacctcctccctcctagacccttggtagtttcttttttctaccttggctagggcctcaagtaaccatgaggtccaagggctccctagggatcctctcacaccacctgcaagactaaagatacctaggaaaagctttaggtgaggatatgtagctgggagaggagaacacataaaggggcttgggagtgggctagagattaggggagggaaacagtctgtccctgtgctcacaagagccctcagtcatctctgacagcagcaaggacatgggctctttttggaatcaattcctttcctgggttttgatagagaaggaatccactttgcctgaatctgtttggttcctgaatcctagagagcaagtaacaagggttcagacagtgaagaatgccagcccaaccctcctcagaattgtttattactttcctgccttcagattgtgagagtttgggtagcaatggattctcacactgcagacactcagttctacctctgagccccctcatttcacaccccctgttcatccagctctcacttataccctgccctctctaacccatcactgtgctactaactcagccactscctttctcactggatgttcgtttatttcttcaatctcttatacccacaactcatgtcacatccacccatccgtccatctgttcatctgtccatccatccatccatccacccacccacccatccatccatttatctgtccgtccatccatccaaccacccatccatttatctgtccatccatccatctgtccatccatctgtccatctgtttatcccatctctccattcatccatccacccacccgtctacccatccatccatctgtccgtctatccattcatccatccattcattcattcattcatcctcccaaccatccatccatctgttcatttttctcttccgtcatccatccatctaccctatccatctatccactcatctgtccattcatctgcccacccatccattcatccacccacccatccatccacctgtccatccatttgtcctatttgaccatccatccatccatctgtccatccattcatccatctatccatccaatctattcatccgtccgtccatccatccatgcattcgtctgtccatccattcacctgcttacttataccttcactgaatgtgttctcagctccccatgtactgggagctgggctgtgtgctattactgtacagatgaattagcattaatctggttgcatggagacagctatttaaatagacacctaaaatacctggtgacgattgacaatagagacctggacagtgtgttctgggagcaccgtggaggtggaggggagagaggaggcggcagctgtttcctatttcctcagtgagctcccacattagtcccctacctttcagttcatggagctcttgctcattaccctgttacagataccccagctcccctccaggtaattagaaaactgccaggtccattttatagatgaaaaaaatggaggctcagggagacccagccacttgcgtacatttgtgagctgcagcgctggcatgcagagaagggtggctatgcataccctggggtcattttctttgcttggcagatggccatgggcaccataggactgaccggtgcttccttctctctctgtgctcttctcgttcctggatggcttcagttctctcccaggagtgaggcggttcaccccagggtggcccctcttcctttactcccatgcagtatgttctgactcataactgaaagtgttttgctggataagacgatggggactgacaggcatgacatacctgtgatatacctgaaggaaacacacggtggtgagaatgttagacatcagacactgtcttatgtcattgcctagtcytccctgggatggacagaggtcacctggcaccaggacccctgggtcagaaccatcactctgagagatgcttgcagcatgatattgggcatgccatgtgacttgacctctagaactttgctactgaaagcttggtccatggactagcagcaactgatgccactcgggagcttgcttgcaatgccccagcccccacccgctgtgttttaacaagatccaaggtgattcttatgctcattggagtttgagaactgcctctctctaagccccaacttccttaactgtagaatgggaatagaaatattccctgaaacattagtgtgaggattaaataaatgcacttgaagatctctgtgtgatcgactgattgtcctgatttgtccaggactgaaagggttcctgcaaagcggaacattcaggtttaacattgggatgggttgtcaacctgctttcacctcagtgcttggcacgcgataagagctcctttgccatggtgctgcaaagttgtgtcatttagaagacgtggaaaaaagccacaggggagctgtttgtatttgcattagtgctgtgtttgtgggttktagtgttttgggttttgttgctgtcattgtggttgattctttcttgattacaacagccaccataatcacagctctcattaatggagctctcggtatgtgctcagagtaatacatgcattatcccaatcacaacaacctctttaaggtagggaataaaattccctccatttaaaaaaaaaaatgagaaaatggagcctcagagctagtaaggattttgtccaaggcccagacaccagtaagagaaagagctgaaatttgaaccctctatttggtaccagtgtctgtgcctttgataacaggaacatacagactcccaaagggagaagaagcaatttcttctggaacttgagcattcagagctgtttggagacatttctttgagaacactgggatatttttgaaatggacatttcgacgataatgtttaccaccagggcctgcccctagcaagtgttatgggaaagcccaagacactcctttttattgcagaaataaagctgcttccttcagttcagcagcagctcctctatgtatgatagccggagacgaaaacttaatgaacgggactggtttgctttttctctttgctggaacagcttaatgataagcgattattattggtggcaacttgtcatgtcttaagtcttggtcttggctgttgtggctgtcagagtctttgagaagaaaccaatctcagcacatattagagaaaaacaaaaaacaatgaggaaagatgaagagctcatgcagggaaaagtgagatttgtgaagagaggtgggtgtcccaggaaaaagggaagaatgatgaagaaaaagagaagaatggtaagaaaagggaaggatgatgaagagagatgcactaccctgtagtttgaattattctgattcaagttcaggaagatgagttaaacatgttacattatttttttcctagccaaagtggcatcagtaatctttgattgcaagtgacagaaaagctaatcaaattggcttaagcaaaatgaggtaattaattgggacatggaattgacaacaagagaatttgtcttcaggtgtggcttgaacaaggtgttcaacatggatatcagaacttggtaactctcgatcttacagcttaaactttgggtctgatagctttcttcttaggatggtatatagtggttgggtggctgccagaaattctggtagaacatccatccaagttcaagtctaacagtaaaagaagctgtcttttcctagtccctttcttcataaatccagaaagccactctgattagatcagattaggaaatgttccacccccgaattaattactggcactatgggccaattggcttgactgagagagaggaaaatgagggctctcagggggaattcactattaccagtaaaggaagaacagatgctcagtggtcagaataaaaaatatccaccaggtggctcagggaggcccatgcttcatgaaaaaaaagggatctgaagaaaatagtttcagaggcacagagaaggccaggggcccagtcacagttgggacttgcaaaataaagctgtttccttgtgcttaagtttatcagctcctcagagacccaaccccatggtctctggtccagtaggatttccctctggctttagtgggaatcaggcttgctttctgtgtgagattagctggacctagccccagacaatccataattgctaatgaccctgtttggaagcgtggagtcagatgctcacctgcatgttgacagagcaccaggtaaagccagcttgggtctttgctgtttccttgcataacaataagggtctgaatctcagcagggcctccttttggccagccctgctaatgatctagaaagcagggctgagttcaagagcaatgatcattgtgtggtcctaattaatgtacagtatattgggctgtcctaaatcagctgcaacgagaatcaagaaatacatttctccatgcatttatgtgttctttcctctggcattgtggacttgatagtgggaaacttggctctgggtggtaaactgggacaaggtctgaaattcccaggaaaacatggaagttctagccacaatatttgaagttagagtaccagttgactaaatgatatagcaaacgaaagatgctggctgcatctttcaagtcataacctagcaagtgttatgggaaagcctgaaagactcctttttattccagaaataaagctgcttccttcagttcagcagcaacccctctatgtatgacagcccttctatgttagtcaatgtaggcttacctattggcacagatcagaattccagagggaagaacagggttatcttacacaaaatcccccaaattccaggtttctcccaggttccctattgggagacactggtggcacatttagcagaggagttgtttgcaatacagttgacctaggaattagatacagactccctatcctgactacagggcattcattgtgtgatgtggcctctgcttcctgtcctaactcatgtctcaccactctctcttgctccttaaacttcagctgttctgactttccttctgttccctgaacttgacgaaccctcgcttaccttggcatatgtgtcttctgctggaatggctctccctactctcatctcgcccctaatctttgcctggatgactccttcttcatatcattttgatcagctccaatgtagcagatcagatgacctagagtggggctcctctctccaccccactcctgaactatgacatcatttgatttccttgaaattattctattttgttttattcaaatttttaaaatttgagatgggtcttactctggggttggccagactggtttcaaactcctggcctcaagctatccttcttccttggcctcccaaagtgctgggattacaggcatgagccaccatacccggccaattgttctatttattgatgtccttctttgtttgtctcctcccctaagaatgtaaaattcatggaatcagggtccttcactttggtagcctccttccctagattcactttcctggaacaatgcctggtacagagctggagtttgttaaatttgttgaatgaatgaaagacaatccacggatgaatgtctctttctagagtggtaggtctggcaggtctgcttaagtacatagagcatgggatcctttcctgcccacgggcagtcttgcactctaggggggatgcttgtgccagtttccttctcaaagaagtggtccagcagtctgcaaggtgctgagcagaagtcaggagggcacggtgccctaccctcaagaattgtcagtctgaaggacatgcaagattcacacctctccgcaactaggcaaccacatacgatccagattaaaatctttaatgcagggataataataagacatcccactgtatgctatatagagctacatattggatatgcccaagagagatattggctatgatgatggtcatgatgatgatggtgaggaggaggaggatggatgtgatgatgatggaggatgatgatgacagaggaagggggagggaggtgggtggtggtggagtagttgttttccagtgtgaccaattcwgcttatgtgcacgtgagaatgctatccatctgaatcctcaggcttaccaggcttatttgatgtttttacttttcctctcacccctggaaattgaaataaaatatgttgaaatgctcagttgatacactatgagagtaacagaaagcacatcagggcttaccagggctcacaagggcartcctcaacaggagaatgcaaattccccaggagtctctctggatcgttgctgagttacctccattatttccttttcttggcagacagcaggaaaataagttgtggaaatgggtgtggggttgacaatagtgaccaattctctcatgcttcttgggtgtaagcctcctgcccctctcatccttccccaagtacttatcaggcccctagtgtgtgtcagacattgtacttggctttaaagatactaacttgaatacctacttctcaaccatactgctgttgagaagagacagaggaaaaactaataaatcagctttaaagttcagatactcaggccacagagattccctttcaatcagacttgcatggggcacaatgcataggttattctttgataactcttcaagggattcatatgtgcagccaggaatgagagccactgatgtgagcaagggaaaactggatgcatctcacgatgactgagctgccatcaccatggggccatgtagatctcagggaagtcatttaacctctcatcctgtgtctttaggagaaatgccatccatgagtgttatgccacttgygttatctcttgagtagttaggatcaaagagataatgggtgtggatgggctttgtaacctttatgaatgggtaaatggaatgtaagttgctattatgctctaggaaacaccaggctttggtacccatggagtcaggtgtcaccctggggacysagcaagctctggaacattctggaacaggattgaatgctctagacctgattgaatgagtcctcagttatgatggtactgaaacacagagtctagagcagacacccagaatcccacaccctcctgcctccctcgctctgtgtttaaaacagtttgttctgtcttccgcagagcagtgagcatggggagagaagtgcttttgcttcagaaccaaagtgggtgtatgaaatctgttcctctcccccagctgcacattctaaggaagccgagtgccagaggtggtcagaggctgatatgtagaatccgaaaaatacaggctgagccatggcaggaggaggtaagtgcaggagaggtggcctctaccatcaagacagggagtggaaaggatgttcaggggctttgggctatttggcatattggacgccaggccctgggagtgtggccagattccccatcatgtcctgccagttcataaaatcaccttaggaaatcccaaagttaaatgtgagcctcttcattgctctgctatgcaattatattttgcaaataggcccttgcttctgtccctccaaggggtagatgatgcttttggtccatggtggtttttgggttgaattttaagataccaatagaaatgacagtagtacagggtaactgcatgatgcccaggaaggacattagggatggtttctctccaaagcatggattcattgctgtatggaaaggcagtttcttctttgcattatacaggctccttgggctcagaatgaatgagctggtttgcatggggtggtggggatttgaaaccagcatgtcagtggacctggagaggccagttcttgaaataggatgaggaccctcttaggtttctgacgatgtctgtgtggtctgtaggaccgaggatgtggagacaagcacccaaactgtcaaagtcaggcgtggacagatgagtctcccacttctaccttttcatcccattctcacagcagacccatgtgayggaagggtcattattcctatcttataggtaaagaaactcaggcccagaaagattaagcactttttcaaagccacggggctggctaggttagccacagtccctcagaggcaggacttgaatttaggttcaatagaccctagagctcatggtatttcaactataaagctggtgcacatagatgggtaggctagggagtctgaacttaacatggtaggcctatgggagctattgatgactatagagcagggcagtggcatggttaaaggggtgctttaagagtttcaaccaggcagctctgaacagggtgagttgttgagatgctccaagtccagagtgtggattacctcttgcaaaagatagcatgatctcctgatgtgaaatatttgctgaatacttcatacttgatgggcactacactgggtgttttgatacaagagaatcatttaattcctacaacttaatgaggaagcaccattattggcaacagcagagtgcagaggtaaaaactcgagaccctgagggcaggcaaacctgattttctacctgtacgaacctggaaaaatcaccctacttctgggtcttttttcatttgtaaaatgggcatactattagtgccaacttaataaggtggttgggggtggcattaaatgagatagcacctagaaagtgaggagcaacgtgactctcatagagtaagtatttctagcatgtttactatgatcattattaccatagccacacccattttatagatgagaaaactgagacttagaaaggctgagtgttttttttcccccccatccaaggccacataatgaggattggagctgggtagtccaaccccagaggttctagtattctccattttctgcagagaggctgcgaatggggatcagcatagtgggtaatgggagagattcagcttgggctgaagtttggcatgacagggggtggagacagcacaaagcaagggtttttgcacctactctttcacagatggcctgtgccgagctggctctgggccaattaactgctgtccctccaattatctttctcctgaggaagttcacagtgcagccatgccytcctctctacatgtagagaaccagataagatgcgtgtgcttacagctttgctctgtgcacagaccttttcatgggtaccctggtcatgtctagctcagagtacatagagcaagggtgttggaggatcccacattccatcaccatctggcatgtctgacctccacctctccaccagtaccaatcttcccaaggaagtgtctcatagaccctttttattaggttccaatggtgcctttagcgtgtgtcttgttgagagctttctgtattccttgtgtacttagtgcaagatgctgatccaccaccttttgcagtcagaaggtaactctggtgactggcttcctttgaggcatcatttacatgggagctatcacatttcttttgtaatttagaacatttttgccccatcccaagaggcgtctcacagtgtgtgaggttggcgaatataattgcctttagactctacttctgtgttgtcttctgttggtggttttttttatcttgttgccctattttggcattaatgaagttctgtggacaactgctgaggtttataggtcttctatattctcctctttatcaataaaggatacattgagatataggttgggtattggatggttgggtagttcctcagggtaggaaggtgtaggtgatgatcttgaaggttttgttttgttttgttttggacacaatattcagaatccacacaaaatacaatctcagatactgaattcccattctttccatttctggtcttaaccaaggacagtcctttaggcttcattcacatcttcattcccttgtcatccacttatgggtgtgccaagacttctgccaggttctggggacataaagatgaaaacaacaaaaatctctgcccttgaggagctcacagtcttgttgagatgtgatttaaaatggttaatcaattcaagaatattagatttctgcaaaagctactgtmgggaaaacaataattatccaaagtctttaaatctattacccactttaattaatttaattaggtaaaattcatggaactgcaatgttggaaggggcccagaagacatttattcttgtttcttctctgccttcaggccatgcttcactcaaattatcccccaaacccatgcatttcagaaaagagcagtatttcgaagaactatagcttttggcccattctgatagaacttttagtgagcacccacagggaaagtgatgtaaacttgttgaaggaattgacatgcacagctacaaagtattgttctgaaaaacatgaatggaacatccacctttcacacacacacacacacacacacactctctctctctctctctctttctctctctctctctctctctctcagtggaatccccataagttatcttgttgaggttgtgttcaatactcatggtaaatacagaacgcaaaataaaaacatggctgtaatatgatgaggaccttttgataattctttcagttccctgaaagaaatacatctcagcacttctcaaatcctgttttgctctaacacagaggcataccttctgtttagttggcatttttgcaccatgtccacaagtcaacaacgtggtttaagcatctgttccatacagatcttcagtgatcccaggaagactgtgattgagtgtcagaaagggggcaggatgcagagtcatggcactgaggtacagatgtctacttgctctgtgactgttttgagcctcgttttccctgccagcaataccaactttgtaggatcattatggggatttgatgagttagggggtatgaaggcagtttgtatattgtaccactgtatgcatcacctgccttttctaaatggaaatttgttctcacaatcgtagatgggtggagatgttagggctaatagaggccctttaacctgacataagttaccatgccactttctagggtgagagcattcagtgactctcccttatgctctgaataggccctatgtgcttggatttctgccaagctcttcaacatcgtatcgtccgcctcctttcggtgccatgatgcattcatctacagcttctgagatagtcgcagtgcatcctcgggattcctctgactgtaacatccatgcacttctcctcttcctcacctggattctccttcagcacttcatatacctcttttagctcttagtttgtagaagttgtcttccacttaattcttattaagaacacttaataaggtgttcgataaatatttgttgattgaaaaggtagatgtccacatggtatttatgatactctgtattatgtgggagccgtatgttcaagtgacagaaaccctactcaaactcyttaaatgaacatagaaactcactggcttgtataacaaaggggtccaggagaaatggcttcatacttggcagactctaggggctccaaatatatcgttagaaaactgtctttgctgatgctgttttatttccgtggcttgattttccggtcatgagctggggtgggggtcagatagagtttgttctrttagaaccatatagactcaaaggaggaaggggcaggacgaactagaggaaaatgagaagaatagatgataagcaagcaataattacagacatccttccaggacctggctatgagctcctgagtacaggggcttctgtcctctctgtatttgcaggatctgttctggagtctgggatatagtagatgctcaggaatgtctgcaaatgattgatgtgtgatttactttccttacttctaggacgcagtttgtgcttctatataaaccacctcctgcctcatcctctgttttactttcttttcactggcaggatccgacgtctaccttcttccagtttggagcgtccatccagcagcaagccacggtcatgctgaagatcatgcaggattatgactggcatgtcttctccctggtgaccactatcttccctggctacagggaattcatcagcttcgtcaagaccacagtggacaacagctttgtgggctgggacatgcagaatgtgatcacactggacacttcctttgaggatgcaaagacacaagtccagctgaagargatccactcttctgtcatcttgctctactgttccaaagacgaggctgttctcattctgagtgaggcccgctcccttggcctcaccgggtatgatttcttctggattgtccccagcttggtctctgggaacacggagctcatcccaaaagagtttccatcgggactcatttctgtctcctacgatgactgggactacagcctggaggcgagagtgagggacggcattggcatcctaaccaccgctgcatcttctatgctggagaagttctcctacatccccgaggccaaggccagctgctacgggcagatggagaggccagaggtcccgatgcacaccttgcacccgtaagaaagggcttgttgtctcccaaagtgggatcagagttttgctgttgtcattgtttgcttgcttacatactcattgttggaaatacgcactgaaaatgcagaatgttatgtgtttacttacgggacttttattttgctctcctctctctttctttcatctcctttgtaagaaaagtcacattagactttgtttcctgcaacttaacttttttttctactcaacaatatatcttggaaacctacacctgggattgatcgatctgtctgtctgtctatggctgtatctcaagtgtatctatattttttgtaactcataaagatttgaacccagataagtctaacctcatagccctcatcacattcttcactatgatatcatggtatcatgatttagttrtccagtctgcataatggtaggaatttasgagttaattttcttttatttaaaaaaattttgtgggtacatagtaggtatatatatttatggggtacatgagatgttttgacacaggcgtgcagtgtgaaataagcacgtcatggagaatggggtatccatcccctaagcatttattctttcagttacaaacaattcaattatattctttatgttaaaatacacaagtcatttattattgactatagtcaccctattatgctatcgtatagtaggtcttattcattctttctatgtttttttttaccctattgatcatccccacctcccgccccaacccccaatacaaaaatgtgtttatttatgggataagtgaagtattttggtacaggcatacaatgtttgataatcacatcagggtaaatggggttttcatcacctcaagaattcatcatttgtcttataaacatttaatttagggattttgaagcttcctattagaagctaaacagctgtgataatctttatacatgtctaagcacatgtgcaagtgttttttctagggttgattctaagatataggatttttgggtcctaattcatgtgcatttttaaatggaagcatctattgccagattgtcctgcaaagtaacaacaccaatttatagtcacaacaacagtttgtgaaactacccagtttcccacatcctcaccaacatgttacgctttggggaaacttcccacactagtgctcctggtctctgtttgattttgcatttgattttttcccttcttatattctaagtatttttgtaggccattggaaatcttggcaaacattactcacagaaccgcattatattccattatgtgaatgtatcataatttatttagctactcccatcttggcgaacatttaagttaaattttaggtttctgagaagtgtcattgttccttgtggcccatcattatggttcagctgttgagatttagaatgatcactcctatcccmattttgcatggttttgcctgatgttcactgatttaatccacgctttattcctcagataatgagcagtgtagaactgtgattaagggcctcaactctggagttagacttgtctgggttcaaagcttgtctcgtccactttctgtwtgacttgcacatcattttacttttctgggcctcaggtgtttattgcaaagtgatgataatagcacctaatttctaggcagtggttctcaagcctcagcaggcatcagaatctctgggaggacttgttaagacacaaattactgggcctcaatctcagagtttctaatgtaatagaaaatatggggtgagcccagagaatttgcaatttctttcaagtttttgggtgatgttgatgttcttggtctaggggctgtgctttgaggaccaatgttctagagattgtcatattcattgaggtgccgcatgaaaagtactgtttagcacggtatttaccacatagtaatactaaataacttccagagtgatcagtgaagtttttggtcatcagaaattacagtcagcaggctgggtgtggtagctcatgcctgtaatcctagcactttgggaggccgaggtgggtggatcgctggaggccaggagtttgagaccagcctggtcaacatggtgaaaccctgtctatactaaaaatacaaatgttagccaggtgtggtagagcatgcctgtgatcccagctactcatgaggctgaggcaggagaatcacttgaacccaagagggagaggcagaggttgcagtgagctgagatcgcaccactgcacttcagcctgggtgacagagtgagattccatctcaaaaaaataataataataaaagggaaatacagtcaacaaaccatgttggtttattaccagcagggtactatgtcactctgaaatatttctgraaggctttaggactttgaatctgctacagttcagaggttatctctgaactggggctggaggagtgtgtgtgtgtgtgtgtgtgtgtgtgtgtgtgtgtgtgtgtgtgtgatgaagtagacagaatatacttcttacaattaacataaatctgaaaaatgaaccttgaattaagaaatcatgctcctttgacatttctccgtcctctgtccttttactctctttagtaatcctgtttctacactgccactttcagcattttaaataattgtccagatatcaggaaggaactcagataaatcagcatgagacatgggagtctcttacagaggcaggattgctgccagcccaaagacacaaacgaggctaatgaattctcacttccatcataatatgtgccctgcagctggaatattcagaaacatataattttgatggaaacataaatcaattttagggcaattgaaatataacatatacaggaaaaggaattctagaaggataattggcaagacatttagatccctttccagtgaccaccctggattctatgctttttttaaaaaattctgctgctgtgaaatgctgttgcgcaatttcccaaagttaygcctttaaacacagtaattttgtaaatggtatttcagccccagagaagcaatgcatcaagcgtggtaagtcgccatccactgcttggtgtttaatgaaacatctctccatccatgcagggctggtggtgtccacccagtgtgtaagtttggataaggcacaagcagtctctccttcccacactctcccacggtccctgacgcccaccccagggaatagtggaaacctgccaggctgcccttgacagggagctagagaaaggccaaagaaagcatttaaaaacaaaaaaacaaaaaggattatatctccttttttttttttttttttttttttttttagacagagtctcgctctgtctcccagactggagtgctgtggcacaatctcggctcactacaacctctgcctcctggattaagcaattctcccgccccaccctcctaagtaactgggactacaggtgcgcactaccacatttggctaatttttgtatttttagtagagacgaggtttcaccatgttgtctaggctggtctcaaactggtgacctcaggtgatccacccgccttggcctcccaaagtgctgggattacaggcatgagccaccacacctggtcaaggcactatattctatcctctgtctatcattgcttccaaccaacagactctgtgctagcccctgggatacatagatgaattaagatataatttctctcctcaaacaccatacagtctgatcaaggtgggggaaatttatctaaagacaaacttaggaataagaattctttttttaatattgaaaaaagaatagtacagaaaacaacagaatctgataaaatactcaacccgatattcatcatagggaacaaagctaaacctgccaaaggttaatgtttgtttcaacattttgaaagcaataaaacattaatgataatgtagaagttctgattctatctgtttccctgtcccagttttctcctgttctctccatagaagggaaaacatgataatcagtttggtttacatccaaatccatgtacatgtgttcgtactttcaatacacatacatgtgcaaccgtattcccaatgcatacttctgtctaacgtacaaaaatggtgtctaatgtgttagaacttcctttacctcaaccttatgttttcaaaatccctctatgaagataattcaattgcatttattttattgatgatattctgttgtataagtgttccatctttacacttacataattcctctttgatggacatttaggtttttttatagtaagatatttttcagtctggatagctgaaagcagagaacagacctatctgtagcctgtgttagatctaccagcttgttcaatagaagcccaggactctggagttaggagttcttcacttcaagcttaaaaattacatttgcagctggattaaggtcttactctgcaaagcatctgataaacaaatagctctcactattcctcctatgtagcagggaggttgcaaatagctccagaagaagttcagatgaggtcatacctgatatcttcgtggtgagttactgaggggatctgggatccagatttgactgrttgagaacaaagtcwtggggccagctagacatgccacttggtggtcctcatggactttatttataatctcaggcaaagagctggtgcagttaggatattgttgctcatgggctgggcgtggtaccaggggctgcttgcaagggaaggtatgttcatgaccttacacccaaccgtttctgtacatagagtttcaggcaaaaaaaagtacaggaaagggggacattttcttcatgtttaatattcctgattttacagaagacactttgaaaagagcagtcagcattttccaaagtttaaaaatagctcagccatgttatataacctccttgctactgcacagttattaaacatctgttccttcaccaagcacagaccatgtcactgttaactcccaaaattgtgaaggtaaaccwtgacctgtttggctggtggaatcccggctgttgtgtccggttccatcacaagaatctgtccagttcaggagtggccagggccccctgggaggcagtggcatcacggttaagagcatgggcactggggccaggttgcatgggttcgaacctaatctgtacttttttagacttcggaccttgggtgagtcactgaactccacgtcggctccctcaggtgtaatatggggacaagaaaagcatttgcatcttagaccagtgtgtggcgtatggaaaagcagtctgtaaatggttactactatggatgaaacttgtagatctaaagttattaggccgggcgtggtggctcatacttgtaatcccagcactttgggaggctgaggcaggcagatcacttgaggtcaggagttcgaccagcctggccaacacatggtaaaaccctatctctactaaaaaaaaaaaatacaaactttagctgggtgtggtggtgcacgcctgtagtcccagctacttgggaagctgaggcaggagaatcacttgaacctgggaggtggaggttgcagtgagctgagatcacgtcactgcattccagcctgggcgacagagcaagacccagtctctcaaaaaaaataaaataaaataaaaatgaaataaagttatgagtgaagtaagtgtctcttcatgccatagcccatgatattaccatttgttcattcaaaaaatgtctttggtgtcttacataagctaagcaccaattattcatagttggagagacacaaaaaggccatcatgtgattatcaggcggggcagggctgtcattcatctattgtttgctctgaggtttgggggccagtggaatattccatagtagaggcccagcctcccaagttggaggtataggagaaagaaaaatgtccttatgctaaagcacagcacctaacaagaggagtaggatctgggtgactcaatgctctgtgattattttccaagctgctttttggtagcttttatttatttcctctggtgcttaaagctctagccactaatgcctatttggggcttggttcaagcatatagacccaggtgaaattcatatcacattttagcctgtggttttatgaaatgcaaagcattaagtttgtgctgtgagtgctgtgtgtttgtgaatgtctacaggtgtttttgcacacatatatgtacatgggtatgtatatacacacatgtgcacacgtttacctgcatttttgtgtgcgtgtgtgtgtgtctttctctctgcatgcatatatgtgtttcttattccacagcggaggggacacattttacacttactgaagaggaggtcatagaagggagagggtggatgtttttcagaccaaaaccctcttaccaaaggattaccttgggagaaatatggccattgggaagagggcagtgtggcatcaagaaaacttcatggtctaggtagtatgacagacttgactatgaatttaccacatatttaccaagtataagttattaacaactgtgaacccaggagttttcctaaagagggtgygtgtgtaagatagacatctcttcttcttgtaacatcttaaagtatatacatttagcatggtgccaggcatggagaaggcattttacaaataactatcagrtcattattataattttatttttcttattattgtggtcatcatcatcattattataactttatacttgttacactgcaagctctgagtaagctaggaaagcaagcaatggaagtgcatttcagttctattctttaattactgaattacaactgtatgttctgtgtggttcccattttagttagggaagtaggacatggagaagttactgcactggaaatcaagtagaagagctcaagtagatctatagcacaaatgagkgggcaaaaaaagtcttatcccaggagagttatgaattagtattgaagggaagttatttggccttcattgatgacacctggcatgaccatttatgtgttttggattgacttcttgagttatgaagtcaggcttcagctttaaaaaccaacaacattgtaaattattacccctgcagaaagggaaatagaaggaagatatatatgtgagaaagagttttattcatgtctaagttacattgatactactttaaatcttcatttctaaaataacataggaaaaattcttggtttaatgacccattaagagactgtgctaaacctggttgacatatttttatttagtaatcagaatgatcactgttggttttttgtaatgccaatagaaatgcctgctcagttaattctctgagcttgaccagagttaaaacttccctaggtgaatgtgattaactctttgcaaatatttatctgggagatcaccatatgctcaacaaacacttctcgcagtgaaatcaggcacctcagaggccaagctgtcctgtgggccttygctgtacatctgattgggactctgaactcagaagtgggaaaaacagctgagtctcaaagtaaatcagcaagagatacgaggtgagagaatccagaggaacacaaatcatttttcccaaagctatgtgactttgtggaatgtagacttagacagtgctgtgttcaaaccctcttattatctgggttattctgggagagttccttaacttctttgagcctccatttccttgattgtaaacagagaaaattccaagaatagggaggatgataccacttaaatgcaggtattgtgcttagtcaagcatctaggatatagtcggcactctacaggtgttaattctcctcctctcctggactagaggcacagcttgatctaggcctgatggacccatgagagtgggctgagcttgctgggtgttcagcctgagcactaagtcaacagcctctcttcagcatcatctctgtttgtggcatctctcctggaacacagccctcccttttatggctggaagtcaaaagaaccgtatgccagccctgcaatgcaagtcaatcatttccaattggcacccaatgaatagctcgacaaatggtagaaacctgatgctggcagcttgggaggaccagaagttggccgtgcctttaccttgagggaaaggtggtttgggttgttttggggtcacacataaagcacaaatattgttcacatttgccttaggccagatgtaagtcttaggattttggaaccagaatgccgaacaaaaaggcacattgatctatttcctccagggatgaatactagagaagttttcattttgaaatttagtaatttggtgacatgtgctaattatttgttgccactctcttttgtgaaaaaacaaagcaaattaagccccatctctattactctgatgcctgctaacagagtgtatactggggctgggaggctttaatgtgtagaaacataggctggttgggagatcatagcacaggtctaggaaagaggaagtggtgacttgcattacagtaatagctgtggattcagagagaagtgggcaggcttaatgcatatttgggctataaaattgacaagacttgacagatgaatatgaggtgttaaaagagctataataataattttcctcttgtatagctgagtagatggtggtgtcttttactaaacagaagaaatgaggaaagaaatgttggggaacagagagtcagggacatccaattttagacatgttaaattagacatacttttgagatatccaagtggaaatctcagtaggcaatcagagagaagagtctgagtacaaaccgaaaatgcaatacacaggatttgagcttattgatggcagtcaaagccctacgactgggcaaggtcttgcaggggagaatgatgactcaggagggcctgggtttaaaccatraggaactttaacattaattggtaaataatcctccaagggaaaggagaatgttggagagaaagagttacgctgtaaattccaggtgctcttcccacatggagactctgttcccaatgttgattttgttttgatgcctggtgggcgtctgcacagtgtttgctccatgatagacatcgtagtaggccttccaaaaatgtgtaatctatggctatggtgaatatatctgggttgggtgcatccttgcagagttaatcctaccagcagttttatttaatcagtacattgagaaagtatggcaagtcaagttttggctttggagagataaggaagtgatgaagctttgggtctcgacggatgagggaggtgatgggtggtggagcattgggtctggagagataagaaggtaatggaactttagatctggacagatgaggaggtgatggggctttgagtctggagagatgaggaggtgatagagctttggtctggacagatgagtaagtgacgagtgatggaactttggatctggagagatgaggaggcgatggagcttttggggtctggagagatgagggagtgatagttcaggcagggggaaaacctctgtttttgtttcattctggacacgatttgggcaacatctgatattgtacaaaaagacaaagttaaaaatcctttctaccaaaagggagaagcatgcagcaaagtataaaggggcaggtgctcacgaccgattaacttatgagctatcgttggtttgctttcctgaaagagtatctgtctatgcacctctatctatatataggccaaaagctctcctgatcatcccttccaggtgggagcaagagaggcagaacgggcctctccacctgttctctgcctttgtctccttgcttctttgcttctctcacctcttgcttccatgtggatgctgcctgcctgcaggtgtgaatgagcccccgtccaggttcctggtgcctcaaatcctggcatgaatcttagggatggaggagtcacggtccagcgtgatggtgctagctgtgttctgcgtgggcatgggaggccagccacatttctacatgggyctcaaagttgggtaaatgaactggcagatctgctggtgtctggtgtaccattgtccaaatccccacagtcagcttcctgaggatctgcttcatttggttaagtcytggccaaacacaaagagtaaatccacactgcccagttttccatgtgatagaaaatagctctcctgagaaatgtgctcatttccttttcatttccatcactattaataagaggaagtttaaacaatttaatttaatcaacgcatcattatgtatgtgagggtgagtggggaaacttcaagtttcataggttatattatctaagcatatatatttttaaacgtgaaagtactctaagggtaagacctaccatgtattgacttcctcctatgtgtcaatctgtttaaatatattatctttcatccttagatgtgagttaggatgtttttactgcaggtagcaatcaagttaactcaaagttatgtgattgaattagttcccgtaacaaaaattccagaagaagtttggacttcaggtgcaatataatcaagcttctagttcttttctctatgatctcttgactctgctttttgggcagtgtgattttttttctctaactgacttcctcgttacctcaagtttgctggtaacacctgggaagacttctttgtggccaaattaggtcatgtacccatcttgggccaataatggtgattttgaaaatgccaggtactgactggcttaactccaaactcctgacccagtcacagagaaggcaaataggttaaatcaaaccagacctactcctggagctgggaatggggtaaacttcccttgagttccatagattcttacaggaggcatgaagtctcaataaaatttgagttctgttaacaatgagaaagaggtaaatgaatgctagagtaccagcaggtcaattaaaaatcatgattcatattacagataagtaaacaggactagagaagttatagaacttgaaaagagccacacaggtaatgtaaaatggagccagaagttaaatccagtttcctttggttccaaaccccacgttacgactttcagaggctgcaaattgacctgtgttgtgtgcatgtttttttttttttaaacttagagtgtttttcctgtttccaaaagtaaagtcccaatgtttaaacactatcatcagatttcacaaaaattatattttttgtttaccatgaaaaagatggagttagtgataataatcccatatcctgacctgctaatgatcaactggaagctggaagtgactgtcatctctgcgcagtacaccttagtcmccacctgggttggtttatttatccatgttacctccagggctttttaaagtattttatcccaggttgtcttgtactcatttttattatttttatcataatcatcattatgtgtatttatttccaaaacaagaacttgatgattattaagattggcagatattagaatgagcaataacagggagttttgatagctcacctccagagatcttcrtacctgagttagcacaactggaagtgtgtacaacataggtctctcttatcctatatgcttacagcattactggtcaaacattcttacttaaagctgcaggtgaaatcatataaagcactgctgggatatgattttccatgactagaggcttcccaagattggagaggcgcctctaatcttttgcccacattttctcaaaacaaagtaaaatgaacttggctttcaaaattacagctgggtgtgtctggtacatagtcatctgcgactaagtgatcatttcatgtagctgtagatcataaacctccttcttggttcaacttacaggtgagaatttgagttgtttgtgcctagagtgccttacccaaaggcaaaaacttcctgaattacccaaggagagttccccttgacagactgaattaatttgtagatgttattttaaggttggaagaaaatatttgctctggtggggtgtgcagtggcrttatgacatttgtcragtgaatggcaaatgatggagccggatggaacccgtattacttgcttaagaaattgtcttgaaaatttccaatgtgtcatttaacgtagtaaagtatttggttccaatctgctttctttttcttagtcatactgggggtttcaatatttgctttaaaaataaatttggggtttgtaaattctaactacttggagatatgtttgagagatttaatggtcttatttaccttcaatgaattccattctattgactgctacttcagaccaagatggactgtaatatcccctacagactgaaacaaccaaaatggacaaaaaatttgaaatgattgtttttaagaccctgaatattggggaaaagaagatagaaactaaaataagtgagtttaccacattttatttatggctccactcaccaccttgagagagtttccaggctgcaacttaaggataggggattcaagtgtggcagactccctgaatggcagagacaaagttgaatctaggaaacaaaagcagctggatttcataggagagagtacctgagaaaagtgatccgcgtaaatggagatctgcctaaggcccaccttagtgttgagctgaatactgctcaacataagggtgaggacactacctaaagccaaagaaagaagcctcccaaagattgaaaataacagagcccaggactcacgtggagtgagggttagccgctagtcagactagaaaacccagttattcatgggcactgagttgagtacacagaagggggttgtctcaataatggagaaataattagctgtagactatgaattgctctcactctgcctaacaaatatcaaaagcaaaatttgaaaagatcaaactgtttccaagtaacttagtcactctagaacagagctcagtgatatttatagtaatacaaaaatatcagcacgaaaaaagttaaaatttataatttcttccatcccatcaaaagttaccaggcatgcaaagcagcagggaaatataatccataatgaaaaaatatcatgtaacaacttacccagatttaaatgaatgttggaattggcacatggggctattactatagagagtaactctaactctcaacttcataggttcaaaaattcaagtggagacatagagaatgttttttaaagaaccatatcaaactactagatataaaatctacaatgcatgagataaaaactacactggatggattaatggcaggtttgacattgaagaagaaaaaaatcagtgaacttgaaaacaaagtaatttccccaaatgaaactcttagagaaaacacaatttgaactatgcattgagcacgactgaggattttaatatatgtttaatttgaatccctgaagtaaaagggggcaggaagaattttggaaaaataatggaatgaaaaattttcaaatttaatgaaaactataaaccctcagttcaaaaaacttaaatcctgagaatgagaaatatgaagacatagcataatcaaatttctcaaaatcagttttaaagatatatcagctaaaaagatayaccacagttgaaagctgtcagagtgaaaaaagatgtcagccgacttctcgtcggaaacaatacaggttagaaaagaatgcagaaagatattttgtactgaaagaaaacaatgtaaacttagaattctttgcacagtaataatatctttccacagtgaaaatgaaatactttttagaatagaataactggaagaattagcagcagatctgcattacaaaaaaatattaaatgaagttcttcagggagaaagaaagtaataccaaacagaatatggatcatcacaaaagaatgaaaagcaattaaacaaaaactagattgttaaacgcatgaggtttttgttttttttttgttttttttttttttttttgagaccaagtctcactctgctgcccaggctggagtgcagtggtgcaatctcggctcactacaacctccaccttctcctgcctcagcctcctgagtagctgggattacaggcacatgccaccaagcccggctaatttttgtatttttagtagagatgaggtctcaccatgttggccaggctggtctcgaactcctggcctcaagtgatccacccaccttggcctcccaaagtgctgggattacagacgtgagccaccatgcccagcctcacatgaggatttttaaacaatgaaatcattttaaaagataaattacttttaaaacaaaaatactaacaatgtagcatgaggttaataggttgttaaaagtaaatatgacaacaatagcacaaagattagcagggaaatcaaagtatactatttgaaggtcttatggtatacttacgtagtatagtggtataacatcacttgaagataaccatgataaatttaaaatatatactataaactctaaacaaaccactaacattaaaaaaaccccaatgctctggctaataagccacaaaggaaataaaacagaatgataaaaaatattcaacttatcaaaagaaggtaagtagaaaggaaaaagagaacaaagattagatagaacaaatagcaagatgataggtttaaacctactgtattaataatcacattacatgtaaatagtataaacatcacaaagcaagaaccaactctaaggtgcccataagaaacccactttaaatataaaagcataaataggttgaaagttgaaatatggaaaaataygtacacactaatactaattttaaaaaactggactggctgtattaataagacactaagtagatttcagatcatgaagatttttggcattaaatattgccatttcattatgataaatgagtcaattcatcaaaaagatcaaactatgcatctagtatagcttcaaaataatgaagcaaaactgatgcaactgcaaggggaaataaattcataattatagtaggagatttcaatactcttaataattgctagaacragcaaagttagtaaagatacagatgattttaacaatgtcacaaccaagttgacctaatatttgcttgtggaacactccacccaacaacagaacacacatttttcaaatgtatacagaaaatttatgaggatatatcatattctaggccataaaacaagttttagtatatttaaaaggattcactaacacaaagtatttctgtgaccactttgaaattaattagaatctaataactgaaagatctccagaaattccccaaatgtttgcacactaaataacaaacttctaaataacctatgggtaaaagaataaataaaaacgactctttactcaagttgtcccttggcagaaatccaagcctctttgggaaactgttcttcactcaggcatgcggtccatcttcagttaaccaagtcacagggacatttggctctttgcttggttagttgctgctcagaacagtcaggaattgatgtctacagagaggtttgtgggtatgagggcatgaagaatgtgtttcctaataaaaataatagaaaactgggtccagatgggcgtggatgtaattctcaggcaagccacattccctgccttcatccgagtttttatgaggtagtggaaataggacccaaactaagatttaagacattgggttttaatcctagcttgctcctgcatatggttgtaatctttgttaagattcttaacttttctgattctccttttttttttttaaatctgcagattgatggtgttggttacaataatctggaattgtatttcatgatgtcagagcaggcagggatgctggagatcacttaggccattaacttgtaattatttttctcctttgtacaaagcaggcttctgggtgcttttgcaatatcatcacactccctaggatgtaagtggtagctccaacccttttcttccacttaagaaagattagacggcaaatgagtgatgataatgagtctgctttaaattagatcaaagtctaatttctcttttttatgtttttaataatttataaaatttgcctcaaaatgataaaatatattattagttgtaacaacgtattttcaactggttttacaaaatcaaaataaattacttctctgtgttatgttacagatgaggaaattgaggccccaaagagacagggttaatgttttgctgtctggctcatggcaaaggcatgacagaagcacagtttttctttctcccacacctaggtgcattgcttccactacaccttctaggttctttgtggttattaataataaggtgatcatgattgatgaagatgatgatgaattccaggaaccttgtccattttacttttgtgcaccagcacccagcatagtgtagacacttaataaatatatattgaataagtcaataatgataattgctaccacagcacttattctgatctaggtggtatgttaaggattttcacatgcaccatcttatattattgtcacaacatctctgtgaaataagtagtagtgttatttctattttcacatgagaaaaagatttcagagagaagaatgaccttccgaggctcagttagtggtaggatcagtatcaagatgacctctctggctttagcacccgatcttctgattctctggcttctcaggggaaagaaaaggggtcagttgtgttttcatgcggtccgaggacgtcttccaatgctgcgaagctggtacaaagatctctcccttgtgggtaggagacatttgcttgtctttagagttaattcatcatgaaagtgtgactgatggaaattaattttataaactacaaaacctttctgaaaatgttaatgttgtcatcaatactaattattattattgtcattagcacagggatctatgtttggcattgccaataataaaacaggcagaagaataaaggggagaagctagtctttcctgggaaaatgtttataagaatcgtcaaaagctcaaatgcagaaccatcaactccctctaaattagttctggaatgagtcccttgagacatcgtgcacccctgaggaggacccatacatattaactctacagaggattgagcaaaatccccagcaagggaatcttagtaattctgactaggcagaaggaaggaaataaaaggtagaaagaaagaaggaaaccaagatttaattgtgatactgggtgcaaaccagtctataatgggcttgtctgcctggattttaaaagtttgggaggccgaggcagggggatcacgaggtcagctttctggccaacatggtgaaaccccatctactaaaatacaaaaaaattagccgggagtggtggcgtgcacctgtagtcccagctacggcaggaggctgaggcaggggaatcgtttgaacctgggaggcgaggttgcagtgagccgagatcttgtcactgcactccagcttggtgacagagcaagcaagactccatctgaaaaaaaaaaaaaaattcaattcacatatatgcagggaggccaagacactggtaaatattttccattcagtgtaaaagatgacagcaggaggagggatccatcatacttcttagctatttacttgagtttaaattttatcttgactttaataaatctttcaaaagagagcatttcttagaactctgaatgcaggactgggagagggtgtttgtcttcagccgatgaggtgaaagcaaaacaaaacaaaacacacagaataaaaacagtcccctggcatctgttacccatgttcacctagcaatttcctggaattctttcattcgttcattcattcatgcattcacccgttttcattcatttgtcttttcatgtatccatttaccctcaacagtcagctattgtgcacttgctatgggtgagaccttatagtaagtatgagacacacacagtcacgcacaaaacagaaaaaagcatgctgctcaaagctcctattctagtgagaagagagaaaataaatgaatacaggcaatgtcaatttgctattgatatgggatgggaagagaaacggagcagagagtaaagggatggagactgaaggatggttattttagacagaatggttgggaaggtgaaatttggcagatacctggatgaagtgaatgagaaagtaatatgacagtctgaggaaagagcgttttggattggggactgccaagggcaaagacctggaactgggaaattgcttggagggtctgaggagcagcatgatggtcagaacggcaggagccagaggagcatgcatttggagagaggagccaagttctctaggtcctcagagaccacgatgagagtttggaattttgtttcaagtattatgaaaagtctttggagagttttagcggggaagtaaggtactgcagtgacctctgagcttgcccaagttgtatctggagcctcattcactttttcttttccctgtgacaattcatctcctgttagacaccagcttttcctagggtggtacaaaatgtacttgcctttccagattccatttctcttctccttaccatgcaggccttggtgggtcctatttgaccacagctaatcagaataatcccatgcatctcactacagtgcttggttcaggaatgggcacactatctaatttggtctaatattaaaaatttctgagctatatgatatatggcaagtgtgtaaatgtgagacttggaatttctgctgccatttttccaccatgaaataaaccaggctgatgataaaggcaatttatacatgaggaagaactaagagaagcatggtatgaagaatgagtcagagccatgatctgactttatctgaaatctaccctatcgctgatcttttcagagagatatatatgtatttttttgagatggagtctcactgtgtcactcaggctggagtgcaggggcgtgatccaggctcactgcaacctccgcctcccgggttcaagcaattctcctgcctcggcctcctgaggagctgggattacaggcgcacaccaccacgcctggctaacttttgtatttttagtagagaccaggtttcatcatgttggtcaggatagtttcaaactcctgaccacaagtaatctgcccgttttggcytcccaaaacgctgggattacaggcatgagccaccgcgccgctccaatttcagacattaaccactaaacgcccgtagtggtttaattttgtttaagttagttttttttttttcattgcaaccaaaagaactttggttgcataatttacagtgaatgtataatattatgttaattagttgatgtattataccctttaatttacatggttacatttaacaaagctgaatgttaacaaagtgacattttaagtaagaatttgagaaacacttttgcacaagatactttggactttaatttcagacagaaaacttctcaatggacataatttgtgcttcgtatatgttagtcgcttttgaatgactcgaacctatacagtagtcccctcttatccttggtttttctttctgtgattccagttacccatagtctgaaaatattatatacaatacagtattttaagagagagaccacatttatatatcatttattctagcatattgttataattgttctattttattaataattgttgttaatctcctacagtgcctaattcatgaactttatcataggtatgtatgtctgtgtaagaagaaacatgatacatacacagttctgtactatctgcagtttcaggcatccactggggatcttggaacatattccctgtggatagggagatactgcagtacatccacaggctttggaatcaaatttcagctttttctgccacttattagctgtgagactttgagcaagcaactaaatatatctgagcttcatttttgtcatcagtaaaatagaaataatgctggtccccactcacagtgggggagtttgtgagaattaaataaagcatgtaaaacatttagctcagtacctggcccacagtaagtgatctatgaatgctggctcttatataataatataattctcggaataaccaaggaaaatagaacaaaaaatgccacctagatggcaggattgctttgcatagcttaattaagtatgtttcattattccaactccctggggcttttgagaataaaatttttaaaaatgtacaacgacagtctcattaagagagtgcagaaggagcaatctctaggcggggagtgagagggaggacgtgttgaaattgtggagcagaacgcacgagtactggtgtaaacttggtccttaaacagtaaatacacacatccaaccacacaaccatgtctttccaaaggaagtttttaaaaagttagaagaacttgggtcctgtataagagtgagatgttaacatattttatttgactgaagagtctagctattataagatctttatttcaaaaaagttaaagtgcaaaagatgtgcattttggaaccgatgcagtagaacagtggtgcattccatgtccagttttccaagtagctgtgaggtaggcgatattatcctcctttgagatgtaagaacattgaggcttaggaaagtcaagtgcctttttcaaggtcacattgttagtggacagcagtcacaattgcattcatccattcatctgaagaatttacctagtgttcagtgccaaaccccacaggggatacaccagtgaaaacaacagagcatgacccctggggttataatctcatagggaatttaaacaaaaatgagtaaggaatcaaatacataaaataattgcactatattatggctcctgtgaagggcagatatggggtactgagatggaaaacgtgaaggatggaaggaacacacctcttgcctctttgcagaagtgatgtttctactgaaagctgaagggtgaagaatcagatatgaaaagagccggagaaaagtcattccagccaaagggagcagagtgcgcaaagtccctgagatgggaaatattttagtgtttataaggtaataaaaacacttattctcatggtagactcagtttcgggtctttctcacttcagagtgtctgctatgaaccactaggcaacgctacctctgcaaaagggaaagttgggtgtttgaaggccaagagacaccatggagcagtagctgccaaaaggatgctcatcacttcctcacatcacttacttaactccccagaagaaaattcctttcatatgttaaatgaccaactccatctctgccttgtaaaagctggaggagatatttgaagggcttctgttaatatatgggatgtgggtggcggggaggaactggtggaaaagaggtcatgccttgaaaggttggaaaagggaggatggtggaaaaagagctaggagtggaccgttgactcctagtgaagaaggctgcatcaccagccacctccgaggtggaataccaggtgtctgttaatccgcagcaggatactattagaaagcccatttcacttgtcactgtatcgctgtggctctgagagttgtgccttttggttccaaattgttttcatttcagtaccttccttcccaataagtggtattgaaaatgagggaagaatgagaagacctcgatttatacgtgccggcagattcagggtgtatgaaaagctcctactcacaatttctggttctcttgagaagttgggtgatgtttaatgcaactttctcttctttttttccaaggactcatgtcatgaagcttttgactgttgggaggatctgtggggtcatgggatcactttgctttattaccctcctaattagacataattaataattattacaataatgttatatagtgttttagactcatatacaaaatcttgaatcctcataacaattctttgagttgcatgggattattccaattttacagataatgttcacagaggtgacatcatataaccaagattacacaaagagattgacctaactcttatgcctccaactccagaagacaaagttggcaaataattggcagatgagaaattgttgcagcactctcaataatcccaggaaggaagtacagatgttgattaattaacaacaaccaaaggtattatcacatctrcagtaattagcatttatcaagtgcctagagtgtgtctggcatactgtgctaaattctatttattaatcaatctaattctcacaacaaacctgtcatgtaggtgccattagtatctccatttaacagatgaaaaaacggaggctcaaagaggtgaaataacaactagtttatataagtagcaagttgcagagacagttcacaaacccaaataatttaactccagagtcagtgcttgtcaccaccacctaaactacctccattgatggtgtacttctaatattaataacaatgacatcaattacatcaattcattggacagagcaactgtgagttgtgagtcccatctcttaccattggttaaaaaaacatacaagttttaggagcaggattccattacactgtctctgttcaaataagtagaaacaagtaattggggcaatggccttgataaataatcttaccataaagctgctttcacagaaaaatacttgtttgtatgtattttctacctttattagaacatttggatagttgtgtaggtctgtgctgttcttaaggaaggtggctattattaagggtggtggacttgattcaagtcctcccagttttgatgtgttccttgaccagttgattcttatttccctgacttgtaaattgcygtcagcttcagcttgccttattaagaattctgtatagttggccgggagtggtggctcacgcctgtaatcccagcactttcggaggctgaggcgggcggatcatgaggtcaggagatcaagaccatcctagctaacatggtgaaaccccatctctactaaaaatacaaaaaattagccgggtgcagtggcagttgcctgtagtcccagctactagggaggctgaggcaggagaatggcgtgaacccgggaggcggagcttgcagtgagacgagatcgcgccactgcactccagcctggatgaaagagtgagattccgtctcattaaaaaaaaaaaaaaaaaaaaaaaaaaaaaaaaaaaaaaaaaaaaaagctgcataatcaataggctgtaaataaatggaaacatatgccccttcccacatgtggggaatgttgctgttggctcttctgccccttagctgtcttgtagcacaatgcttcagctttcagttgagtctctttgtggcttgtctaactgctgctatcatatccaggtgattaagctgttatagccttaatggcaagtttcaattcactgtcgtcttcctcagctttgggtctgggagccccttacgttcccactttgttctctctgggaccatctttccatcttcaataagcctaacttctgagccacagcaaaacaaatgcgtatgcgttgaagatagtttcagaacttgtgcattgggaaattttctgtggtttaacacggtgagaagaactggaatagcctgtgctgttcagaagccagaactgatactgaaagcaggtgcaggcctgtcagccacacagctggttgagttaactctattagacactattggacaattttgttatctgaaatagaaaccagtatggtggcaggctgtccctttgccaaatgatgcccctgctaggctggtttaggtctgcctttcttgttggtgcatctgctgggttttgctgccagcatgttgaaaactggcagttctgtaaagttttattgtcttcctaggtgtttttgtccaggaaagaaatactaagatttgccgtttttttaaatgatgacttggcattttgactcttggctgtactttagctggaagaaattagtgtctgattttattctaatactggaactgcatcttttttttttttttaaccaagaatgattttctagttctctccaaatcaaacattcttgggagcctctattctaaattgtttttcacactcagttctaatgccttcacgtaatggattttgtaattttgttcttttctttttttcttttgaaaatcagcaacaagtaaaaagaacccctgtgggtgaaatacaatatccctcccaaaggagaaatggaaaaaaaaatgttatttcaaacttcaagcccaaacgttatctgccttctacattttaagcaggctcagagccttgaggattgagtcaaagaatgcaaaacatgacctctcaaaggcaaaagctaaaaaaaaagttggacctagaacatcaaatagctcttaccaaagagtgttttgatgagtgaagtgtaaatgaagcgtagaatatagctcttttccaggatacaaggcccaatttccgaaacatgcaaacactctctcaattgaatgcattagctgcttagttccagagctgctgaagtataaaatgcgataacttatgttaaacacccagcactgtgcctagccgatgttggaccctcaatttaatattattattaattatttctatatagaggggaaacataaagaaacttgtttcaattacttatttgacctaaaatacaaggttgcacaatgcgttgtagcaaatgtctataaatctttacataaaggtccctggaatagaatctcattctgcaaattcaagatcctgtctggagaaaaagagtgaagactctatatgtatatttttgaatgaaatagagcacccatatctactatgtgtcttatgagaaatgtttccctagaggagactcataaggagtgacccaagaactggcttcagagttttaaaggactgccatccggaaattgtagtagaattagtctcctttgcttacagtagagaactagagctagtgggttgaagcttcaaggaaataactgtggttcagtgaaaggaarctcttgctgacactttaagctatcagtggaagggaccctccaaagaagtggagagaaatcatgtggacactggaatcttctggcaggaagactgggaagagtttctgcaatgtatggcgaggccaagggcagagggagcagttctgttggtttagatagataaccttaaaactcttctatgtggagactatttgggtccagctgaattatctgccttggaatcctcccatccacttttgctgaacagcacagctattactgccttttagatatgaaattcaatagcatttgttccttggctcagatcattcacctttaattgtgcccattaataccagtgataactaatgtttattcttcagttactatgttccaggctctctacaaagtgttttgtgcatattgcccttttaatacgcagagatactccatatgagtatttttattatccccattatgcagattttaaacatgaatcccagttggcacaattaaagaggcagactcataactagcaatactgagatacaaagcaaggactcttaagtccaaagcttctgttcttaaccacttctttgtactaccctccccccaccccacccacttactctgaattttaagaagagtgctttatcttttcattattccttttgcagcttcataaagcttttatatgcatttcatcaggggctacgttctgaaaatggtgtttctggaaccatggttctggaaagggcagagactaaatgatgccgacattggtatcatcgtcatcatcatcaacatcacatcattgccatcaccatttatagcatcatctccataatcactaccaccattgctatcaacatcacaccatcaccaacatcattatctatcatcattgccatcatcatcattgccataattaccaacatcttcttcctttttttccccattcttcttcttccttctccttttcctttatcgtcatcgtcattaccatcaccaccatcatcaccatcaccaccatcaccatcatcctcatcatagttaacacatattttgtgctcactgtgtgccagcacattacaggtactaactcatttaatcctcccaccaacactatgaggtagggatattaaccccatcttacagttgagaaaactaagatgcagagtgaatagcttgcccagtcatgctcttaagcacaataccttaatgcctctcaccctttaggagctgcttttcagcttgactaagggtgggaatcatcacttaaataagtcatagaaacttcccaaaagtgtaaaagtgttcactcaacctttatactcaggtttttttctgtagaattatttaaaattttctagacattataatcatgtgcttctccctgttacatgatgggtaaatggccatcacaggttaggagacagacctttgtagagctatgtttttccaaatgcacttccttgttcctaagttggagggcattgttaacattcatgggctaatattaatgagagccactggatacrgggattgggatggtgctcaggactctcgatgaattctcattttatactcatgacaaacctatggcatggctgctatgattatgcccattttactgatcaagaaacaggctacggatagttaaataacttgcccaagatcgctaacactaggaactagctgagttagcatataaatttaaggttttctggctccagagctagtgcatgtaatcactgtgtttcactgttcctttcattcattttatgaccattttgtttgtttattttagagacgagcatctctctatgttacccaagctggtctcaaactcctggcctcaagtgattctcccaccttggcctcccagaatgctgtgattacaagtgtgagccaccacactcagcttatggtcattttggaaacttctctacacgggctgacctccgctaactctttgctgtcactcctatttaaggctgctgttagctcctgtgctgttagccaggcacatagtaggaatacattattttggataattctggggactataggataaaatgtgaaaattacaagatggattttttttttttagttaaagtaaagaagacctttctaaaatgtgtatctatacaccaatgatactggttgttttggagaggtactgaggtctttactccatggaagcaggcaagcagaaaaataggcccacctatctgccagaggtattgtagaaatgattcaggggcagaagattgaatcaaaagaactctaaggctgggtgcagtggctcatgcctgtaatcccagcactttgggaggccaaggcaggcagatggtctgaggtcaggagtttgaggccagactggccaacatggtgaaactccatttctactaaaaatacaaaaattagccaggtgtagtggtgggcacctgtagtcccagctactcaggaggctgaggcaggagaatcacttaaacctgggaggcagaggttgcagtgagccgagatcgcaccactgcactccagcctgggcaacggcaagactccgtctcaaaaaaaaaaaaaaaaaaaaraastctgagacttcatatgagactcaaatatgagtttaaatctcatatctcagctatgactgcttttcaactacttattgtatccttgaattagctcagttctattcagccatctgcttgctttctttgttactttcatttaaaatgattctttgttgtggaaaaatacagaaaacaaaaaatttgccattttaacaatttaaactgtataattcagtggcattaagtgcattcacaatgttgtacaaccatcaccactatctagtttcagaaccacctcattaccctacccctaaaagattctacttctagttagatacctccccaaattaaaaataggtattcaaacaaaaactgaaaaacttgtactagaatgttcctagaagcactgttcatagtaacccaaagtgtaaacctagatgtccatcaacagacatttgatggatgaacttaatgtggttttgtccatactatagaatatgagccataaaggaatgaaatatgttttccaacattgatgaaccttgaaaacattaggctacgtgaaagaggccaggcacaaaaggccacatagtgtatgattccgtttacatgaaatacatgtattactttttgctagatctgtaagccctctgtggtattgttaacatagtactttttacctacattgacctaatcttttagagacataaaattccaccatagcgtcttcttaagcaacgatatatatgaaacagtgggtttgagatgctagttccatttttccaatatacatgaaaataataaaatctaattctaaaaataaagtttgcccatgtgccatctaaatgcatctgtgtaccatctcaaatacacttaaggcatttcagaaaacagccttttgggatcctcttggcaatcaatttctccttgaatgtgatccacacagctcttttctctgtacttaagctatctgatatgacagccagccactagccatatgtggctatttaaatggaaattaagtaaaataaaatggaaaattcatatcctcagtcacactatccacatttcagttgctcaatggcaacaggtgactagtggctgccatactggatgtgacagatatattgccattgtgctagaaagatctactggacagctcaacctagggctggctttcattctttctgttgtgctagggaagctccctgatatggttkggcattgtccccacccatatctcatcttgaattaccacatgttgtgggaaggacctggtgggaggtaattgaatcataggggcgggtttttcccatgcttttcttgtgatagtgaataagtctcatgagatctgatggttttaaaaaggtggagtttccctgcacaaactctttttgcctgctcccttccatgtaagacatgacttgstcctccttgccttccaccatgattgtgaggcctccccagccacatggaattataagtccattaaacctctttttcttcccagttcaggtatgtctttatcagcagtgtgaaaaacagactaataacactccctgtctcctagatcccatgcttaagtcaacctctcactcagcatctttaattcccaccacttgctcctggctgaccattcatcccccagccagctctgaaactgacctactttcccaatgtcaccagggagggcctggtgccaggccacggtgtggtgcatcccctcactgctcccttcctgtttgctgctcgcccagctctggacgcaatccatcttgccactctctcttgctctcatcgtactgacgtgaggatctcctcccacacagccctggccagctttcctgaagggctctgctgggcttcaaactccattttgtttcattatcaagtgtaagaaaacagcccttttccttttcccacacttctccctttactctcctgttggtctgtcttcttcttctccttcttcccctgggttttcttctctttaacttctcttcttttcctctttctcctcctttgttccctctttctcttcctcctactctccccacaattatttctctgtagttgtaagattaaccctttatagctatttgggaaaaaaaactggaagaaggactatagtaaaaagaaaaaaaaagctatattctttttaccatttatacagaaaaacaaaacaaaacaaaacaaaactcctcctccacccagcagttcctttgccctttaggtggtaaacacatcattctcttctcccaccaagagggtgaccttgcaattatggatgaagatatgaatatcagagcagtgactgggacttgcagagcttagtcttttaggggacacatttccacaccagaaatccatgtccgggtgtgaaacattattactgctaatgtacatagtgctgtcaagtttcattatgaggcccggcagagttcagacctctatttaggccagaatacagtgaactctgtcctgatggttctcacatgccatccagcacaccgggacattctcaacgctgctcaggactccagctccggccagatgaaaatctgctcctgctcattcagcaaatggtcactgaccgcctaccacatgccagacactgtgcaggggtgagggcacgcagcgagggctcagacatgatccctgtttcccgggagcttaccctccagcaaagaagagaatgtatgtgtttgaaaaactctaaggtggaaatggagctgcagaggaagtgaggggagttttgaggagggagtggaggctggaagctcagtgagccttttgggaaaaggtggactctctgctcagttttggaggatttgaacatgtgaatatttaggcgagacagatctttgtatttaaatgagacttgtgattttgctttattttcttttattttttaatgaaaattttaaattttatttttaaaaataatatctagtaaaattgactgttggaggcatgactgtatgattcttggcacacagattcgtataatcatgactgcaatcaggattcagagccgttccatcacaccagcccccaaaatcccttacatgtctacttacagccacactttctgctctagtcacacaatcactgatctcttctctgtgtctgtagttttgggtttcggagaatgtcatataagatagaatcatacagtgtgtaaccttctgagggtcacttccgtcaatcagtagaatgcctctgcaattcattcaagctgttctgtgtttctataattcattgtttgtattcccatattgtatttcattgtttatccatacaacgatctcactcttaggtatttaacctatggtcacacaaaaacctgtgcacaaatgtttataatctcttttcataattgccccaaactgtaaaacacctaaatgtccttcgatggctgaatagaaaaacaagacttttgtggtcaggcatcgtgattcatgcctgtaatcccagcactttgggaggccaaggtgggcagattgctcgagtccaagggttcatgaccagcctgagcaatgtggtgaaaccctgtctacaagaaatacagaaattacctagctactaaggaggctgaggtaggaggatcacttgagccccggaggttgaggccgcagtgagctgtgattgtgccactgcactccagcctgggcaacacagcaagaccctatcttgaaaacaaaacaaaacaaaaacaaaaatttgtgattttcactgagagaaagtaaattcttgttaacttaggcacaaaaaagtgcaaaatgatttattggtccattcaactagaaaggatggacttgttatcttgcgtgtctagatccaggctcaaacggtgtcttcaggtcttcctctcctttccatatttctccctgttaaggtgagttgtttgcctccaggagatagggaatgaactcatctaaactaagtattgattcacatacttttttaatccagaaagacagtgatcccttctagttgcaataaaaaattcccagagaagaaatgtgtttgaatgagattgagtcacgtaccgatccctgaaccaatctctgtggccagagatgccctccagggttcgtgggggaagatctattatcaggaaatgaaagtaaccagaaacaacagctatgactgcatttccagtggagggaggtgtaggaacaaaagctaagaagtggaaaatcacaagactttactgggataccatgagtggtttgggtttgctccaatgcaggatactgttaagaacagttttaggatggaaggttggaaaaattaaagttgccaaggagcatggattttatttttggacagtggggatccatttcagggttttgagaagggtggcacatgatcagaactgaggtgtgggaacatttcatctggcaagtgggcttgatatgagtatggaggatgaaatgtaggaatctgaatagcagtacagatgttatagtgcaggtaggaacaaagtgaaagacattttggtagcaagcaacagaaataaagcctgattagcttaatttaattaaaaggtaatgaaggagaaacaatagaaaatattgtttggggctttactagaccttttaaaaatcaaagtataagttgagcaactaatcttggaaaggtcataaggtgaggcaacattcctcgacgaaggagagtcactattacattggtttagagccaacaattcctggtctgtgtgtcttacctatcaactttcaaattcctaggagacagaatctaattgatccgccatgggacaggtgcacccctcccccttgtatatatttttatggccagggaaacaaataagtgttctgatatacataagggaggactttttcgaagatccgggcttattgtatatccataggcacatcgctctgccccagaagggatgcagtcccgtgaactgtactggtatagaaggaagcctaggtttttgcgagaggaaggaacatgaatatttttcagttcgtttagaacagacagtccaaatgagcagccagtagatcggttttatttcatttacatttaaatgaatttgaatgcctttagctaagattttcaccactgttatcatcttgcacctggctcgttttactcattgatattatctgcccagttctgaaaagcatgagaaatttgtattctttctgataaatcaacttggtgtttgccctgaaaaaagcaagtagaaatggagtaatggaagattaaccagtattctgatgggtcaggtccccctcctaatgttcttacagcaacaggaacattagctgcagacatattgccatttattgtaattatttgcataggatctgcctttcccttaaactctaaatgattgcagagaaaggaccacacaatttttacttacctctttaattcctayactttgctagcataaagtagatgttcaatggatgtttattgaagtgatgtgtttactaagaagtagatttgaagcctttctatagctgtccttttggtatatttcttagtggatcaaactcttaatttgtggtccataatttatggttttggttttagcattgaaattttcatgccaaaggaaacacctcagtgctgggacaactgggatggttggtcacactactactggatgtcaatcaaaaacaatgtgcttatcataggaccccttctaactctcatgatgccaccatgaaacttcgcaacagtgctgtgtggttgttatggactgaaagtttatgttgaaaccctaatccccagagggatggtatctggaggtggggctttgggaggtaattagggttagatgatgtcatgagggtggggcccttgcaatggaactaatgcccttataaaaagaggaagagccaggcacggtggctcacccttgtaatcccagcactttgggaggctgaggtggacagatcacttgaggccaggagactgagagcagcctggcccacatagaaaaaccctgtcttcattaataatgcaaaaaattagctgggcttggtggtgcacacctgtaatcccagctactggggagacagagacatgagaattgcttgaacccgggaggtggaggttgcagtaagctgagatcacgctgctgcactccaggctgggtgacagagcaagactctgtctcaaaagaaaagaaaagaaaaagaaaaagaaaaagaggaggagacatgaagtagatctctctccaccatgtgagtacactttaggaagacagccttctgtaaacaggcaagagggctttcaccagacaccaaatctgctggtgccttgatcttgaactttccagcttccagaactgtgagatgcaaatgtttgttagttaagccacccacactgtgatagtttggtatagcagcctgaactggtgaaaacagcggccttacccccattgacacagaagtgagctgagtctggaataacttgatttccttaagggtataaacaccaacagttgtggatttaaaactgaacttcagtttgcctgtctctaaatccactctctctgcaactcacagtgctcccagagttcagggtactgagttatgaattcttatcctcagggagttgacagtctgggagaggtgataacattgttcaggctatgaattacacaagtccaggagcacccttcatatcagcttcatcaaacatttgtgttttattttgacagttgttttggcaaatggtagtaaagggtcttcagaaagaggtgtctttttaaaattagtcctgagtggttgggaccaacataaataaagaaggtgccctctaagtggtgtgtgccacatgaagaacaggggttgagagttggaagaggatgcgtctaacctgaaggagtcaagtaatactttgtggaagaggtattatttgagatgatcatgaggggtggccaataagcctgatgcagggaatgaacaggaattacagctgcagaaaaataatatggacaaagatttgtggcctggcttattgtccttgctcagccttccttgtgtttggtgtcaagtagggaaaaggtggtcctcgggtggagattaaggtatccctttttgaatcaagtcaataaatggtgaacatgctgtgctcaatggcaagtctgctggataaacataaatgacagaagggaagatctgacctttgctcctggtgggaccaaatgtgtgaaagtggaatcctcagagaatagcaggagrcaatgtrttgctaagtgctgtcacatgaggaatggattaagaaaaccaagagaggccgggcacggtgactcacgcctgtaatcccagcactttgggaggccgaggtggcrgatcatgaggtcaggagattgagaccatcctggctaacacagtgaaaccccgtctctactaaaaatacaaaaaaattrgctgggcatggtggcacgcgattgtagtcccagctactagagaggctaaggcaggtgaatcgcttgaatccaggaggtgggggttgcaatgagccgagatcgtaccactgcactccagcctgggcaacagagtgagactccgtcacccccacccacccccccacccccccgccaaaaaaaaaaaaaaaaaaacagaaccaagagaaggaaagattattaggaaaccccacaatgaagaaacagcttgaaatcagccttgttaaaaacaaatactgggtttagactgaagaggatgaggcagaaaggcattctgggtgggaggaacagcatatactaagagatggggttaggaccaaatgcattgtgtattcatgggagtaggggaagatgaggagagaaaattaaatatcgtagagttggaaaaataaagaagtgtgtggtaccacccccccatttttcagagagggcaactgaggtgtagggaggttaaatgagtgctggtgcrccttaattcaaagcctwtgaaatctgaaagattttggttcaaataaccagttgactgcttaactcagctaaaattatttttttaaatggcagaaattctaaaacataaaagtagcttaaagaagataggcattgaattctttcttgtgcaaaggttgtctagggctggtgtggtattccacagtgtccgggacccaggctccttctaccctgtggctctgccaccctcagccagtggcttccacatcataattcaagatggctgctactgctccagccatcatatctgcattgcaactagaaggaaggaggaaggaacaaagacgggctcacctccttcttttacagtacttcctataagttatrcatatcataccttctgtcttcctattatccagaaaattgtcatagggtcatgcctagctrctagggaagctagaaatgtaagctttattattggagkttctgtgcccctctaaaaatagaatttctgttactaaggcagaagaaaagaggatattgatgaacaaccagaagtctcttgacccgtatagcttttcacaccattataaaacccacctctgttttctctctgtaaaatgagaaaatctgcacttagttctttgggtgagaattcaggtaacatatggaaagtatctggcacaccattcaacatatattagaggctaaatacattttagtcccttatccttaagtgatcgctcttactcacatattcagggagacaggacaagattctaggtctcctgatttgaagaccagagttcttttgtagcagcatggatgagcaaatatcttaattgtcttctagtttatttgtttaattgattaatataaagatattttccctggtcaggcgtgggatgtggtggctcatgcctgtaatcccagcactttgggaggccgaggcagatggagcatttgaggtcaggagtttgagaccagcctgaccaaccccttctctactaaaaatacaaacaattagccaggtgtggtgttgcacacctgtaatctcagctactcgggaggctgaggcacgagaatcacttgaacccgggatgtggagtttgcagtgagccgaggtcgcaccattgcactccagctggggtgacagacaagactgtgtctcaaaaatatatatataatatgtattttccccaaataatatcgtataaaaaagaacaacatattaacgatgtaagtggagttaggaatgttagagtcccattggcatatcacccccgacctttcctctctgcctttgagttacctcactggatgtctagttgtaattcacagaaagcaggtagacacccactggacagagagacaaagtagggctcatcatcaaaaggaaaaacgaaagaaaacaaaaagacagagagttgagacttttgttcattccacraatttgcattgagcatctactttataccaggtagtattctaggttcttcaagggagaaaaagcagcrgaaggaaaaaccaggcaaaatccctgcttttaygaattctatattccagtatgtgaatatccagaaattctgaaataaaaatcgcaccttgaattgaatgtcaattgatccatatcatctcattctatagtttttggttggaagagcaacatgcacgcacatctgccacttggagatcttgaataatttggcagcataggcacaggtgattgagtgaacttggaaatgcacgccacgttacatacatttttttctgctcatttggattagaagctcattatgtgagctggttccactggctcttgtgccagctggttcaaagtggttaggtgatccttagtcatgagaggttaatggtgacgcatttggtgctattttaacagtgttataaatactacccagcatttccagattcctcaccccaggttccaagagcagcctgagattcgaagaaccactttattaatggtcattcagaattccaataactcccaataaagtagaattaggacatgcatcttagaccctactctatacaccctgcttctagttgaaatctttggccagttgggtcaaagtttcaggtatgctctgtggagttgggaggaggagagtcatatttacagaaaaaagctttgtcctaacctacctcaagttttagacatagcggttgtattacaaaagacagcatatagggtcctctccttaaggagtcacccttgactcaggtgtgctccctgaatagagttggatgcccagggtggcacatggattacaggctttgcaccatagaagcttcatctaccagtaagcccagtccagggggtgctgtgagctctgaacaatcaaatgagctcctcctctctccttggggtagggcctagacgagctctcattgcctcccttcggggactggaattagtagccaaaatgattctccagcatttaaaagaaagcttttgaccccaaattttaggaggaagaaagacaattatataaaaccatgacaactactgctacccctaccatagtttagcagacacccataatgtgccaagcactctgctggcctttatcacgttgtgtatctcattagacgtcatttagtgtgatccctataattacccagtgacatggctgttatgacctcacttttacagaaaaggaaacaaatactctgagaactgaggatacttacctgaggttgaaagccacaaaattgaattctaactcaggctatccaattcttgcaatattgcctcttggcagttgttgtactggaatcaaatatttagtgtgcaggatcctagagacctatgcctgctcattcattttttcatttattccacagttacttttaagctctggcttaaaagtcaggacacaccctcttctaggtgttttagagttgcagtgatcagaacaaagacccctgcccttaagaagatttctattttgtgtcctaaaatctttaaaattcagtattgctcagccaagacaactaacattatttttttaattgaccacaatagaatttgtgttgaaagaataaacaatacttttctccttataaaaatccttttcttctttctgttyctttatgttgtggtttctgagcccattttagagtatctctgtgttggagttattatttttctgtcttgacttttttttttttttttttttttttttttttgagacggagttttgctcttgttgcccaggctrgagtgcaatggtgcgatctccactcaccacaacctccacctcctggattcaagtggttctcctgtctcagccacatgagtagctgggattatagatgcctgccactacgcttggctaatttttggtatttttagtagagatggagtttcaccatgttggccaggctggtctcaaactcctgacttcaggtgatccacctgccttggcatcccaaagtgctgggattacaggtgcgagccaccgcgcctggccttctctgccttgatgtttaagttctggctctgctgttaagactttttaattgttcacggggaacaggaaaccaccaatgagtactgtatatgaaattgagcaccagggcaaagaggaaggtgctgccgtcaaaagacagcgcaaggatattcagaggaagaagagaaggaggaggtggatgagttgggaattgaaaactggcaaaagtagagtgaagttgtactaaagagggatgaggattcatttgcgcccatgagggaatagttaatggaagatgagaaagcactaagatagacatcaaagttgaagggatttgcaaacaccaggagaatgcttgtaagagaaaaaaaaaaaacaaaaaaaaaacactctgtgaaaatgaaagtatcttgagaattgaaaagaggttaaagaaaactgactgtgttttcaaaaacatgtaaattaaatgacaaacgaagaaactgtgacacccaagcagttcaaggaggcatttaagggacactgtgatccaggaaacgtccctgggaacttcagaaatggcaaagtagatggaaaattaacygaaaattgagaaacamtaaatgggttatggtggcatttgtgaaacagtaagagaattaaagtctaagggggaaatagtraataataaatatgtctagagaacatctcaaataattagattttggaagttaaaggagacttatgactataagacgaaagagataaaatagaaatctggaggaatgagatattttaagtcatagttaaagaagcttatgcagcccattatggttggctgttcacacaaggacagagggactctggaaatgagtatactaaatggcaaggggaagcatggctttaaaaagcattgcatttgtagtagggtgttagaaaatatgacagggtggaaaaagagtgaaaactgcatggaaaatttgcatcaatgttaactactatttattaatagctgtataccaggcactgtgctaggcattttatgcgaactatgaagttaggttaaaccatatgaaactgtcatggctagtctgtatggtttaacttaatccatttttgcaaaaaaaaaaaaaaaaaaaaaggaaatggaggctcagtagattttaaatacgctgcccaaggtgccaggtactgtctcactgtaaagcctattctctttcctcgatgtcatgaaacctcaacaacatagaagcagcaagttattcttttattcattctgcacatgttcagmaccagctctgtggcgcacaccctgtttagcactagaaatataatactaagcaaggcagatgaggtccctgcttccatgattacagtctaccagttaaaaacaaaagcaaaagcacaaagagagtctagaacagctgttcattagaaatataatgcaagtcacatgtaacttaaattttctggtagcccattaaaaaagtgaagagaagcagataaaattaattttaataatatattttatttaacccaacwtgcctaaactactccaacatgaaatcaacctaaaattatttatgagaccttttactcttttgaaaaatacgaagtcttcaaaattctgtgtgtatttttacatggatggcacatttcaattcagactaaccacatttcaaatgctcaatagctacacgtggttggtggctggctatctaacgtgatagcaggcctagtgagaattggacaattctggccccgtttatattcaatcataatataggaaatataggaaatattgtctacctatttttcaatgttatctctgatcaccatgcatcaccattcatagagcacaaaacacaaggggaagaggaatgtttatttaacctggacttcagcttcatacacttaatactgtaaataccagaggaaatgtgtatatatatgtacgtattttatgtatttttttatatatataaaatatgtaaatatatatgtatttagtgttgtgactgtcactggcaataaaaaacaacttagcactttaccaccagtggatgacaacacagaagtcgtcttggcaaatcactagagtcttccccttctctatttgccagcatgcttctgtgtacttattgctcctgatggagatattgaagctgtaatttgaggcttagaagcagtcagaatttctgacattttatctgaccactaaagctttatgatcaattttgtagagataagcaaaacaatgacaagattttactgtttaatacaagtgcccagcaggtgttaatgggaactgatcaatgtggtgtaaaatggtatttccctaggtaaagaactctgctctggagcaagtttaaatgggaagaaagcccatggaaatatggattgtccttcctagaaattgggtgggggaattgaaggtaataggtacttgctccctgccaacttcataatgaaattactgttcagcagaaatttctgttagaggtttttttttcccccctcccaagggactgaagacttttaatagaaaaagacaatattaacattgagtatatggagtcattcacccagaatattgaatcttagaggaacacagaaaaatctgaagcatgaggatttctgcatagttattttcatataatctgaagaacagtgtttgcgtctcagtaatcactctgctaattccatctgattttactaccaaatggaagaaaagggaacaagtggagaacatgkagatgggaaattaaagaaggagattttaagtaaatccaaagaaaggtgctcaactgcgtatgctaccttcttgattaaaacaatcactgttttggctgggcatggtggctcacgcctgtaatcccagcactttgggaggccaaggcaggtggatcatttgatgtcaggagttcaaaccagcctggccaacatggtgcaaccctgtctctactaaaaatataagaattagccgggagtgrtggcaggtacctgtaatcccagctactagtgaggctgaagcaggataattgcttgaacctgggaggtgrasgttgcagtgagctgagattacaccactgcactccatcctgggtggcagagtgagaccctgtttccaaaaaaaaaaaaagttgctgtgacattcagttcatgttacgcaaccttgtgaatggctctccccaggagcaagtgtctttatcraaaccaaaacatttgttccctgatccagcatttccaaacagataacaaactggatatttccaaatttcttgataatttactaaatttttcagttttcccacatttggggcgctaggtagactcaacctgaactacattcaccccaaagtgttggataattgaaacctggcttaagatctcattgtactcaataagaaacacctcagtgagttggccaccctaattatcaacttagggcagcaggtacagagtgactggtaacttattttcgctagctgaggtaaaggccattggtggtctttgtcggtagtttttgtactgaaattccattgcagttgcctgcctatctgtccaatctcttcattccacctgttgctttctttgaccgtcgtctctattccttgcttgsgttactacaaagcctcatctgtttgcccatctgcctcttacaaacttgcatttcaagcctccattccaaataaacacargatgaagtctaaactcagtctatatagtacttgcttatctgactcctgcgtctgtctctagcgtcctctcccaagttactttcccacttgcccccaacttattgtgaactgacggcagctcattgaacacatcatgatgtttcagggttttctgccttggactttgcattttctccatgtgcatgagcaagagctgctcaacttttccttcctcttccttctcagcacaacccaaatccctttaactttgtttcctttttccagtcatggaatcaccatagaattagccactgcttctcttatgctttccaacaacttagtccatatctctatttttacacttattgttcttcgttatagttattttgtgtgtccctctccccaaccttgaaaaattaagtatttttggtcatttttgtatcattttcatggcatagttctggtacagggtgtgatacataggagatgctcaaacatgcctaatggatggaagaatggatgaacgtattaatgaatgtattgacrgatagatggatggatggatggattaatggattgatgaatgtattgatagatggatgaatggacaggtaaatgtattgatggattgatggatagatgaatgactgcattgacagatgtttggaagggtagatatatagatggatgaatgtatggatgggtggatttccctttggtgatgatctgtcaacatacttgccaaacattaactgagcccccacagtatgccagacaatgtgacggggctaaaaataaccctgggaaacggaaccaaaatgtcagcttaaaaaataaaaacagcttaacttaggctcaattagttactttgaagtcctgctaataatgaggaatttgactccagttctccactaaacagtccatgcaaatatcttctttagagtctcaataagaggtgtgaggtggagcacacctagctgtgtgtatctggaccatgttcatttagttcatcaaactccagccaggaaacatcaaaggggagaaggaagagagaaaaaaaagtttcaattgtctagataatgaatggtttttaagccgtgaacaaaaatgttcaagtcccctcaagtgcagagaagcattttcacttctgcccctattggctgcaaatctgagtatatcactcctctacttaaaatctttcctggctcaccatgaccttctgaacaaatccaaacccttcagtgtgtccattatgatctggcttcagggatcctctgcagactcatcccactgcacataacataaccatctgccttactaagccgtttcctacttcctctagcgtgtgttactacctttgctgactctttacttaagatgatgcctctgcccagaatgctttctcctgcctcaaccccttcacccattaagattccctgggaagccctccccagattccccaggttgagttagggacccttttgtctgtgttgtctcaccttcttacatttactctccatcagtgaataagtggcattataggtactgtcattgtttatgtgtctatgccattgaattataagaatgtgggtaagaaagaagacaaacactgtgttttttatttctgtatctataagacttactataagccctgacctatataccaggcatacagtaaatatgctttctttgaccgtcgtctctataataaatagagtaattagttgttaaatcaagaaaatatccttccggcaggtgtggtggctcatgcctgtaatcccagcactttgggagccagaggcaggcggatcacctgaggtcaggagttcgggaccagcctggtcaacatggcaaaaccctgtatctactaaaaatacaaaaattagctgggcatagtggtgggcacctgtaaccctagctacttggaaggctgaggcaggagaatcatttgaacctgggaggcggaggttgcagtgagccaagattgtgccaatgcactacagcctgggctacagagtgagactccgtctyaaaaaaaataacaaaaataaaaacaaaaaacaaaaaacctttctaggaagtgataagagataccccaaataaaccagatagaatagtgattatcctttgttccttctagaatagcagtgttttagttttctgtttgttaaagtatttgattgcagagaacttgaagaatacaaagatacacacacaaaaaaatgaaaaatacccataacccttttagacatagacaagccctgtttttatcctcttttctgcttctttaacattaaatagtaagcattttctctgcatcattaatttgtcttcaaaaacatgattttcaatgacccgaatggtctgttgaataaatacrcaatatttgctcttttccttttccccaatttcttcactttgtccttggaaaccagattctcccccacacaacacccccatcagtcgcttctgcaccatgctggtccagggatgtacatgtgacccattaggccagtgtctcttyttaaaatttcttgtagcctagttctcttcttcttcttctttttttttttttttttttcactttttagcatctctggatgttaatggaatatgaagcaagtgacacagtatctttctggggaagtctttgaatgcttcaatccaccatattggatgtatcttgtgtctgctgagtggccaccaccatgttgtctcagatgtctttaacgacatcacatttttctcaagctgcaaggagagcggatcccttggggaacctctcacccgaaatctgggagatgaagtctgccttggctctctgagttcagcctgagtacaggccaaggtggctttgaggagtgatgagggtataaatgttgtaaggcagatagatgttacctgcaatgaaaacacctagaccaaaaattaagtttatacatgttatataaggtagattctaggagtcatcgttgatgcctctttctcccttcccctcatctaatctttcactaaatacctcctaaatatctctccactcggtcttgtttgctgttgctttttctcttcctccttctcttcttctttggccacaaccagagtcaaagccaccattatctttgacctggtttgtaagaatagcataagtagtccctctgtacccgctctggttcccctccaatctattctctacacagccttcaattgacatgatctattacctctttgatgtcaccctcgcttctatgtcttcccatagttttttttgtttgtttgtttttctgagacagggtttcacacttgttgcccaggctggagtgcaatggcacgatctcggctcaccgtgacttctgcttcccgggttcaagcaattctcctgcctcagccttctgagtagctgggaatacaggtttgcaccaccatgcccagctaatttttttgtatttttagtagagacggggtttctccatgttggtcaggctggtctcgaactcctgacttcaggtgattcccctacctcagcctcccaaagtgctgggattacaggtgtgagccaccrtgcctgcaccttcccacggttttaagacagacatttaacatggtctctaaaatcctgcactttctgttcctattcatcttctcagcctcacctgatctcacattttcctgtctttctctgcttcagcctctctggtctgcattcagttcctggtatgcacaccacagagtctttgcacatgttgcctcttttgcctgtttgtgtcttttcttgcctagttaatgccaattgagccttcaggtcaagctgcacttcctcagccttgcctcacccctatttcactttcttatagcatactctcccgtcccttgtatcatttgtcataaatctgtgtttaatcaattcatgwctatcctcccccttagactctaaacttcttgagggtgggaatcatgttcattttcttatttaccctgaaccaactagctgagtcctgacatatagcaaatgcttcatatatattagttgaataaataatgaataatggaatgtcattttttcaacattgaatgccatgtggtttatgagcaagcagcttccttcagggaagtttgttagagtataatagaatgtgttttcagatcttcctgtaagaagatcatttgaatataggtctatgaatctggcaggacaaaaagcttacattccacgtgttaattacagtcaattactaaagcatggtcaactagcaatggttgcatggttattaatacttctgcagagaggcttcttgtgatgaatatagcattgtaagtttataatttttcagtattccattaatggtggcatccacttatttgttcgattgctctaattctttcctaaaaatttgtctttctstcttcccctttctagatttatggtcaatgttacatgggatggcaaagacttatccttcactgaggaaggctaccaggtgcaccccaggctggtggtgattgtgctgaacaaagaccgggaatgggaaaaggtgagcatccttctgtgtgctgaatgcaggggagggaagaaagcatgggcaataaaggggctcacagtgcttctttctcccacgcatttcctgttgagctgctctagatcccatctcacagccaagagcacgtctttcttgcaacaaggcagactaaatctgtaaggtgcaattggaatgctttctctgggtgaactgtggtaattgtgtggtgcgctgtatgtctgttctcaaatcccagtaggaaaggtctgaactaaggataatttaaagacagtgaagtctgggttgcagcattacactaataagtgttgactatrtagcaatgatcatagaagtttgcctaaacttcctaattgtgtaccatagtcattgccatatgaacgaaccctctgtattttcatgtactcagtcttttgctttaaataaactaattttaaaaacttaaatgtatcacttctgtaaatcatgagttagagagggaggttatttttcttataaagcatattttcaactacatgtatattagctattgaaaatacaaaaaatcgtttgcaaagaaaaaaatcatcatcttatgtaccatacatgtcatgacctgggtcagagaggagagatgtcacagggaatttacagatgatctcatacatacaatgacaatatctggttcagttgccctccctcctcctccataattaaatgcttaagttagtcgctacaatttcgtataaagagtagaataaaagggatcagaaagcctttgttgttacgttgttatcttatttttttgttatgttttttgacaagcaatgcatgacctctgaactactttagcatcttgaaatttatcttcacttagtacatcaaatggaggcctgagtgaccctagagggaaggaagatataggatgtgctgtgggagacataatgtaattgactgaaatcagggggaaatactatacaaacagaagcattgactctggggagacaatgacagattcctagaaaagaacagtgaggaggaagcttaggaaagttttgcatcctacacccagcaactataaaatgcacagcctttcgagtgcacatgggaaatccaccaaagtagactacattctggagcataaaacaaaagtctcaatgtgtttagaagaattgaaataatggagggtgcattctttgatcataacagcattaaaataaaaattagtaacaaaaatatatctrgaaaatctccaaatatttggaaatggcaacacacttctaaacctataggtcaaagaagaaatcagaaagacattagaaaatactttagtcagaatgataatgaaaacacaaaatatcaaaatttgaggaataagattgaaggcacactaagaaattcatagctttaactgcttataataaaaaaggaaagtgtgaattcagtgtcaatgatttaagcttataaatttagaagttagaaaagagcaaagtgaacaaatgaagtagaagaaaaaaatcataaatacacaagtaaaaatcaacaaggtggaacacaagccatagaaaaaaatcaacaaagccaaaagctagttctttgaaatgactaataaaattcacagtcgctagcaataatgatcacacaaaagaaagaaaacacaaataagccaatattaaaaatgcaagagggactatcacttacagacactacagatcctacaggcattaaaagataaaaagaatattatgaaaaatttatgacaacaaattcaacgatatagataaaatgggcaaattctgaagaaacacaattttctacaactgagatgtaggtattgacgatctgaatagctcatatttgctgaaaaactgaaaatatacctaaaaactttcccattttaaaaagacaaaaragaaactcctggcctagatggcttcgtctatctataacaaacatttaaaagaaataacagcactctatacaaagtttttcaatatgttactaatcataatgtaataatatattttaaaaaggataatacatcatggataagtgggggctatctgaggaatgcaagattagtttaacatttaaaaattaaattaatttaccacattaacagagtaaagggggaaatatggtcatttcaatagatgcggaaaaagcatttgacaaaattcaatatccagttatgataaagatggtaaattcctcartctgataaagggtatctatgaaaaacctataatatatatatcgatttatatatattataygcacatacgcatatcatgagatgctttatttgacaatttttaagtttttctgtcttattctaagttagactacrgtgcataaaatatatatattaaataagcttatatcttatttaatgatgaaataatgaaaatagatccacataggcacattcaaatgatttttgatcaatgattatgacaacagggaaaaggaaaatctttttaataaatggtattggataaacaggcaatctacatggaaaaaaaaaaccttgacccattgctcacattatgcatgcacacataattacctgaaatagattacaggcttaaatgtgaaagataaaactatctagaagaaaatgtaggagaatatttttgtgatctgtgagcctcagatttcttaaaccaaatatgaaaaaccattaagcagtaaataaactgtacttcatcaaaattaaaaacttttgctcatctaaagacactgttagccactgtgcccagccctcttttttattttctaacacttgtaattccaacactttgggaggccaaggcaggtggaccacctgaggtcaggagttcgagaccagcctgaccaatatggtgaaaccccgtctctactaaaaatacaaaaattagctgggcatggtggtgtgcacctgtagtcccagctgcttgggaggctgaggcacaagaatcacttgaatccgggaggtggaggttccggtgagccaagattgagctactgcactccagcctgggcgagagaacgagactccacctcagcccccctgagtagctgggattacaggcatgtgccaccacagaggctaattttttatatttttggtagagatagttgcaccatgttggccaggctggtctcagactcttgacctcaagtgatccacccgcctcagcctcccaaaktgctgagatcacaggcgtgagccacgcgcctggccaaaaactgtgtgtgtgttttttttgtttgttttttaataaacgtacacatacacacacaaatcttatccagcaattttactcctagttatttatcccaaagaaagataaacatatatccaaaaagtaatacttgtacaagaatgttcattgcaactttattcattatagcaaaacatcagaaataattcaatgtccatcaacaaggaaatgaatgaacaaattatggtatattaataaaacagaatggcctagtaatatgtacaacaacatggatgaattgaaaaacattatatggaatcaaagaaagacacgaaagattatattacgtgaagacatgaaagattatattgtgtgattccatttacataaagttcaagggaggcaaacgttccctatggggttagatatcagaatagtggttgcttctgtgggtgagtgcagttgacaggacaggggcacagggaattttctggagtgatggcagttatttcctatcttgaacatttgtcaaaaggcatcaaattatgacacaagatccattcattttgttgtatgtcattgtgcttagtttaaaaaaaaacctaaatccgggccgggcttggtggctcatgcctgtaatcctagcactttgggaggccaaggcagtcagattgcctgagctcaggagttcaagaccaacctgggcaacatgatgaaatctygtctctactgaaatacaaaaaattagcccggcatggtggtggtgcctgtaatcccagctactcaggaggctgaggcaggagaatcacttgaacctgggaggcgagggttgcagtgagctgagatcgcaccactgcacttcaacctgggtgacagagcaaggttttgtctcaaaacaaaacaacaaaaccttaaatccttcagatcgggatacccagcacaattaactaacagttttcactgagcwttcatatttaaccccctgacatgaataccaattataataacaatatccattgcttattgatcacctcttgtattgatccttcagttgatccaccggagccctgacttcatggttcgtctattcatttttttattcaacaaatagttattaagtgcctactgtgtaccaggccctatccttgatgcttggagtccatcataaacaagagaaaaaatattttctgtactcaagaaacttagatcttagtgtgtatatggagatggagtcggctgggattctatgggcttctgtcatgcttaaggaaagtgttagcatctagttaactgtccttggttttaacctcctttcttccctcttatacaccctgtagcccaccatgcaagtgatttgcaactccatgaatgtatatactgggttccttcatgcatttgggactttgaatatgcttttgttgttgttgttgcctataatattttcttatatcattactttctcttatccatctttcaaatcctgattttttttcctcttacacatgtaaagccaaaatgcaattcatgttttttttctaatcatccataggaggtagagagttggagcctttctgccttatgttgttgcattttggggttttcaaccttttgatgttacacaatctgcgattcacttttggagccaccaaatcattccctttggttggttttaaccagtcctggagcaggcttgactcacacctgtgaattttctgtgctaccttagaatctgactcatcttccagggagctggtacacaaggaggccactgcagtgcaggtgacagctgcccttgatacactccatttccagatacagaagatgccttttaatattttgtgggcctttcttcaaattcctgttgaaacatagcaatttcccataaaaggcagctttgggaattgctgctgagttgagcttagaatgcacaaatactgcctgtagttgctctatcctcttggcactcaggggatctagtgcttcagaaataactccgtgtgcttctgtctctaagaaagagaaagccagtggagcaggtaaataccagtcgtgttacccttaaagctgcccccccagcactacacgctggtacagcaggtcagcagaggggaaagactgctgaggagggagctgttattctgggactcggaggcgatttcttttcatctccgaggtcagccagtggcgtcactgaaagcagcagcatgtaatgagggtgtctgggaaaacacgacaagcccttagaggggcacttgcttttttccaggcctttgtaggtggctggtgtggattatacagacgccaaacaccaggcctgcctgtatactgcagacacagaactcagaatggagcagactttctctcacaaatcgggacttccatgccttttctctctcccttgttcttcagtgattttggtctgccttagagtttgatgagtccaaggcttcccagagatgctcaaaaacaaaaccctagatgcctcaacctcagcctcagaagaccctacagcctcaaattcctaggtgtaaggggtcttcctgccaattagcagtctaggctagtacaaccaatgccacgtgtatgccagctctgtggccagcagttcattaggtaccagggatgctacaaggatgtgtaggaaactatgtgtcttctcaagtagctcataatagagaattaagccaaccctggaacaaatggctataagtgctacataggcggagagaagggtgaacttgggccagtcaagaaattctctagccgggcacggtggctcacacctgtaatcccagcactttgggaggccgaggtgggtggatcacgaggtcaggagatggagaccatcctggctaacatgatgaaaccccgtctctactaaaaatacaaaaaaaaaattaggtgcctgtagtcccagctactctgaaggctgaggcaggagaatggcgtgaacccaggaggcggagcttgcagtgaacccagatcacaccactgcactccagcctgggccacagagtgagactccatctcaaaaaaaaaaaaaaaaagaaattctctaagtgagaatttctcacttagagaaattctttgtaaagctagaggtattggagttgagccttgagtaataaattggattgctctaggctgaactacttattctacctgaaaaaaaatgctttgagaataattctggttaccattttagggttatagtagctttgtttattttattatttatttatttatttcaagacagaatctcacactgtcacccaggctggagtacagtggcacgatctgggctcactgcaacctctgcctcccaggttcaagcaattctcctgtctcagcctcccgaatagctggcattacagacacgtgcagccactcctggctaacttttgtgtttttagtagagatgaagtttcaccatgttggccaggctggtcttgaacccctgacctcaggtgatccaccggcttcagcttcccaatgtgctgggattacaggcatgagccactgcgcctggccttacaatagctttaaaatgaaaatatatgtgtgtttatgcatacacctatatacacatacaggctagcttttaaaaatttgtttaagttaacaaataaaaattgtagatatttttagtgcacatgacgttttgatatatttgtacactgtggaaaagctaaactgaactaattagtgtatcctagacaaactttaaaagggatatatattgagaaagagagagataaataaagatttttgaagttttgactttaaatgtaaataggacaaaacacataaatattaaagtaaaacaagccttttattccccagagaagatccaattaaagatgataccgatgttccagaagacattagggagacccttccttgtgtcttcctgaaggaaatgtcccattctcgctctgatgggtctgtttttctttttgttttcaccactctgtttacatttggtttcaggtgcattttgcacagaaatacaaccagatctctccctccagcccagatctgtctcacggcctccagacttgcctacagcaccacacgtggctgacccacagacacccaatatcaccttgtccaaagtcaaactcatcatcttcctcccacggatatgtttattcgcccgtaccccaacacagaaagctttcttcttatccccggagtgtcccccaagccctagtattcagctgtcacctgctcctgatgttcctgccccttcaaacatttgtcctctttgctaaggacaccctttccattgattctatatctgggtagctcaaagtgggtctgcccttttccacttcattyctgcagacctgtatactaattcgtaagagtgttaacagcttgctttggcattgtttgcttgcctattcatcttcgcttagactagaatccccaagaggggaaggtctgttcctttcatctgtgttttttcagcttcaccacaagggtttgggcctagtgcacaaatggacccctctatgatctgttggtatcgacgacttcagctgccatttattaagagctactctgtaccaataactatgatgacaattttacattcattatctcatttagtcatctgagtaggtatttgtttaatagcacttctaaagtaggtattcttctccctgcttcagagatggaarttctggttcagagaaccagagtttctctctggttagtgaccagcttaagatctcccagctggtgtgtgatggaagaaggatgtaagtggaggtccgcctgcccccgaaggctgtgttcaccaccactacatcatgtggaacaactggcagcgggaaggaggtattctagaggagaaatttagggagttcctcctcctacccttagaaaggtgtctgcttcctttcctctcactggatgcaattgattctacctgaamccagctaattagaactcagggtataggcatttattgcatctcccagaccttgtaatttttaacttttttttagagacatggtctcactctgttaccaggctggagtgcaggcacaatcatatcccactacagcctcaaattcctgggcttaaggggtcttcctgcctcaacctcccaagtagctggggacacaagtgcacaccaccttgcctggctaatttttatttcttttgcagacacaagttctcgatatgctgcccaggctggtctcaatctcctaacctcaaacagtcctcccatcttgacctcccagagtgctggaattacaggcatgaggcaccgcacccggccccttctattttttggtctacagtagtttcatcttccaatttgtctcattaagggaggggatgcaccccatatgttatgtcttgtgtgaaataaagtagattccagttataggattcctagtacagatatgataaaggagatcttacaaaagctatgattgctctcttgagtctgtggttctgactgtggtgtatcattgtgctatcaggtctagtgaggcatagtgatgcgtggggtgcaattattacatgatgtgatttgtaattatagaatgctatagctccctcctatctaaattattgtattttagctccctctccttgccatctctttcccatcactactaccacatttagcctagyagggcccagtgagtttcaagatctcaagaaaacatgcaggttgttagtgtcagtttgcttctgtgtgtgtttgtgtgtgtgtgtgtgtgttgtgtgtgtgtatgagatatcagtagtcttcaaaaaagttcatccagccagaggatggaagtatttatgcaaacattgttcttggcttctccgcacacatcccagtgaagattgtgtaaaagaaatcatggagaaaaattgcaattgtgaggacaccagtaaatgacaattgatagaacgattatgtggattgctaaaattgaagaacattgtgacacattctaccggcagggagaaacatattacaactctctttgcttagaaagacaatagcagcccattggtaaagccatgaattctggccacggctagcactkagagctcatggtgtgttttcagtctctcctttaccattatatctctggtattcaatagcagaggctcaataaggatttggagaatgaatggaaagactcttttccccattaacttccccaaatgaggagcatcttttagtatgggctttttatacgtgtagttccttgggctacctagattagaatcaccttgggaaagatgtaaaggccttagccctgcctcaagtctatggaatcagcatttctgattctgaatctgcatgttttataagcctccctagtgattctcatgcccattaaagatgtaaagctactgctttagggcatagacttactctgtgtaaccctgaaatggtkttatttaggtcatcctgttatcaagattcttgcttcttagcttttgtgcttctttcttcctttggaatatactgctcagtagcaatgcttaggagaaactacagaggaaaaggaaagaaggaaattggaatcttgttgcatcttgaataacttctggcaaatgagagaataacaaggcaaataaaacgctgtttatagatgtagttcagtgcctgttacctagatttttctcaatagatattgttattaaatgatttttttgttaaaaatttgtcccatcaacagagataatagaacttagggtattatgtaatccatatttattcacacacttatttgtcaaagaaaatttcctgagcactcactatgtgcaagtcatatctgagggttgcaaggcagataagacatctggttttcaagagacttagagtctaacggggcactaagagatgctcgtaactgcaggagagcatgtgaggtgccataaagatgttttggcaactccaggtgtttagagaagagagatgttatagggaggcagaagaatcaagggcgtttgtatggaggatttctcgtttgaacaaggtctcacgagaataagcaagatttggatttctgaatatgtgtgaggaggccattccatgcagtgggaaaaagtcaggttcagaggcaagagtgcccaaggcccatctggagaagagttcaatgtgattggaacatagctgtgtggtatgcagaattcttagaatggtctccagtgacacttggccttttctaagcctctcccctgggagtatgtgacatgatgagctgtcactccttggttttattaggccacatggcagaaaggacttctcagttgactttgarttactcaacaaggagattattggggcgagcctcacccaatcacatgacccctttaaaagtagaaagttttgtgcagctattaggttggggcaaaagtaatcgtgggttttgccatttaaaaaaaacagcgaaaactgcaattagtttcacacaagcctratagttgcagaaagaaatttggagtgtgagaatgcttagtctgacttctacatttgaggatcgagggggctccatgataaggaatgcaggggcctctaggcactgtcagtccctagctgacctcagacatataaccccaaggaggtgagcttgcccaacaatctgagtgagcttggaagtggattcttccaagatcctccagatatgagcccagcctgggtagtgccatgattttggccttgtgacaccctgagcaaaaacccagctgagcccgctgggacttctgacctgcagaactgtgagatcataaacaggtgttgtttcaaatgggtaagtttgaggtaatttgctacacaacaacagactagtacaaatcttttgaaggaaactttatgggggtaaaggactatgctagaatttaaatgataggttatggcacttaattcagtaatcttcagggcactattgaagagcttgagatgagagaacaacataaaaaataatcatcactcacatttgtttaacatttattaggttttaagcatacatttaatcctcatatcaggactgtaatacagatacaactattaccctcttttgcaaatggagggaatgaggctcagagaaattcaataacttgctcagagtcacagagctagtaaatttcaaagccaggatttggaacccaattgtctgcactcttagacatgagctacactgcttctttaaaaggaaaatggtgattgtcaagaatctgggaaattttttaagggcctatttacgtggcttgggttagagggaagagaggtatggggaggaatagtggccgcggaatctgagagaaatttcagaaacagaactgaaagccatggcattggctgcactgattctctggcagatgcatgacagaggggaattagatagattaaaaaaatttttttttaggtgtaagtctctaattaggtattttcagattaggtatttctggaagagctttgccatgcctgtaaatgacattgttcatctctcatccttccctgtcatcctccttcctttcttctcttcttttctttcttctcccaaatccatatttaaagtcaagttcctttttataaaatgggtttggtaatatcaaccttagcagagtctgtgtggaatttaatttgtttccttatataatgatcgttaagtttctcaaatgatgtgagccatagagagggaaaattgagccattataaaacatttaaaattatcatctgtgcatcaggatttagcaaaggtgaatataaataaaataaaataatcatctgacttccctagagtcacgcatagtgactattttaaatactcacacagtacaatatgttaggtcacagtgaggaaaatatagtagatctctagcaaattaacacattcaactgaaataagtgatgccatctcccaaagcatgtgtstgtgcaactgtgtgtgcgtgtgtgtgtgtgtgtgtgtgtgtcttgcactggttcttttgttgttgctgttgttgttgttgttgttgcagttgtaacatcaacccaactccaaaaagaacagcagttgaacaggcgctctcctgcagagcaacattctgctgaaagtttttcagatttcagaacttaaaacaaaaaaaaatgcagttcatagaaaagacatctctatgggaacatacgttgatagggatactaatgataaagatgattgatgatgatggtgatgacggtgatgttcttgatggatgggatgatcatgagggcagcagctaccattagttgagttcccactgtgtgtcagacaccatgcagagtgttttcaatggataatcttgtttcagtctcccaacattctctgcattttctcatatctaaaagggaggccataatagtactgacctcctaggttgttaggataattaaacaaggtgatatatcaggtgcttagaacactgacacatagatgccagttctaagtataattatttctatcctcatgttataggagagaaattggaagcaacatgggttgaatgacttgtccaaggccatacagtggtaaaggcaggacttgagcccaagcagtattttaatagagccagagtcaaacattcggtcatatggaacattcttctccatcccagtcgcaaacccaaattgttaaggatctctctgagggtgatgggagcatgattaagctgacaggtggtataaatgtaagacaaaagctgcacccttgctagttttccattgccatcaattatgaaaatgagcaaatagattatttaaatgatctcagatgagtaaattattcaaagagcctctcagtcagaagtatttctagaaactcctgaatagaccaatgaaaaccattttggttttctgacagggtcatctgctcatctgtgttgtagagaaacgcaaagccctgaggaagcggggaaagcaggagagagagagttgggggagagggaggcagggagagggctagggagggatagcaggacagggaggggggatggggggagagggaaagagtaagggggagagtgagagcgggagggggagaaaagaggagagagggagaagagagggagaggcagagaggtgggagagggagtggaagagatagagagggcctgaagagggggaagagagaggggaagaaggggagagagaggggggagagggagagaggaagacggaactggggagaggaagggggagagagaagggggaagagggagacgagagagagagaacaaagwaacagtggactttaaggcaaattttcttttctaattatattcccttgaatgctgattcctttcagaacttagagtgccaccagggtctctgggtgggtagggggcttatgaggtaagacccaccttcaactggagatggcaaagcttcatctgattggtatgttatgttgaggttcaaagtgagcttccatttggggaaaaataaaatatttctaaaataagtttgaaagcaagtagaggaaggrgattgactgtagtagttgtctgaatatgacgtaaataaatagtaagcatttgttgagcacctattctataccaaaccttacagtatggccttctgtacttattatttcactttagccrcataataaccctgtgaagtgagtctctgatttcatatttgagtcatgcaaacttagagatgttctatgatttttaaaaaattaatagctgagaaaggattcaaatttaggtcttgtgagtctccaagtttagtgcttgttccagtactttgcacagttcctaggatgaatgatggaaattttcatataggwtgtggagattcacagggatggtatctgccttggaagttgagtggaagttgggggtatgacaatacctaggcttttgtgtggacttaactcgtattctttaggacaaagtaactatacactatgactgtctctgatgggattgaaccattttcccatccatttatccacccatgcacccagctagtcatccaaagattaatcatctaataaaccatccatccattcatcagcccatcagaccaaccgtaattcatccagccatatgggcatccattcactcttgaacccacccacttacccactattgatctgtttaccaagcattcactgattactgactcagtgccaggcctgtrgyaggtacaggcgaagcagagatgactaataaaatatccccgggattttagggaatgttggggtgatcagacccaacaccaggctgtgggggctacaaartccggcagagtcaaaggaatgggaaaagacaggttaagagtatataaggtgggtccaggaggccaacgctagtgtatggaggctgcaaaggccctgagctccggaagcccacactatttattggtgatcaaacaaagaagcaggtggtgaggacgtgcggatgtgggggtaaacaggtgaggacatgaggaygtaggggtagaaaggtagcagtgcatcaagcatagctgtgatggtttagcattttctttgacacatatgtaatatgctctgctacctgagataatggagaacatatttacaagcctgggagagtaagaagcaaggagccagcaagtctgtgcacattccagaggccattccagtgcaattccacaagggattttatgccctgagccttggattgtatccaagccacgaggggttttatgccctgggcttagattgtggtgtggcagggcagccttccaccctttggcacagagcttggtgttccaaaggccatgagggggtttagagcctgggcccaggacacgttccaagactcttttacattatgacagagaagctagtcctgcctcagctcttctaccaacagggaacttataatgtagtgggagggacagggaaatgcactgctagttacagcattgtgaaatgagcataaacaggagaggtgcacatggcacactgggacacctactccagcctgggcactggggaggtgaaaaaacttcctgaaagacctaagytaggaccaagtcctaaaggataaagaagagctatccaaagggtgacagtcatcttatccattctagtaactgaaccacaaacattatttttctttatttcacattgcatctgatagcagcagctagatttctcccctaccccacccacaattactggagctcagtggctgctgtctgggcctgcttctcactttctttccattgtctctgttctattatttccccatttgcctgctgatggaacagacaggaatracatctgtccctaagaaaatggacagaacagagagctgctccccccagcaatctgcttctggctacaagtggctctgtcagcctgcctctgtagctacagtttggtttcctcatctgtgccattggcagcagaagcttcccattccactaccctgtttttcttggcattggaacctggtttggaacagggggagaaatagagataaaaagaggttgcatattctcagcattggtctctaagctgtggaggatttaatgtgctttctagactctgaagaacttgtaccttgagataattacccatatgttrtaaaaaaaatatgatgatgattatggcctaggggctatagattcaccactttgattcccccacacacccttttttaagagacgagaggctgcagtgaggagccacctgtagtcccagctacttgtggggactgaggcmagataattgcttgagcccataggtcaaggccacagcgagccatgttcatgccgctgcactccctggagtggctcactgcaggcctctacctcctgggcttgagcaattatccagcctctgcccctcaagtagctgggactacaggtgtgtgccaccacacctgcctaatttttttgtatgttttgtagagacagggttttgctagattgcccaggctggtctcaaattcctgagcccaggcaatctgcctgccttggcctcctgaagtgctgggattacaggcatgagctaccgtgcccagccttgatcctcttttaacagacattcaagatgagtatgatcactcctgccccctccctccagttacatatgaagaaactgaggctctaagatgattgctgatttgcctaaggttacaaagcaagtatatggcaaagtctagattctagctcaggtctgctagactgcaaagtccattttgtttctacagtaccttatggtagagatgggtggcgttcatatatcagtagtgaaggctgtcagtgctttaattataaaaactcatgttgggggtccccccatccctgcacagtggatgtgcccccagcgttggcaagaaggactattacaggtacaagattccctgctgaaccacatgtctgtttctgagctcggctcagagcatcccactgagatgtatgcaaatctgcctcctaatcagtctcttgcatttttgtgcaaaacgaatcagcattcctctgcacatctgaagctgtaaatcagtccccacccctgcagtaaactgttcctttattccttattactccaccgtatggtttgttatctagccattgtcttttgaaaacgtgctttaaaactcatcgaaatcatattcctggagtctatattccttccatttaaattataattctgcaaattagaaagactgagtgggcctgtttgagatgggaagagtagaggctgagccatcttgacttccctggatgtgaagaaagactccgttggaaatgcccatgagaaaaaaatctaaagttggggaaaaacaagagaatcaactcgtattcccttaaagggagttgtagaatgactcatagaaaccaatggcctctcacttaygttgtctttaactttaacattgaaacaaacaatttgaatcggaagaatcctaattcctgttgattcctaccgtgctggcctctatgtggtccagcagattatagctgatggcatatgttttctttccacaattaaagtgtgtttgaagaaactaggacaggcagatctaacataggaaagsagggcaacaattagttttgggtatcagatcctgacatccatgctgtatacagggaaagcagaaacatttacctgcttttaataggtgaagagactaagatttagagacgagacttgttcagccttcttctgcaagaatagtaaacatttcactccacttttttgttttgttttctctaagaccaggaaagattccacagatgtttcttttctgtttgtttgtttgttgttgttgttgttgttgttttttagagatggggggtgtctcactttgtttctcaggctggtctcaaactcctgagctcaagggattctcctgcctcagcctcccaaagtgctgggattacaggcatgagccactgcacccagtctcattccacttttggcattcaggttggtgacttgaatcaatacagcaagatttgggtttctttttttgtttgtttaaatgtatggggtatacaagtgtaattttgttacatgcatagattgtatagtggtgatgtcagggctttttgagtatccctctcacaaataacatacattgtatccattaagtagcttctcttcagcctcttccctcagcctcctccctcacacccacttgcctttctgagtctccattgtctatcattacacattctgcatctaactgtatgcattatttagctcccacttacaagtgagaacatgcagtatttgtccttatttctttttctttcattctttcttttttctaacacctgacacagggtcttgctttgttgcccaggctggagaatagtggtgcaatcatggctcattgcagcctcgaactcttgggctcaagtgatcttcccacctcagccccacaagtagctggaactataggcaagtgccaccatgcctggctagtttttttgtttttattttgttttgtttttgtagagatagggtttcgccatgttactcaggctagtctcaaactcctgagctcaggtgattcccccacccctccacttggcctctctaagtgctgggattaaaagcgtgagccaccacatctgtcctagtatttgtctctctgtgtctgagttgcttcacttatgatcatggcctccagttccatccatgttgctgcaaaagacgtgattggattcttttttatggctaaatagtatttcattgtgtatatataccacattttctttacccgaagatttgagtttcattaccaaaatgacatggaggctttgcattgaggcattgtcatctcactgaaaatggatgaggattcaaaaaatacagatgggacatctgtcaagttatactataaatcagtggggacaaaagctagaaacacagatgtgtctgatcagaagcccaaaatacaaaatcaatgccaagagatgaagtgactagtctacgtagacaaagagagaacagcatcatggtcaggaraagtgggctggcgacttcctcccctgtytcactgagcatggcaccggttaggagctgagctgtttggrgttagagagcgagtttgatcaacatttacgctgttgagtttggccaggggtaacatttgtgagactcysgctaattctggaaatctgtcattctttgtttccaacagcaaaatggagctaatgataatacccaccccttggggttcctgtgaggatattaaagctactatttattaaatgctttttgtgagtcagaactttagatgcatgatctctcttaactcatacaaaatcctgatgatattggcactattattgcccctattttataaatgagaagtctaaggaacagagaacaagttaatttccgctaacctgaaccgtattctgaaccccatttgtctgactccgaagcccatgctttgactactaacttctgctactttcttcaatcaaattctacaaagcaagtgcaattgtgccatgytgtgggagatagagaatttaagtgggaagcgaatggagcttagttttccttgyatcattccaaaaaaaaagtgcctaatagtttttaaactgtgattccatcacaggtcctgagccaaccactttatgtacattaccacattttatgttcactacaaccccaaatggtacatattattttatagatgagaaaaatgaggaccagagaagtgaattgattggaacatggtcacccagccacttcatagctcagaggcatcataaatgatatacatgccaagtatctagcatgaggcctggaacgtagttagaaagatcttaataaacaggaactattatgcatatacaaagtgcaatctagactctagacttctagacttttaaatggcacttttagggttgttttacctttttttttttttttcattttcagtggatttctaaaagtctattgacagtgttctcttttatcaaaggacctgggtccaaagttttagagacaagtgtcttcaaggagtcctttaagtcctgcatatgtatgaatatattgcaatacatacagttaagcaagtcctcatccaggagccagaaaactgtttctggttctttcacatatttgctgtaatttgtgaatgaggcttggtggttgacaggtgaggaagtggtggattgactcaragctgggtggaaggtggtgccaggtgggtgtgacaggaggayaagatgggagcaggaaaattgtgggcgtggcaggaaatctgttgctgtgataaagagatctgggctgtaatagggaaaaaatggaaagtcacgaatgagcagattgattgggagaaaatagaggggtccagagcccagaggccaaaatgacattggaaaagagacatgagaatagtccttaaatttgaaagttacttgagccaggcgtggtggctcatgcctataatcctagcacttagggaggccgaggagggtgaattgcctgagctcaggagttcgagaccaacctgggcaacacagtgaaaccctgtctctactaaaatacaaaaaattagccaggcatggcagtgtgtgcctgtagtttcagctactcaggaggctgaggcaggagaattgcttgaacctgggaagcggaggttgcggtgagccaagatcatgccactgcactccaccttgggcaacagagcgagactccatctctacaaaaaaagaaaaaaaaaaraaaaagaaaaaaagttacttgaaggaacatcagtttaccgctctgaaaaattgtaataatatctctttcacatctatgtgactctgctgtgatggtcaagtgaaatgagaaaataaccagcaacttctagcccataaagagctatattaactctaggacttttgtattattatccacataatgacacgcagctttctggctaggatgtgtcttccagtgtgtctattatctgaaatttctatctttttttttctatttcttttcattttttccccaatacagcttcttagccaagtgaacactagcaagtgtatgcataaggtcacactgtttgacacaaggatccaagaaagcttgggttacatttatagttatgaaattaatggcatgcattaatcgtgcagaacctcaaactagcaaatggaattaaaaataattgccaggcctttggatttattggtagagtgaaaataacaccaagtggcttttggcaggaccgccttctccgtgcacagaattatattaacagatgatattttttctatccaaaatagagagccgtaagtgaaaagcagatctgtctcctcttagagcagggaaaaaaaatccaaatacatttccttagtttcattttggcatacaagccctaggcctggaattttggtaaaaacaatgccttgttcctgcctgttctggagttgtgccagtgtcctccattcagcttacaagaacatgcacattgcaggtgggaaggaaccttgactaaataccttctgtgggccagacatctgactgctggttcacaaacatgagttaatgtcatccttctaagatccctgtatataataaaacacctaatcctggttgagcagggactatgtggcagatagttcaataagtgccttgcagttactactttatttatttccatgagaataatatgatgtgattactcctattatgcccacattacatataaggaaactgatgtccaagaagtaaagttagtcaagttcatatagctggtaagcagaagagctgggaattcaggtccagatgtggctgactccaaaatccacatcattttcagggcctattaccagaagagataattatagttgataattgactgcaggaagatcatagttatggtggtcatgttggtacctctgtgtgctaacttgtctgttttatttatttagagacagagtcttgctctgttgcccaggctggagtgcattggtgtgatttaggctcattgcaacctcttcctctcgggttaaagtgattctcatgcctcagcctcccgagtagctgagattacaggcatgtaccaccacactcagctaatttttgtatttttagtagagacagagttttgccatgttgcccgggctggtctcaaactcctggcctcaagtgatcctcctgccttgccttcaaagtgctgagattgcagatgtgagccaccgctyctggctaacttgttcatttcataggtatttgtgcatctattatgtaagcagccctgggctgggtacgagggccataaaggcaaacagaacacagtcccaccctcaatgagtccactrgggcagacagatgagtgtgcaggtctcacactagctagtgaggtagggaaaggagaggctacctgcccagttttatgggattagaggctgcttcccagaacagctgccctctgtgttgagttctgaaggacacataggagagtgccaggcagagagtgggaaggggttttctgggcagggtgagtagcgtgttgaaacctggcactgagagaaaagctcaatgtactcagaagcctgtgattagttctgtgtgattcatgagttgatgtggggcagggctggaaccaggagttggttgtcaaaatgaggctgtcatgaatgcagagggaagggaaggcctggggaggaggccaggtcacttagaccatggtcaggcattttcacttgattccagctgcagtggggaaccattaaaaggccacaagctggggagtggaagggccagatacacagaggtatttaaagtgacgatttgggctaggcacggtggctcatgcctgtaatcccaccactttgggaggttgaggcaggcagatcacctgaggtcaggagtttgaggccagtgtggctaacatggcaaaaccccatctctactaaaaatacaaaaattacccaggtgtggtagtgcgcacttgtaatcccagctacttgggaggctgaggcataagaatcgctcgaacccgggaggcggaggttgcagtgaactgagatagtgccactgcatccagcgtgggagacagaataagaccctgtctcaaaaaaataaaaaataaagtgatggtttgggctgctgtttggagaatgggatgaagagcaaatctaccagaagcaagaaggccagctaagaagctgagtcataaaccagtgagaggtgaaggcctggatgagggtggtggctgtgagttaggaaagcagtaaaaaatgttcaaatattagaactatcaaggcttggtgattgatttaatatatatgggggtggcagaagagagatgaattaatggatatttccatggttgggatttcaagaactcctatatggcagatgggagagaaactattttttayggtggaagataagaggctgagttcttctctaagcctactgagtttgaggtttctcggaggcagtagagaagaatgggggaaaggcagcagatcaggggctgtcaagagaggtgataactggagactgtggagcagaagaggccgaggcctgagcctggatgttctgggggcaagagggagaggaaagacaagtcagatgtgttcagagaaggagaagcttgcattttggcagagatgaatcagccaacgaggtgggaaacagttgggtaatggtagtgtcctgacagtctagggcagagaactcaagaaagatgtgagtagtcccattgtcaaatgcagaggaggggcttatgtgcagtgcacctgttggatttagtgaaaaccactggaggtcttaggtcagtttgagaggcaaggacagtgcagaagagaatgtrtctagagcccaagggctgggatgcgtgttaggctagaggagagatgcctcctttattactgaaagaggggagaagaaagacatgtgtgcagaggcaggtgagtttgtgggtgatgtgggttgtccatagagtctgaaataagaggcagattcatcagctgggagtggggctggagctggcagctttgcagtcttgtgggcaggtgtgaaggtttgaaatagtttctagggaatgggagagatgcaattaggaaaaaggaaagatttttagccagagagggagtcctaaaatttgaaatgacattaatctatgtggttatatgatattctccacctgtacttgctgctttacaggtgtggaagtggtgggattgactcagagttggggagggtgctgccaggtgggtgtgataggaagacaaagtgggggcaggaaaattgtgggtatgacaagaaatctgttaatgttatggataaagaggtctaagttggaatcgggaagaaatgaaggcatgaacraatagactaattgagagaagatagagaccagggatgacgctggagaggagacataagaatacctgaatgagagctgtggattttctgaattcagagtcatttgagtcaagcagttctaagtgaatttcccccatgggaatgggtggctacagtggactggaggttctaaatttagagtcactcaagtcaagcagttctaagtgaatttcacccataggaatgggtggctacagtggactggaggtggtcagtggagagatggtcaaaaaaactggccttcagttttatccaaatgctctgacaagtatggatgtgtttatgaaatgacatcaattacttgcaaataggacaatttcaaaatatgtaaggagtactaagtcctagccatatgtggatgaaatcaccaatattatccccaggtgttgagtcagagggatttcccaaggccaattgccaatttcaacttaaatgcaaccaaattccaatgtgcacaaagggattgtagcccaatatccaagggcttcttcagtcttgtcccatggtatccctttattcctctttccctctcttctcctttatatatttgtgtttcttcctgtttggacaacttcctagttcacaaacatgtcattaaaactcagcttctaagcttttgtgcatgctgttctctgatcctacacatcccttctttccactctgacttttcaggtcctttgcaaactgcacaactcccctccatygcactccttcatgatttcttccttccctcatcagatctgcctctcacttctgaagccctctgcatttcttgcacctttcaccctttggctgttagcattttctgttttattgtatgattaattcagagggcattgtattttatcttcctcactggtgagtggatcctttacagataaggacttagagcaggggttgacaaaacccctaactgtttatgtaaagggctggctagtaaatattttaggctttgtgggccatactctctctatggcaagcactcaactctgcatttttagtgcaaaggcaagcgttgaggctatgtaaggaaataagcatggctgtgttccaatcaagctttatttagggacactcacattcaaatcttatataattttataattgtgtcaccaaatattcttttcatttttttcaaccatttaaaaatggaaaaggaaaacccattcttagcttgtgggctgtgcagaaacagcttgcccttgggctgtggtatgctgaccccaggtttagggtctattcactgctgtgttaccagtgtgagaacagtttatggcacatagtaggcactccatgaatgaatgagcaagatgaatgcatgtgatctaaccctaaggaactgaaaacctacagaatagttctgtttattggttgtaacacttggagtaattaggaatcctgagattctgcttttggctataatttgtgtgagtttgaaaggttttgatgtgacatagctcataagtatcatagttgaacttggacttgggtcttccaactccaaatgcacggttcttttaaactgctgtgtttgccactatattaataattcagtgggaaaagcaatgctgagaggcttcctgattggtcaccatgattctcatttctcccagtggctccatagggctctcaaattgttgattactgtctgagatggggataattggtttgggtgaaattggattgacggtggtgggttacttaggcttagttttcaaaaayagcaagtcttatccatcccatcccaagggaaccctcctcttcccccagtgccttagaataatcacgtttttaactgggcaaagctgtcgttaagcttattactgttttctcactattaaatcttctgttggctttagtatttcaaatgatcctcttgttggaatactttagagctcagacaagcctggagcaaagtagttttgggccagagatgagcaaagaaaaatgattgtcaaaataccatcttatctaaggaaaattgaaattctcatcagtgtgcatttcatcataacgatgcatttcacccatgcacaacggctttggttagcatcctcataataactagcagggcctcaggcaccaacccctttcatttggaagaaggaaaatgtccatctcaaaaacttaaatttattattttgccccagatacagaagaacaaatgcccatcagagacctgctaccragttccagacatttcacctctcacaacgcaataacttttcacaggcgagggggatgaaatgctgttccactgattgatacctccaggttctgtaaccttattgcaaaactctgcagacacagtcaatgaggttaactttgaatgttcagggctgagatccaaatggaattggctttttacataatgctgagtgaggaaatccatcagcttttgacttgttagatccttcaagtcaggtttgatgcattgaagtctcgtgcttccttagcctgcagtttaattacctggaacttatctccttttataaactgttacacactcagccccacattttaccacttttcaaggttttcatttaaaaaaaaacttgccatagagtaagagaagtcatatctatagtcatgttcagtcataattttcaggctggtaagaatgaattgattatcacaataaataaaaggctttytcagctgtcagcccaggatcacagtctacctctcttagccactttctaactcttattggcaagtttgctgagggaamaararcttcttaatatcattcaggtaaatactccccaaaagagctgtttactctgccagactgcaaatggcatttcatttattttacaattggatgttatgctgatctttgaaatttacccagaaaaagtacattagaaggtcaaacaaaaacctttaccatatttctaaattgtctttatgcaggtattaaaaaataataatagttatcactgttactgtaacaaaggactgtccttaggtcaagttctcatccaatgttatgtgtttaaccttccccagccccaattcctgtttctgtgattgtcctagttaccttcacatctcctcctaaactttttttgcagacctatatgcattctagttttctcctccaagaagcagccccttaagttcaaccaagtttatgtttgggtttttataataacagatrcagatatagaaacagaattgtgttgtgttggccaacaatatctcaaatataacatgatacagaatgaagatgaaatcctcctttctaaggccccttacataatggatggagatgaccacagaggcaagggagaagtccaatcagctgctagagcattaatgacattcctcttggttgaaacccccaaattacctaattgacacatggttcacatttgaacagttgattttctctgcctgatctgctgttctgatcgccttttggatgtccgtgttggtagcagtggaattcaacatcaagcctgcaaagtagagctcagtgcagctctgctgttagaggtattttctgtggtggaattcaaggtcctcagaagagtcaattcacaggcaaatggaagaagtaaaactgtcatgagtaaaagcamactgtaagaccacctctggctgctttctccccacctcctgtgctccacatggaaagaaaatgttgccccttcccaaagtggaagactgtgcatattggggcgagaacctggcttctccaactctcaggacatcactgtgctgcatggtgctaattattaatactgtcttcccaactgatccatgaaatattcccttaagaaaccaaactgctcatgtttgccttaatatttcccaaagcaaataggatggcagccttggaaatatcaggcagtggtaacagctcctgccctgaagtccaagctcagattccaggtcttctcacttgctgtttgatcttgggcaagtcacttaaattccctgtttgccaacatacaaaacgagtctaataatggcgtttttatcagaggattgtgagggtaaaatagaaaatgcccgttggggtgatcacagtacctcaataaatgccaacaattatactcgttaattgtttaataattattattgcagcccatggaagacggactgatacggaacttgcacaatgaaggactcccaagagcaagttcaaaaaattaatccatgattatgaaagagctccttttttatttttgctgatttttcaagtctctggcattatattactccaaggtagaaccaaaagagagaaaacactattaactttttagctaattacaagaacccatcacttttaagagcacacaaagaattamaagtratccaaagaaataggactcctatctttccccagggatctggcaacaaaggaactctggaggactgaagattatacatgaactcctgaagaaaatgatggctctttgttccaaagatttttccgcttttaaatttgagattgaacaagcattgagctcttcccctgttggctgagcctcaagaggagaatggaagcagagatgcgggttgttcatggaaataacaatcaaaacacgtttctatgaattaccagatcagtactgggttctaagacagttgatgctgttatccataaagatactagattatcttgagagcagttattacgagaggaaaaaaaatctacttctccaatgtgagctgtgtaacaattaggcaattctgaaatttcaactgagaggaatttaattaaggctctaatagctgattaaactcatttagatctgctggcaattgccagtggttacataagtaacccaagaagaaagatttccatcttgttcttatgctttatttaatcctgtatgttagtcataggtcttcccctcctggtgctccttaaaatggggtccttagaccacacggagcagaatgactctaggacgctggttgaaaagtcaggatcccacaccttatcccagatctactgattccaacactccagagatacaggagtctgcattcttaatcagcttccaggaaaggttcttattcatgccaaagcttcataatcccaccacctccaatcgttgcatttaaaacagtgcattcagaggaagcaggcactttacctcaatatctgaaaagcagttcttagtttcactctgccggtagccatccaaggctcatggcagtgaagacagagcaggtttgacccacacctgctctttagtaatttctgcatagaaacttgtttgtgcataccacacaggggaaaattgagttccaaagtgacrcttgatttcagcagactggttttctgggatactctttagatcaggtattggtttaaaaaacatcactgaactcaactgcaaagtcctccagatacagcatatgtcaacctaatatcaagccacagcagtggctcagatatctttattgttgtttctggatcaattacatttagatctgcttttggtttcaagcagcaacccaagacccagaattacttatgtgttaacctgtgatcggtttgtttgtgtgtcagatgtgcattcagcggcatggaagtgatgctaatccatgttgctacttatgataaatatggacactaaatcattttaaatttccttcacggccatttatctcatgtcctttggcagactttatatttcaggtggagagaaattggtctcccgtttgctttgtttttcctccttaacatcatcttcctgaagagttaattactcatgttttctccagcttgggagtaaatcactgcttattttctggagtgaaacatactccgaaggtttgcaagctcaatgtgtttgttttaaagcctgtttccccatggttatgaaaccacccaatgagctaactgggtccagccagactagagcacaggcagcctgaactctgcttctgttgttggttttaataaatttcctgtctgatttttagttttgcaatttctattgtcttgtctccaaggagagaagatgagtaaacaggcaacttccctttttaaactctgaattgtaagtaaaaatggatgatatgctacagtcagaattgaattcagttcagcggatacttcttgaactgcattgtgggtgagcactatactatatcgaacatggatcacgtggttgaggaagactggccagccatgacactctacaaaaccataattcgaggcaaactgggccctcattccccacccctacagcccatctcttttctgttgattttacactttgagttcacaccagcctgaccatcatggcctgtgtcatccagatcctgcagccatctcccagcttgtcactctgccttccgaatcttctagctacaaactctatctctgcactacattgagaagaagtgtttaatccacttctaattgggggattgatttcagtaaggtcttcagtaagtcctcatccccatcccttacatatgtcacttgcccataggataaagataaaaccccataacaggcaacctactaactcccttggtctttctttttttttttttttttttttttttgagagactcttgctctgtcacccaggctggagtgcagtggtgcaatctcagctcactgcaacctccgcctcctgggttcaagtgattctcatgcctcaacttcccgagtagctgggattacagacccatgcctggctaatttttgtatttttagtacagatggggtttcaccatgttggccaggctgatctggaactcctgatctcgagggatctgcccacctcagcttcccgaagtgctgggattacaggcgcgagccaccatgcctgtttcatatttggaagccacttcctgttagaagcattttttggattctcttccagattaggaagctgtgttcttcaacagcatcctgtgcctgctcccggcatagcatttgtctcacttcattcacttcattgctattaagctttgacttctctccaccgagactggaaactctagggataggatagacctctctgaggactgttcaccaccgtagccccagggcttccagtattacccggcacagtggaaagcactgaaggcatgtgggctcatgaataaacaagtgaggggaaagtgtgttctaaaggcaaagaaaatgcaaaaatgaattccagatggagaattaggttccatgggagtattggcatttgagctaggcctgaaaagagtgggtaggatttcagtagggggagataataaggagaagaattccaggcagaagaaatagtgtaggcataggcaggaaagtgggtgtcgttcagggtgtgttttgtgaaaagtgtatgcatcattgtagcttcatatcctctctgtgtgtgtgtgtgtgtgtgtgtgtgtgtgtgtgtagaggttcgagtatatgtgtttgtgttaggtatgtgtgtatttgtagttgtacgtgtgggtgtgagcrtatgtgattataatgtgagcgtgggtaggcatgaatgtacctgtatataagtgtgcttttatgtagaggttcatgtatagatgtataggaatatgtatacatatatgtgtaggtgtactgatggtattgcttgagttcttataatagtaaaaactgacattcactggacacttatgtatcagacacttatgtatgcacggtttttagtgctattttaattgtaataaacttcctatacacaagaggaagtttgggaaatactttttatctctattatgaatttttccatgtttaattgtgaatatgtgtaggtataagtgtgtgtgcaaaggcagatgtgtgtgtgtgttagtgtgacgatgtgtgtgagaatgagagagagaaagtgagaaaaagagaatagtgaggttgattgggcctgtattatagaagagcttttactatacagagcagtctggatttgattttgtaggcagcatgagacatggagggacttgagcatggagtagatctataattttggtgtttagatatttgttttttaggaggtggcttcagagaccaggagacctgtgatgaggttattttaattgtctcttgtaagcatttcataaatagatcaaataagataaaacactcagatctctttgaaagagccacgcacatctattaacctaatttcttccagccttttgcagccttggcaacatccctctgaatttatccggacataagaggtgtatattaacttgagacatacaatttctggagatgaaattatctctgctctaagaacatattggctgaacattttgataagtaatcactgccctttaaaaaaaatctttctaggagctgaagagcaattagtttcctaaaagcactgtatttaaattttattaataggaattaaacatcattacaaagttaatctaccctttttatatttcttttagcaaaatcacttttctccatcagcggtcaattattattattattatttttgtcgtcacaacttcagtatatttctgaaaacactcaaaggcttatcaccaaaattcagtttattttaaaggtaaagattttttttctcctcccacacaacctattttgttgaattgagaactgcttttaagtaccaaaaaaattcataatagagataaaaaagtatttccctaacttcctcttccgtatagggagtttattagaattaaaatagcactaagaatggtgcctgatacataataagtgcctagtgaatgtcaatttttactgttattataagaactcaagcaatgccatccccactttattgctttcttctctcaatttcttagccagtatttattttctgataagttgttctctcatgactgccctgttctgatagttccatcaaaagtcccagggaaaactctcattggcttagcttaggtcacatgcacattcctgagccagtcagtgtactgatttgccaaataaaggacacgtgcctattcgttaaattagggcagcatctctccaagggaaaatgaatatgctataaccaaaaatctgataaatgaatgacaggtaagcaaaacagcataaggctattgtgaaacccttgggagaaatgtggagaaaagcgtgatttatggctaaaactactgacatggtaaaaactgtgtctaaattaaactaaagttagtatcgagaaaagctcttatgaagttaaaacatgaaataatctaaattctactctaaaattgtttccccattgatttaaacaatgacaaaatagcaatacatagcacatagcattgggcattcctttatgggctttaatacattaatttagtcctctcagcaatcctgtgaattatactattaacatcatcctacttttcaggtgatgaaactgaggcaaatagatattaagaaatttgcccaagtggcacagctcacaagtggtacagctgggatttgaagccagagtggctggctccaaagtttaaactcctggcaactttgctactctgtgtctgagaacatatttgctgtttttaaaaaactctcccttttgaattcaaaaacagtttttgaataaactttttaggttaactagttttatatttacaaaaaacttgcaaagatagtccagtgacttctcacatacctaatgcccagtttctctgattattaacacctgacattagtatggtatatttgtcataatgagtcaattcgtatattattgtcaactaaaacccatgattttttcagatttccttagtttttatctaatctttttctgttccatcctgatagctgatccaggatcctatatgacatgtaattgtaatattgccttaggctcctcttgactaggacactttcttagaccttcttgttttttaatgacctttgacaatttggaggactactggtcagatatcttctagaatacccctacattggaatttttctgatagttttcttataattacaccgaggttataagacgacacaggtagaacaccacgccattatcatcacatcatattaaggatatgtactattagaatgatttatcattgtccatattggctttgaccattgagctgacatcacatctgtcacatttctgcattgtaaagttagtcttttttttttgttcagcagaaaattctagttgcattttttcacagacttaaaaatgagtcctgggttcacatcctggttctgccatatgaattggacaattacttaaaccccatgcctcagtttcctcatctatgaaatggagataataaaagtagcatgttattcatgtatctatttttaggattacagaaattattaaagctttcggaatagtagaaacggaaagacttatttttatcatctcatgtaatctttttttttttttttttttgagatggagtctcactctgtcacccaggctggagtgcagtggcgcgatctcggctcactgcaagctcggcctcccgggttcatgccattctcctgcctcagcctcccgagtagctgggactacaggagcctaccaccatgcccggcaaattttttgtattttttttttagtagagacggggtttcaccatgttagccaggatggtctcgatctcctgacctcgtgatctacccgcctcagcctcccaaagtgctgggattacaggcgtgaatcttatgtaatctttataacaactctgtggccttgttgtaacctttaaaatatgaagaaactaaatttcaaaaagggaggtagtgattaagctgtgctctagaggttttcactgactaagtttaaattcttactgtgagccttatgatctgacctgagcaagaaacataatatttttaagccctggtttcctcatcatgcaatgaggataattatagttatctatgtcctacagttgccttgaggattgagtcatataatgaatgaaaaacccttagcactgctcctggaaacacatagtaaagccctaatcagtgttaacaatggtctttgtcattattgcccactgtgccccagctaggaatggacaagtcaggatttgaactcatgcccttctttagagaatgaggaagagccagctttgagaaaagcctcagatttgagtaccactgttttttgtgcagcatggagaattactatccaagagggctctattgaccatgttcttctttcctcagtcttctaactggttctcagaaccatcctgccaccttttttagagatagcttgccatttggctgttttctgctgtcctttcaccctgggtgcaagactgccctaatatatggttgccatacagaattaaatgtcaagtaaggagtgccacctttgcccctcttctaattatgtactcattaccctgagctcaaatcaggaaagatttgggagggcagcttatccttgcattttacatagagtgctatacctgaaagaccttagagattatctgattcaaacccactcccctcattcctgttacagtgaggagaatgacacccaatcagtgaggtcaaaagtcaagggaatgccattgaagaaactcagatctccatttgtcaattagttcttctgctacagaggctcattttcctgaagataagtttaacaaaygttgaattaatgataatagttccacgtatggagacctttctgtgtgccaggaactgtgcattaagagatgtttgttgttattatcttataagtaagcstcataacagcatatgaaatggaagtgttgtttttatttggtgattgagtgaactgaggttcaaaaagattatgtggcttgttcaaggtcacatggctaaagcagtgacaagatttgaacctgttcatctgtctgatctctaagcctgtgctattaatgattctgaaccctcttgtcctgtgccatgtaaaggagagaagagaggggttctgtagcaatgaagttgatgcctgaaaactcaatgggatccatatgtgcwtatacatgtacatgtatacagcacacacacacacacacacacacacacacaagcgtgcttgcctgtcctggttgtgtataaatataaccagaagtttggcaaggtgtcctggaacttcattttccctccaagctccaaaaatagcatgtgattgacaaggactgtatgatttcacttgctctgatgcattgaaaccttattcctggaagcactgctggaggaaatggattgaaaccttactcctggaagcactgctggaggaaatgcggtgcaaccctggtattggctcacacttcagaatagcttttatgagtcaggaatgctgatctaaagttacagactcagctgagtgtggtgttcacttttatggagaggattgggaacaggaaaaaggtccagtttagagaatagcagaagagtcaccatcacgtccaaggtgggagcagagatatttttggctgccatcttcaaagtgcacagggtccttccattttggatataacttctaaataaaggcatttggagcatacatactccatgccactgtggaaatggagacaagcagaaacaatatgacagtcgaaactgaggtcttcaggattcaacccattggttctttctttctccctgaatactctggtggctggagtccctttttaaaatggtgttaggatgatgctgtttgctttctctggggaaatttaatacccaaaggctattcagacggccaccctcaatggctctgagtctcgggggctgaagttgcagtaagagcaagggagagaatacaggtccttgatacttccatattttgcctagggtacaagattccaaagctgaggcacatatggacacattaatcattctaacactttctgactcatgcacatgtaaaaaatacaggctgtatgtttattcactccaccaaaaactacccattaagtccctccatgtggcatgccctgagttagaagctgtggacatagaaaccaatcattacgcatataaaattcctggtagactgggaaatcatagtctcataagtaaaacatatacataaacacatagattattgtagattattgaggtataatattgtgaagcaaatgatgtttagatatttaaatcaaattaaggatttatgaataaattatataatgggtttttttgctgtaatatagaaggagtgagtgggagtataaatgaaacaagattggtcatgagtactaattattgaagctggacattgggaatacggaggttcattatatgattctactcttaaatacatttgaacatttccataattaaaaaaaaattggagtaggcaaagaagcttccatcttcaggcaggttatatatggacatatatccatggtgacttctataaatctttttccattctggccattgaacttgattgactcttagtccatttgggttgctgtaacagaataccatagactgggtggcttataaaccacagaaacttgtttctcatgcttctggagactgggaagtccaaatcaaggtgccagcagatttagcgtctggtgagagctgcttcctggttcatagacagcaatcttcttgttgcatactgatatggtggaaaaggcaatgggtctctctggggcctctttcataaaagcactaaccccattcatgagggctccaccttcatgacctaatcagctcccaaagacccctcctcctaacaccaccacattaggggttaggatttcaacctatgaattttggagggacgcaaatattcagtctgtagcaaacccttaaggtaaatcccaacttcttaatagagcctacaaggctttgcattttctggtctccacctatctggagtgctctttccttctctgctcctccacaattccttcccacaactgccacgatgcaactcatcctgaatttccaatttcagcttaagtgtcacctcctcagggaagatgtctctgatatcttttctcctatatgctctcttagacccatgtttcatttcttcctcccaatttgtatgaacatatgtttttgtgtaatcatttgactcatgtgtcttctcaattagcacaaaaatttcatgcaagcaaacattttatcacttccattacagtattctcagtgtctagcacagtgcttggaacctagtaaccactcaacacatatttatggaatgaatgactctgctaaacctgtctacaaacactggcctcagttatagtcccttgtaaataggaatataggcagggaaagtgaagaatgtctgttctcctttatctggtatatacgatttagtagttgagatttttggtgtttgcagtggggtgccgaagggtctatcagatgagaaaagaaggtaagagctcttgggacctagggcagtgttgacacagcagcttcagctcctgatcgagttctctctacctaccactcatcttcaacctccttggctgacccatggatacttggatgtgtcaggaacagggagtagaacttggagaagatttaggaagttattgcactctgggggctcataaacctttgcaacttttctctccatgagygagcgttggactgaaacttttgcctgactcccatggtgtgggggttgtgatgtggtcaatgacatcaccaaagattctgctagtctttgccttaatttacattatcttgggactttaggaaacatgtctgcaaggaaggaagagtgttggagctataacgtggttactgtagctcaattcacagaaacactgtacatagcgagaaagcacctttgggttcagaaagccccacgttataactctggttccaccacttattgctgtgtgagtttgtgcaagtcacataacctctctgtgtttcagtttcctgaactacgaagttggaataataatgcttaccatgtagagtttgtaggaattaaactaagtggtgatattggcacatttcctgactgtacaggagtgctcaaaagttatgtcattgaggttataatataaaatgctacggtggagatatgcgcaaagttctatattactagggaaagcaggaatgattttacaggtaaggtgacagttcagttatgttttaaatgttaacaacaatagtaaaataatagcagccaccatatgtgttacatgccatgtcaggttttgtgctctatatttttggtactttttggctcattcaaaccttactgcagtcttcaaggtcataccctgttgctctcttcattttacaaatggagaaagtgaagctcagagaggttgaatgactttcccaaggctactcagctagtggatgaagccaggatttacacttagttctgtttgacttcaaaagccattctcttacccactgaactacccaccctctctcgaaggttgtgtttgagtcttccaaggcaaatggaaagaaaagggattggtataacatgttccaaaaggaaacacttgtatatttctttatctatttgcatatttcagtatttttggtttgatctatgtcgtacaactgactgacagttccaagaaggcaagagtcattctgttttagccatcattattcctaggctggcactgggacatcgtaggtcttcaataaatctatgtcgaatgaatgaagaatttgatgcgctcarcattctccccagcctgttacatatcatagcgtgaataaatgaacatgtgtgtgtgtgtttaaccaaattgctctactcgccatcctatcttaaaaagaaakgtatcagcaatgctggacaattttgtaattagccacaggaaatgtttctttatagccagcaaaaattttccagcccatatgatgaggtaatcttagagagcactgattcttttctctcctcccaccctgtcacctctcctggtgtccggcatgtttgaattctctttaagggtttgagattcatttctggtgacacttaaacattacaggaggagaggtgagtgggtctggtcaacacagacaagcctggatttggcacttagcttttcacacgaggtgttttcctcgaggttggtattacaaataaagyggtgacctgtggtgtcaagcaatggcgtgtgggagcaggaggagaagggagaaagagcggtgcgggggcagcttcctcccagcgtgtatgtgaatagcgccaataagctgtcaaataaaattaaggttcaaaatatacagccttcaatttgattgcactaagatgccgactgctgctccgagggaatacaatcgattctattttgacaggtcttgatgtacgctaagcagtgacagtctcccctctgtgcaggattaataaaagttcaccttaatttgcaacttaaatagaactgtatctggggtcaaaatgatgcttttaatttccccacctgctccatctcttctctgtgttgtctcaacccccactcctcttcttttcactctctagcttcatcttcctctccctttttctcttttccttcatcttagcacctttttcttctttctccttttcactttctctcctttatacttagaaacaatatggagtacctatgttgtgcttttgcctttcatgcattgctttattgaattcccatggcatccttaggaagtagggggaattgtgttcattatacagatgagaaaacagaagatcttaggattaagagcttgcctagtacagctagtaagtggtacagtgggagaatcaaacccagacctctctgattctaaaagtctatgctgtttccttgccatccgtggtcctgaactctggcagaacattagaaccacctgcggggctgtaaaggtatcagtgcctgggcactgcctccagagatgcaggttgattcctctggggatgagggcggctgggatggagaactgcccyatattctgttttctctttatgcccgtttgtcttagcacagaagtagatgcatatgttgagatatgtggcagaaaggcccttgagacggatggatgtctctggcagggaaaggatttgcctctccagaaatcagcggcrgaagaaagcacagctgtgtctttgtgtttgtgctgcaggtgggcaagtgggagamccatacgctgagcctgaggcacgccgtgtggcccaggtacaagtccttctccgactgtgagccggatgacaaccatctcagcatcgtcaccctggaggaggccccattcgtcatcgtggaagacatagaccccctraccgagacgtgtgtgaggaacaccgtgccatgtcggaagttcgtcaaaatcaagtgagtggcaggaatgctgtcacctgaacgtgcccaaccctttgaaatagcatggatcatcgatagtaacaatatgtgtacttgaatcacaaaatgtcatagaaaatacacgtcgttatagtaggtataatacaataatcaatttaaaaaagacttagataaattcctagagatgtgccacacttgcattcatttaattccaccagcaatatgaggtgagtagttttgcccattgtaaatatgataaaaccgagttatgggaagattatgaaacatgttcaaagccatctagctaggaaatggaagaggtaggactcaaacagtggtccaactgactccacagacatgtttttaacccttaggttgaatcaatcctccccttcagtctttctagtttaatttaatttattcatttatttatttttgaacatacatattcaaaaaatatctttatatttttaatatagaaaacatttttgtatattaaaataaatataaaacatatcttaatatattaaaatataaaacattatatataaatatatagaaattatatattttatatatttaaatatataaaacagtatattttatatatttaaatatataaaacagtgtattttatatatttaaatatataaaacagtgtattttatatatttaaatatataaaacagtgtattttatatatttaaatatataaaacagtgtattttatatatttaaatatataaaacagtgtattttatatatttaaatatataaaacagtgtattttatatatttaaatatataaaacagtgtattttatatatttaaatatataaaacagtgtattttatatatttaaatatataaaacagtgtattttatatatttaaatatataaaacagtgtattttatatatttaaatatataaaacagtgtattttatatatttaaaatattataaaacatatattttatgtattaaatatataaaacaccatatgtttttatatattaaaaatataaaagatcatatatttttatacattaaaatatgtaaaacatcatattttatacattaaaaatataaaacatcgtatttttatatattaaaaatacatatggttggacacagtgattcacatctataatctcagcactttgggaggccaagctgggcagattacttgaggtcaggagttgaagaccagcctaggcaacatggctaaaccctgtctttcttaaaagtacaaaaattagccagctatggtggtgggcgcctgtgatcccagctactcaggaggctgaagcatgagaatcacttgaatctgggaggtggaggttgcaataagtcgagatcgagccactacactccagcctaggcaacagagtgagactctgactcaaaaataaataaataaatgaaaatagaaatatataaacattatacatttttatatattgagatatataaaacatatatttttacatattttatatataaactatttttatatataaactatatgtttatagataaaatatatagttaatgtacaagtttatatataaaatatatatttatatgttaaaatatataaaacattttcatatattaaaatatagaaaccaatatatttttatatattaaaaatatataaaccatatattttcatgttaaaaatatataaaatatatatttttatatatatataaaacatataaaaataaggcctgttttggtttggagaaaattttatcaatgaggtcacaaatgtcagcctctttgaagttgaaatcctgaatacatcatggaataaataaatatgcccctactgttatgttagaaatgtataaaacgtatgtttttatatgttaaaaatgtataaaacattatatatttttatgtgttaaaaatatataaaacattacatatttttgttaaaaaatataaaacatatatttttatgtgttaaaaatatataaaacatatatttttatgtgttaaaaatatataaaacattatatatttttatgtgttaaaaatatataaaacattaattttttttatataatgacagggtcttgctctgtcccccaggctggagtgcagtggtgtgatcacggctcactgcattcttgaactcctaggctcaagtgttcttctcacctcaacctcctgaatagctgagactacaggcctgtgccaccatgtctggctcatgttttaattaatttttttttttagagacaagagtcttgctatgttactcagcctggtctcaagctcctggccttaagtgatcctcatgccttggcctcctgagtcactgggattatagatgtgagccactgtgtccggcttcctttagtctttttaaaaataattatttagtttccacttttctggctgtccctttccttccccccacacattcttcttccatctcttttatagatcccagatctatgcttctcaagaaggttaaaaacgtctctccatttgggagtgaacacacaccttgcatgttactttctgatacaatccaggtgcaaatggaacttctggcagtttctcagctcagcaacagccagcaggcactgcatctgtgtcatttctccttttgttatgattgaagaaagagctggcattgtccattatgaggtccccttaatctacaaaccctctggggacacagaaacctccatggccacctccaaggccctgatcctggtatttcctaatgcaaacataagcaaaaacaccacctcacaggagactcacagaagaaaaaggcctgctgttggaaactttatttgttttctgagtcttttctgatctgtttcttttacctaattcttactcatcctttaagtgtagctcctgcgtccccaagctgggttagctcttcctacttccacagtacctgggtgtatctctctctaccctcatcacctgtctttacagtgtatagtttgtcttctccctggcttctgagccacctacatatagggaatgtgacttattaatatttgcaccctcagttacaagggcacagcatgacacaccaatgtttgtttcatgactaggaagagagatttttacttcctcgtttcaaactccagtctcagctattatcacacaagatgcaagtgcccagatctcagtccttgagatcaggattttaaagatataatatgtrattgctaaatgtattgtgaaggcctgttttggtttggagaaaattttatcagtgaggtcacaaatgtcagcctctttgaagttgaaatcctgaatacatcatggaataaataaatatgcccctcctaaaaaggcccttgctttctccagtgtccccactgtggctccctgggatgaagtttttttttgataagcagtcccccagcctccactctcctggagatgaggaagaggtggggcccaccaaggaagggcaagtgtacatcccatgattcatgattcataattcatcatgattcataattgtgtgaaacagaccatgttttgggrtcakgaatgttttaatgatttttgctgaattcctttacagtgaaataacacagacattgttataagtaaaattgttataaataaattgttttaatacagaatgaatgaatgtgcattaagcacagtttgcatgttaggcacattgctgggcacaggggatacatggatgaacagggagggcaaaagactaggacctttccatcatggaacttaygtggttagaaaacaattcgaccaggaagaaatgggtgaccccatgttgtaataaaccttgtgatgaacagaaagagagtggtgtgagaagagagtacatcggggtatgtggggttactttagctcacacagataagatttaaggtgatatatacaggatgagaagaagccagacatgtgaatatctgggcaaagccttccaggtagaggcaatggcaggtgcaaaggccctggggaggaaaggagcttgggagtttgggaaacggaatgaaacccagtgcagtgctagagagtgatgagttacaaggaggatggaggggatgatgtgggaaagttgtcagaggatgttctaatttgggtgggtgttctttgagcagaacttggcccgatgaagaaagcaaagtggctggcacaaagcagagtctaacttcagtgggacacctcccctatgataacaataccctctgtgtttcaatagggcaatcaactgaggccccgtgtgctccagaatcaataataggagtttagagtctttaaaatcaaaagccctggagctgaaaacaagtagatccccaagtactgagtcacatttgtatgaggaagagaaatcaaaataaattgctgtctttaaaagaattgacttttctactgaagactatcaacagcttaacaggttcaaattcacgtttttggtttctgtgaggagatagtagcttgcagctttccttcttccgcttggggatatgaggagtttactgtgtctggatgaaatgaaagtctgactcgtgagagcaatagagaattgctaggatccactaatcccaacattaaagaagattagatcaattgcatttcctatagggaacgtctttgaggaaggctgatcagttgcaaaaagaattcctgttagacaacatgattgtgtgaaacctttttgtttctcacttctggcaartggtgggatcttctaagaataccaggtaaccggaaatgagctgagaaatcttcctttctggtctgttagttgggtgataaagacatgcagagaaaattggaaaaatcatttggcctgatgtgtagcgagaaatggccatgctgtcaattaagctcccaaactgtcaaatcattggtgggaagaaaggaaatttatttttaagtgctggatgagatttgtctgagtctgcgtggtggacaggagccaacccaggacctggacacagctctgactcgcatggctgtgctcacatccaccggctatactgggaaattgtagagctggtaaactggacaatttgttggatccctttccccgtatttgtttttgtgagtcattccctctcttgggtggtggtggagcactaagagagatcacatggggaccatttctcagtctgtgtagttaagtcacatcccctgcacacccacacaagggctgtaataggaaccaacagacgttcccaattacaagctggtctgcaattccataattactgtgataaattcaactattgcctttgctgsgtgcctttttcatcctgtgtccccaaggcccagttccatgtcttgtgcacagtaggcacttagtgggtgcttgttgggtgaaaatgcgtcattgatcatttgtatttagaaatatacctcatgttcagggatatgggtgagataactcataaactggctgaggtttccagggagaccaaagaatgccactatatgcctgtgaccttgaatcttaaacctggggcacctaaaacttctctctaatcttccrgaaatcttgaccaggtgaaggaagagcctgtgataggggaagaagggaaggaacatagaatgaaggtgatacaaatgaacagaggtagggaaagggcatcagtgcatggccaacagcgaccagaaagaaaaagagaattcgattttgacacatttttcagagccatgtatactaagaaggaaatggtatctggacattccatcaactttaatgtacttaggacacatttctatcatatttgtggcagttttaactctagcccaaccccctccattctgggtaattggtggagatggagctggcacatatcccatgactgtacagtgttgaggtcactaatcatcacatgtaaatatacacagatgtggcctcctactacccccccactaagggtggtggatsacagcaggtcatccagcctctaggcaagagagtaaagtctctatggtggtctgggttgacagaagcagagtggttgagtacaagtcactgacaggatgtgggggtgggatacaatggtgaagagagtgattcaagacaggcagtctgtgatcctgagataaaggaaagcattgataagcaggtgtcatttacaacccacttctgttactcaaaattatgttttccagcttgagtatggtgtcgcacacctgtaatcccagcactttgaaaggccaaagtgggagtatcacttgaggccaggaggtccagkctgccatgagccatgatcacatcactgcaacccagcctgggcaacagagcaagagcgtgtctcttaaaaaattgttctgtcaaatctgcccaccttcatggatatagagatgatgtatatcatgtaaatcaatgttgtttgatgcgtgtgtgtgtgtctgtgttgccaattacataagtagtatgtacttactagataatttggggaaaaaccctaaaaatgtaaaaaagaaaacatgtttttcaccgttccaaaatagcttgcttctttctttctttcctttcttcctttcctcgtttcctcctttatttctttctctttctttctctcttctctctccctccctctctttctctctctctctttctttctttctatctctccctctcccccctttttctctttctgtttctctctttctttctttctttctttcttcctctctctctctctctctctttctttctttctctctttctctcgacagagtcacattctgtcacctaggctggagtgcagtggtgygatcttggctcactgcaacctctacctcccagattgaagctattcttatgcctcctgtgtagctgggattacaggtgcatgccaccatgcccagctcatttttgtatttttagtaaaaatggggtttctccatgttggccaggctggtctcaaactcccaacctcaggggatccacccaacttggcttcccaaagtgctgagattacaggaatgagccactgcacctgtcctatgcttcatatttcattgtttttccatacagttatttcataagctcatctgtttttatatagctgtgattattctgtttgtactactgtgtaacctacttttttcatatgacatggaagcataagaattttcctgtgatgatgttggatttccatagacatcactttagtgcttaggtaacactccaatgtgtggatttgccaaaaatgggatattcaaacagagaacatattcatgaaatgcataactcaaagacagggttgagctaatgggatgtccattaatcaagcatattgcccagaagaaaggctttgatcttatgtgaattgtctaagtactttttgctatccgttggatagaccagtgtttcctttctttcttttcttttttcttttttttttggagacagagtttcactcttgtcacccaggcttgagtacaacggcatgatattggctcactgcagcccccgcctcctgggttcaagtgattcttatgcctcagcctcctgagtatctggaactacaggtgcctgccaccatgcctggctaatttttgtatttttagtagagacagggtttcgccatgctggccaagctggtcttgaactcctgacctcaggtgttcacccgccacagcctccgaaagtgctgggattataggtgtgagccaccatacccggcctcctttctttttaaaggtatttttctggtttgcctgggtgtcctttgaatatgtcttgttcaggtgaatacagcaaggtggctggtacaaaacagtaagtgtagccttggtagagtatacaatagcctttaagatagtttaaattttaatggggtctttacctgatcaaggaccttgcttttagaagtgtctccttttatactacatgtcacataggtaggtagggaagatgttattaatgagccctcatgtaacatttggctctatcaagagaagttcagtgcacaaaatcaggcatggaatagaacccaggtctcctgattcttggctgaggtgttgtctgggtaccttcacttctcccctttggtttcaagcctctgtaattatagaatgaagcaaaaccttgctttctctgagaatttcacatcctcctctcttccattctctagtaagtttttatgactcagtttagatctgatgactaaactctagtctaaagttgtgtatgttataaactcttaaaaatttaagagttggtaatttttacctgtttaatgggtgtacaaatatcaactaattcagaaaatgtcatgragattaattcaacaattagtatgaagcctttaggatagtgcttagcaaatagtaattactcaataagtgttagttcttgtcatgataactgctataattaaggacactttctgcttttgctgtcatgtactcacagtgtgtccttgggaaagccacttccccttttmaacttcagtttactcatctgaaaaataggagaagagtacagctaatgattgtgaacaaaccttccagtgctaacattctgtggtcttggggtttttytttacagcaattcaaccaatgaggggatgaatgtgaagaaatgctgcaaggggttctgcattgatattctgaagaagctttccagaactgtgaagtttacttacgacctctatctggtgaccaatgggaagcatggcaagaaagttaacaatgtgtggaatggaatgatcggtgaagtaagttatcttttcatcccctaggctcttactcagacaaagggcctgcagtcctcaggaatgttagcaggaaaagtaaagtactgttgttctctctctcytttttttttttttttttttgccttgcatccaggtggtctatcaacgggcagtcatggcagttggctcgctcaccatcaatgaggaacgttctgaagtggtggacttctctgtgccctttgtggaaacgggaatcagtgtcatggtttcaagaagtaatggcaccgtctcaccttctgcttttctaggtgtgtgaatttcatagtgactattgctttcctataaggaattgtaggaaatcttgtttgctcagaggatgggaccagaaaggaacttgtttagctctgtttggccatggcagcatatttcagaggatgctgcatttgaattatcctatgaaagggttaggctttgggtccccacccaaatttcatcttgaattgtaatccccagctgttgagggagagacctgatgggaggtgacgggatcatggggatggtttctccccttctgttcttgtgataatgagtgagttctcatgagatctgacggtttaataaggggctctcattatattattattattataaggggtttaataaggggctcttcccccttcgcttcacttctctcacatgccgccatgtaagacgtgtctgcttcctcttctgccatgattgtaagtttcctggggactccccagccatgtggaactgtgagtcaattaaatctctttcctttataaatttacccaatctcagacagtttatttttttgagatggagtctagctctgctgcccaggcttgagtgcagtgttatgatcttggcttactgcggcctctgcctcctgggttcaagcaattctcccacctcagcctccccagtagctgggattataggtgcccaccaccatgcctggctaatttttgtgtagagatggggtttcgccatgttggccagactgatatcaaactcctgacctcaagtgatcctcgggcagttctttatagcagcgtgagagtagactaatacatcctaattcactcccctccatccccagttcacatctttcatttgtcttaaacttggaaaaagctgctgaaaaaaatatgatcacatattcagatactggtcttgactctgtagaatgtaaattaatagatatattgcttagaatattgaaaacatttaaaaataaagctgtccacagttaatttaaaccagctcatagacctttattcagcatctacatatccatcctccatcccacaaagaacagcagtcatttatttgctagatgtaagagtgaaaataatgatgactgcacgatgatttatgccaatattctgctaataggaatagtctgaaaagtatatgctgatttaaaattaatcgaatcatattttaaatgtgactacccattaagccaaatagtttgtaaagaaggaaattcttgtgatttttttaaccgtttygtaaatttatgtttttacataaaaggtgttttttttttttaaatcaaggaagagctatgttttctatcatctgcttttctctagcacttggactgtattgggtagcctggctagagttgaaatttcatggaacatagtaaagcattatttttgtctttaaaggaaagtgttgtattaactgtttggttatcataaatgagttttgactgtaactatcttgttgaatatcaygaaattcagatcactaattcccccttggcactcccatataagtgggtttgtcccaaattagggaaggttaagacaaacgtgaatctctggaggaaaactgagaggggaaaaatatgtataatttttaaaaaatttcaatagctcaggggtacaagtgatttttggttatatggacgaattatatagtggtgaagtctgggcctttagtgtacctgtcacctaaatagtgtacattgtaggtaattttccatcactcatctccctcccatcctctccctttctgagtctccagtgtccattataccacttgtgtgctttttcatacccataggttagctttcatttagaagtgagaatatgtagtattagattttccattcttgaaaaacccatcccccagttcacatctttcatttatctcaaacttagaaaaagctgctaaaaaaataagatcacatattcagatactggtcttgacactgtggaatgtaaattaatagctatattgcttagagtcttgaaaacattttaaaaataaacctgtcggtccacagttaatttaaatcagcccataaacctttattcagcatctacatacccatcctccatctcacaaagaacaacagtcatttatttgctagatgactatcatatatttagaatgatggcctccagtttcatccaagttgctgcaaaagacattgcatcattcttttttatggctgagtagtattccacaatgtatatataccacattttctttatgcaatcatcagttgatgggctcataggttgattccatatctttgcaattgtgagttgtgctctgataaacatatgtgtgcaagtgtctttttgatataataacttcttttcctttgggtagatacccagtagtgaaattgctggatcaaatggtagatctacttttagttgtttgagaaatctcccccctgggaaaacagttatattaaagtcaactaactttmttatatttttccagagacaaaaataactttatctcttaaagcaaattgtaaactgaaaccaatttgtggacaccaactccaagcccattgtcttattcttccactgtcttcatttatatgtaatgttggcatccagtgaaactttcatgtttcrttctcttcagtgaaatattgactaacaggattttggacactgccttacattcagagcgctatggatttactgttttcatttttgataatccatttaagctgttaaaatgcttgccactctctggatttgattttgcactcgttgcttcaatttttgtaacctttgttggagtaatgtggaccctgacaaatacacacctcattatgttccttttgtccctccgtctgacatggattcagatactcgtattttaataagagagcctcactatgccaggaacaatgcaaccagctgatattgacaacacatgcagaatcttaataattcttaagtggacattcactctttagtcactcctagtcatgtttcccctcattccctttcagactctttggcaggaatcctttgtcctggaggttaagaaagggttagaggaagtgagttcatggatcaaaatggaaagaaattgtttcttttcacacaaaaaagtcttgtatctctttagtgagctaragagaactctttttccaattcaatcagagagaaaaaaatatcaattggcttgtcttatgaaaatgggtcgtgaatattgaatctggcctcaacccagtttctctagatttttatcttgcttgcatttgtaaaacayttccataaaaatgtcaagtattttgctaaatttagcaaaacctctctttccccacacttttcctgctgcatttttaaaagtaaaataaattgtaaccagaggaaactattttcaaagctgtttttacccagtaggcttaatatttttcctagtcactaaattacatccctatttgattgactgtgcacccccttatttacggtcattatctacagattttgaaagtcataatgaaccagctaagctacatttttccattcactggcttagtcatctggaagagccaaaacattcaaaatctgattttattgctgttcattatttcctattttctctcctccacaaactccattaactcacatcagaagcacttgcaggtaatgcctctaagcttttgtgtaaaaatgtaaccagtggctcttcaaggacagagatggcatctcctgtaatatttctatctagttaattctgaagagtttccaaacaagttggattctttgatccaaagaaatgctgacctggtatctcctcgattgcagttccttcatggacaaatgttgaatctgttttaagccattagaagatgtaatagagagttatctaaactatttctgggtcactccttagacactatagatgttgctttaacgatgtttctttgttctggagcatgtgtgtgcattcacgtgtgtggtatcttagaatagcaacccttcagggcactgataggtacttaatttactaaaacaagactactgcagcagagtcctttgatccgtgctgtgctcacaagttaaggaacagatgtggtcaattccaagtggggagacatgtgggaacagttgcttcatcagtttccacttgattttctgactagcgtgttagtgacaaggatgcacctaccaaaaaaagttcactgcaggtttacagattcttacatgcacataggataattcagttatggtcccttctaatgtttaaaaataatgttttcacagcctgcagagaaatagacgttaccagattaataaatgtgctttttcaaaaaccagcacgcccttttcagaaccatggacagcgtattgttgccccagtatttctggctttaatcctggaatcacacagctattccactcagtatattgtctgtatattgtgtgcctcacacacgaacaaacactttcatgtatatgcttatttgctcatcataatgatcctcctccaataagacacactacgcaactcggagaattattttatctctattcttgaatatgaagtacttataaatctcctaatcatttatttatctaatttcctttttggatacaactcagtattaaattgctattatttcagggacataatattgtttattactcaagctaaagttaaaataaatttcagttgcagtttcattgatttcttggagcgcatcttgtgttacttaagtaagttgtgttacctgttgctttttaatatatttgcactatcaaatgcattagaaagcattcctcccagcttttaaattatccaatatagctaaagttaagttcggacatattagtttcttgttatacattaaactcattaaattggaatttgtggtgacctctagctgtgttaagtagtcatactctaataagaaggtggcctgctatcaacctagctctttattattataagtagcttcactaggaaaacaattttaaaataataatatgtttactattcaagaagtattattggacttattttaaccctcagaaaatatttgcttatgaggaaaagggttttaagttcattggtgtctataggcaatttcttccccatgatacattcaggtggagatgtattcatttttaaaatttattttctgttgattttatagcaaatctataccataaataaaatggctgcagtcagctaattttcatatcctcaatcaagttgaatagtaatcttattttacataatatttcttacctttctagagtgttacaaggcttagagccttatgacttggcctgcccttctaagacatccacctactgcctaagttacatgcaaatgagctgatgaaaactacttttagtggaaataaccatctatccatctactattttattgcctctaccctttaagtgatgcttttttattgaattatcatgtgaagataatatcctcaattgactttcaattgcatttaaggctgctaccaacatcaacaagattaataaagctgtaggaatctcatctatctgaggcaaaaggtgaaatggagagtgtggtagattataactttccaatatttctgtcacccatgattttataattcttttccaacaggttataattctccctttatttttggaattccctgcatatcatctttctagcatgaaaaaataaaaataaaaaccataacaatttgcaggagcctatggtttactatttgggtctagtcttttttcttcctagctttagccccctggatggttctataattacaaaggaaactatggcctgtttatttgcattctaacttgctccctctttcttatcactcttttttcttctgattatccttgacctaatttgtaaaatgtcctatgctcttctctatttttattatattatatgcaatcttatacttcaaatattttgtagaataaagaatgatttaaaatgatgaataaaaaatgtctggctggccaggagcagtggctcacgcctgtaatcccagcactttgggaggccgaggtgggcagatcacctgaggtcaggagtttgagaccagcctgggcaacatggcgaaaccccgtctcaactaaaaatacaaaaattagccaggcatggtggcacatgcctgtagtcccagctactcggaaggctgaggcaggagaattgcttgaacctggggggcggaggttgcagcaagtcgaaattgtgccactgcactccagcctgggtgacacagagagtgaagctacatctaaaaaataaaaataaaaataaaaaatgattagcttcttttgaaggatcagattcaaattagagaaaatatttttggcgagcctgcaaatggatgtctgggcttcctgctggaagtgaggaagagataactaaccacgtttccattcctttatctgtttatttgcagaaccattcagcgcctctgtctgggtgatgatgtttgtgatgctgctcattgtttctgccatagctgtttttgtctttgaatacttcagccctgttggatacaacagaaacttagccaaagggaaaggtaagggtaccttcatgagcatgattcaatgttgttgcaatttcatttacctttaatgaaaatttcagttttagaacacattactctagaccaggcatggtggctcacgcctgtaatcccagcactttgggagaccgaggtgggtggatcatgaggtcaggagttcagaaccagcctgaccaatatggtgaaacccatctctactaaaaatacaaaaattagctgggcatggtggcacacacctgtaataccagctactcatgaggcagaggcaggagaatcgcttaaaaccaggaggcagaggttgcaktgagtcgagattgtgccactgcactccagcctgagggacagagcgagactcaatcacacacacacaaagaatacattatactgcgttggtgtaccatygtatgaatggttttgggtcactgatattgcttgtaataccagaaaagtatggtttatgtacttcaactgatggataaaacaaaatgaaatattttaatcttgtcataacctgaagtcaatagttgttaggtgaaaaccactgatgttcaatttgttgggaaagcagatttgaaggaacttttctgacaattaatttaaaaaatgcttgtcaaatgctaaaattgtcatgggtttcaacttcagtctatgcaaagaaaatgactttataaaatctagtttaagaacattcctcaaactactgaatcaatttacattagtttgacaataaatataactatgaagtgatatatttccccatagggttatattttcctgttggtgatgccaggaggaaatcaagtgtgctaaaataaaatgcattgatcttagtgcattgtagttgataaagggacaatcagtagataggaaataaaattgggaggcattcgttagctataactcattaaaaggatcccactctagccagggtttatgtcatacacgttatgccattttgagtgggctttcctcagtgggcactaccttctmaatgggtgttatcagaaaagtgtcaggaccaaatctctttcccaaaaaatgacttgatatggtagaggatggaacttgaagtctcatatcccccaaaaagcagagcactttaatgtgatggatacatattcttttcacttagatgttttaatattggaaatactcaacaggtcatgggaatctattaggaacctagttttattgaaatctttcaacttcttcctcaccattgaagagtggtgattaccacataaaccatcttcaatcaaccagatactaaacaatgccataaataatgatgttgtgtttaatgggagattgcaagccttcatttaaagggtaatttaacctctaagaagatttccaacagggtggaatctgagacagtttctgtgagtgaccacactgtgatacagtagttccttatatttgcataatcagggcttgtgctgttgtgaatttacacattttctgatgaatatttatcaaatgggtactacgtgccaggaggcactatactgctgccagagataatgtggtaaatcaaatagagattttctatcaggcagtttagaatttagttgtgaaaataacatgtagacacacaaactaataatmacagattataataaatatcaagaagaagaaaaaaacatagtgacatgatagtgatggggtgcagacactacgttagataagatggtccaatgggaaaggatgttcattgagctaggacctgaagggtgacatacaattttatctgtcaaaaacagttacagtcatttcatgtaaaaggaacagcaaacagaaaggctgaaataatcttgagatgctcaagaaacagaaaaaggctgagggggtgcagtggctcatacttgtgatgtcaaggctttttgaggccaaggcaggagaattgcctgaggtcaggagtttgagaccagcctgggtaacatagcaagacctcatctctacaataaataaataaataaataaataaataaataaataaataaataaataaaataagcctggcgtgatgatgcgtgcctgtattcccggctactcagaaggctgaggtaggagaattacttgagcccaggaggtttaggttgcagtgagctatgatcacaccactgcactgcctagtcagcagagcaagaccctgtctctattaaaaaataaaataaaaagatgtgagtgaatgaggtagacaatagtataagatgaaatcagagagataggcaattgaccatgggaagcatgtcagactttcttcaaaatacaatggagggaggccaggcacggtggctcatgcctgtaatcccagcactttgggaggctgaggtgggcagatcacttgaggtcaggagtttgagaccagcctggccaatatggcaaaaccgcatccctactaaaaatacaaaaattagctgggcgtggtggtatgctcctgtagtcccagcagttcgggaggctgacacaggagaatcccttgaacccgggaagtggaggctgcagtgagccgagattgtgccactgcactgcagcctgagtgacagagcaagactccatctcaaaaaaaaaaaaagaaaaagaaaagaaaaaaaaaaaacaatggcagggagacaggtgacatacatgtacagagcaaaaaggtcactggggctactctatccagatagtgtgtggggacaacagttggaagcggggacggggagggcagttaagaaggtgtcacttttccaagagaaaggactgcaatgacttggaacttgtcaagaacaacgaaaatacagataatcaggtaaatctgagttacattttggaaggtaaaaaccacccacagcccatccttgcaatacgttctcctttgcctgaagcatgctggaaagactattgtaaaggatggcatcagttgtgcaaactcctcagcccttccattctctccaggctctctgtttccagctcatctgctgtggcaactcttgggaaatgacagctacttgtttctttgtacaaaatggttttctgttacatttcgctgcactttatgggaaaagttatatggcccagtcatagtattcatgaatcaggaattcctagaagtcttggaccgatccttctgaactgcctacatctgattcctaaatagctgtcatttctgatcagtgtgcatccctaaaaaaactaaatcgttcataaagttgactggattaactctaagttttccccaagaatttcctgcctcttgagaataagcccagaagatcacaaaactagccaaatagaaacaggagagattgagaataagagaattaactgctttctctttaatgggttgtgtcatggatattataagtacagctgtagcctgggtttggcctccaatgtgcagagagcttgcttttcctaggcttcctgcccagcacttcataacttccattaatgtgaatttgcttctgccactttatttattgcccactctgcttatattggcaggtgacatctgagtagatcattttttcatatcttcatttacttaaatgacataaaaattaacctcctgttaaagggaaaccttccctatgaaattagggcatcagttgatttttttttttttttttttttgcccatgcagaacaaagacttgaaaaccctaatatgtgtgttttacagcctgcatatgccccatcgccataaattttggcatatcattctgtctctttagttaagtctgttgcaaggaacatttaagaatcttaaaagggctgcatagctattgcgaggatatactggaaaaagtgctgtgatatgacatcagtgttcattttccatgaccctgcaatgaaatgtcttccatctgtgaagtgttggaagaattaagatctattgttccattccttaatgtctccatttggagagggttttagtttggtttaattcttatgttgtacacactttacatctgagtttgaacaggagcaattgctagggacaatcggattagaataccaaacatcagtcccgctgaattgcatggttcttatacgatagcacatccgatgaatttggaagcagtccccatgcacacatttttgtcaggctctctttatgtttattaagaaggctggtttcctcaaatgggaatcaaatccaaatttaaaacaggtcataacactacttattcaaacccccattttgcataaccattttcgtttcctttctttttttaaagaaatgtggcaaaaatccagttagatagaaatgtgagaagaatgctaatttttaaagaaaaaaataagttattgtggttctagggcaatcacaggacacaactatgatataattccatcttctggcaaccttcggtgctgctggtggctgctgcgtggttgtcatacacaaacaggcatttttttcagaaaatgctgagaatgtccttttcatcttctgcagcaccccatgggccttcttttacaattggaaaagctatatggcttctttggggcctggtgttcaataactccgtgcctgtccagaatcctaaagggaccaccagcaagatcatggtatctgtatgggccttcttcgctgtcatattcctggctagctacacagccaatctggctgccttcatgatccaagaggaatttgtggaccaagtgaccggcctcagtgacaaaaaggtaaggtcaccttgctttcctctccatctgagggttggtcttaactgctctcctttcaggaggaagagattcaggtgcctctcattgagatccatcaactygaatgcacaaaagccagaaggttttttctctttaactcaaattgtcctctttctcaaagtttttgaaacagaacattaaggttagctctcctagacctaaaagattccagatctaatttggaagcctggcttccccgagtggtcgtgtttcctatttatatgatctttctgatggtgcttgtgaatgacctatgactcaagtgcttaggttgaaattcatcctttcgaatgtgtgatgttaaggaaggcccattttcctggatgagaagaaattggggtgaaggagcactgtaggctgtgggtacctcatctatgacctgaaaaaaagtcatctttaagccctacccagagacaaaattatctgacagctcctcttttccatacagccaaatcagtctcagcatcagcgcttctgactcacctgaaatgtcttcaaggcacacaaaaggagcagagagtttttttctttctttctttctgtttttttaatttcccactggttctttctactcagatatatcactaatcttcccttatagggctgtacttcccacatcagtaagrcaggagtaaaaacacctgctctctcattctccagtgaaatgaaatataacaagggttgcagggtttgagtagctattcagaaacacacattgaggaagaaaagaggtaaacygggtgcatcctcctattgagactttagttcaggaaacatcctgacttgctaagctcagcaagtgttgagattgcagcaccacaaagattttctgttctgtgtgtggggataatttgtctctcgttataaaacctcgctaacatatctttttgacataagtctacatatatccttttgccattcatcaacaaactgctgaatagaaaatcaatccatggaaagcttttacagcttatccatgatacacactgtggttgaaagaatcttgtcaagagagctgatgaggggttggggttaaagatggagtcatttccacaaaggcatgagagtgcctcacctctctctgatggcttccgattgaggcttgagtaagggtcactttacttaccatggcacacaaagccctgtgttatctcacctgctcccacgtttccttcctcttgctccatccctgtcactaagtttatttcagctcagtgtccttgtgcctcttaggccctctgcctagaatgttcttccccaatcttctcatggttggctcctcctggaatttctggccttagggaagacattacctcctcagggaagtctttcctggctactgtaataaacttggcagaatgagctcaggctcccaagaaacttaaattctagtaggaaaaaaataagcaatacacaagtaaacatcaaggaagaaacaaatttggaaatttggggcaggaataagtattataaagaagataaagctgatgagactaaaattgtctgggggaagaggccctcagggatgtagttttgatagagttattttgcactttggaggtgctcaggacactcttgctgggtgaatgaatacatgcatggtatactggacactgtgcataccccacctggatctcctgggatcccttttgcagcgctgtgtgcccagccccacctttctgtgctttgctgacaaagcctcacttcagggatcctcagcagatttttgcctttgggcrctggaatggtaaatgcctggcaatttaagttccctcaatctttgtggtcacctgtaaccaaagactaatctgtgtgagaatacaaaggctaagctgctcccttgcttcgaagcaggaaaaactttaaggtacgaatcactctctggagctccctgcaggacgggactgagatggagacttggccttaaatcagacccttgatttctcccccttctccagtctttcctaactttatcctgctcccctgctgacttctcctggaacccttcactagtaaatcatgctcacccccaaatccttcacttggggtcagctactgtaagatccccgcctaaagcgggtggtatctcagaggcagcagataacacactgtgtttagagtcagaaaagttgtgtttcctctctgcctgtttcctctctgccactcgccagccagccgtataatgtttttaaagccatgtcacctcacggtgcctgctttgtctgctttgtaaatttgggagtcacaattgcagtaaggatgaaagaaagccacatatgtaaatgtatcttgtagcatatgaatccctctgcagacatgaagcgctattgtgcaagtctgtcrcattatgggatcaaaagtgcaattcctagaagtgattggaggtatggtggaagcagcaggaagcaatgtcctggaagagaggatttttcaagaaagtggttggcagcatattttgctttttgttgctatgttcaaaggcaagggcggggggaaatccttactacatagttttgggtctaaataacatgaccacttgtgggaaaactaattaaaaccactaataatttgactgaccttcactgacttggaaacacccagtaacagataccatatcctcaagagacaaagctcagtctccatgctgaaaacattagaggcaagctgatagctcttttaattaaatgtttgatacaatgagataaacagcaaaattcctggagtaaataacctatatgctcccagaagattaatagaagatacaccaagaaagtctgcaaaaaaaaatcaatattgaatcaatttattgtacactgtggttggttttgtttttgttttttgtttttgtttttttgttgtttgtttatcatgaatacctgtgtaacaactcaggtttacaatgcttttaagccattagtgcttgctgtgaaataatcatattggagcccatggtgtgctcagatgagctgggacttaaattataaataggtgaattcatgggtaagatgcttccctaggaattattaagagaaaattgcaatgttgatagggatgctttccaaaatgttgggaatcactctgacagaggaaatccatctctgggaggcagatttatgttgtgggaagagcaatatcatgtttggggtcaaatggacctgggttcaaatcctggccttgccatatgattggccttctgtatgtcagtatccccttaggcttaatttcctataaaagagaagacattatctcctttctggcaaggttgataggaggattagaaataatcctcacaccatgcctggcacatggtagatgatcctgtaatgtgttatttccttcttctaccctcctcctttccactcccccctctcattcctccccctctccttctctttgtctcccttctcctcctactccttccatcatcttcatcatcgcctgactcaaaccattcttggcttctggggcctgaaatgttattgcactgagttggtcttttgtgacaaccaatggagggaattgaggcaactgctctcagtggatgagcccaggaatgtgttctcaaggagccatgctgtctctgggcactgtgctgctgctgctgagtggtcccagttcaggcagccaggcctcctcccagctgatcctctctctgctcaaggacacacctgcttgctgctcacatcaagaagcacgtgggacttcaccaacagaagactgtactagaaataggggctccagttgccagatgtcccttatttacaggcacagaagacagatagatatttttaataaatgggtagtttttggttcacaaaaaaagaaaaaatatcttggttaattgctgcatttttctggaaattttatctccaagtgttgcatctctacctcctccatcatcaaatrcttgccatgttttagtcacttggatgaccttcagacatgcctccatattggatggaaaaaaaattagaaaataatcctctgttctccaaactgtaaggagacaggcttcattgtttggctgaaatgtcgtgggtaacaacaggtgatctatcccaagcattagaggatgccaggtgttctttcaaacactataagatttgttgcaaaagcaatctccaatttacagatagagaaattcaggctcaggagcttaactggttgctccaaatggcgcagtttctaagcagcagatgagaacctgaacttgtctcctgtaagtccaaagccaggtgaaaccagttaacctacacagcaagggaaccctgcagagaagccaggggagttcctctgactccagatattgtgattacattgttctgtggtcttgctgacaatggagacctctgtcctaccccttcctttgctaaagcccatattggattctttctgcttgcacgtggaactctctgggagaaagtcttgctaggaatcattctcgcagcaagcacggagtgtgtcctggatgtagaccctgggacttaatagatgagccatccttgccccctcactgtttttcacgctgtaggtcatgactctttagtgagccatgaaattaatctaaggattgcagacatttttttaaaaaaatagaacataatggataacctcagagtatatcacagatagaaagaatgagtgctgtgaaatttcacacatgtgcatggagtggtgatgggaaacgtattgtgagtcatgctttaaaaagtttgacagtcttcagtctagtggaaaaggttcctggagcttggtgtcaggctgaattttgtgtgggtgatggtactatccaggccagagaagcacggaaaccatcacagagactgaatatctatctctgttactgtgcaacccagacacagggaagaaagtgaatttttaaagacctatgcagctcctctgcaacagacggggagtgaagtggaaggcatttagtcaaataggccatctccggatatctctggagattgggaatggctgctacaaggagatttatgaacagcactattacctctctcctcccgagcaggcggctgccatgaggatgagcctgggcttggccttttgagcttttggtgattagttaaggcactgcttggtggagtgactgcaaaaagcattttgctgttcacatacacacacatgcacacgtggacgcacatactcccagggcaaggcacaccctggcaggaggatctcatttggaaaatggatggccacttctcccaaatccagttatgactgcatattaggcagcagcatgcctaatttagggaaaacgattttcaactggaaattttaattaacagtgaagtgaagtgtgagtctggaaaaaagaataatgtttctagctggtttgactcttgggtaaatttggacacttaccctggcggttcttagttctgtggaagacacactggtctggaagttggagagactgctgcattgtggtcctggttctgacactgattttctgggtgctcttcccctcctggggtctttaaatctttatgtctagatgaggagagagtcaatagcaatggtctctgaggaatgatagagttaagacctcagcctgtggtcagacgcatccgggtttgaattctgggccactgcttggtagttgcataatcttaaatagatcacatagcctctctgagcctcagttttcttatctgcaagaagcagcctctaagattaactacctggcatgggtttgtaaggattaaatgacctgacgtttgtaaagttcttggcatagtgctggacccaactaggttcccaaaaagtgttagtcattgttgttattactttctagttccagaattcaatgtttcatagaaaaatgaggttcaggttcctttttcactcataatgataataacagacggtaatcatagctttatttttgaatgctttctctggtccaggcactattccagttacttgacaaatgtatgttgagatcttcatggtggccccccactctacagatggaaaataaatggaggcagcatgaagtgaatgtgttatctagggttccatagcttgtatgtgatagaacccaattttccaaccagccagttcgagctcctgcttataaccacagcccgccaccatctctagtgtttagctgtatttctggaactcagatccagttctattgattcgactctcattgagtcacctgaaacatcgaagctgtggacagacagaatcatccaatccatcagagaagactggtgatgcatggactacaggcctttatggggggcttgagtgccgagtgctgcgtatccctgatagctaaagatcaacagggactctggctcaacaagtattcatggagcctgccatgcactggcaattatgcctggggaatgttaggcactagataaatagtgcctgcaggagtgaatgaatgactgagtgagtggagaatgaatgagtggtaatatatagtcattttctgggtgaggtgaaggtaattataaatggagtttagagaagggagtgattggtggagatcacagaaaatttcatcataaagtggataaatggactggactaaggtagtaccttaagttcagctcattcagcatttctaagtactgactgtgtgcctaacactgtgctagtctctgtaatggcactgaaaagttcaactcaacaaatacctatggagcacccagccgggctctgtgctaggatctgagcagtagtacagaagaaaacagatgctgtgtccaccctcctggagctcacagactggctgaagatgtgactaagtagaaagaaagaccaaaaagcaacattttattgtcatcctgccctaatgcatgcatttacctcctaacaccagacaaaatgatcactaatttattatttgttctctcctccccctcctcccttctctttcttttyctactctctctcttcctttctcgttctctctccagtttcagagacctcatgactattccccaccttttcgatttgggacagtgcctaatggaagcacggagagaaacattcgsaataactatccctacatgcatcagtacatgaccaaatttaatcagaaaggagtagaggacgccttggtcagcctgaaaacggggtaaggatggcagtttccttttcaccacaggtctgcgagcgataaaccttacagaaattgactctcggcatgcctcagttcctatctgctcccattgtatttctggagagtgactgtggtccagatgggccccagttgagggcagtttttgttaatctaatgagcatcccaggtttccttctgagttgggtgaagaaaaagcaaatccaggatgctttgaaatgcacagaaacagaggggtttcttaaactgataaagaagtttgtccaactccataggatattttaacaaatagaaagatccaagaaggccaagagtttaaagtagtgaaaacaaagatttttatcagattttaggtaggaggttttctgagtgtggggaggagtagcttgctagtaggagctttatkaaaaaactaattgtataacattgatgaaagagaaagaaaagatggsagaaaagcaatgagaactcaaatcattcaagttacagttagcattcctctctgtctgttggcattgtggagtgtaacacagactccatagctgaagatgtaaagaaaagatagcacaggggttaggagtttaggctttggagagagagtttctcatacctcatagcctcatatctaacatgggaataataataggacctaagagagaaaatctgatggaaagccttttggatgggaaatagacagtacctaaatgtgagtgttgttatttattgtaaaggttagattctattccatggactcttctgaaaagtccattgttctgtggtcttgctgacaatggagacgtctgtcctaccccttcctttgctaaagcccacattggtttctttctgcttgcatgtggaactctctgggagaaagtcttgctaggaatcattctcgtaggaagcacggagtgtgtcctggatgtagacccaggaatgcatgaaatccattttagaaaggattaaatccaataaaaatgrttttattttaaatgacagagttgtttaatgaggggattttgattatccagaaaattagctcatatggggcatttcagttgtcacagattcctgcatggaaacatgactgtaggtgcattctccttgyggcttaataaataacctccttttcggctgttcggcaagcccattgtgaaggccttgctgctggctttgtgtctggtagggggagacagaggcccctctaaagcatcaaagcccagatttctgcatagaaatcccggtagttttggctgtgagcattctgtcctttcagtctgtgcctttggaatgtctttggcatctcagcaggggctgggagagcatttattcagaagttaagtctatgatttctgaaaaactcattcccacagtgctcattctggtttggaatgatttctttaaacttttgaagtataacaaaaatgcagaaaattcacaaatattaaatatgctgctttatggcttcgtacaaactgatcatccaggtcatcactccctggaaccccgccccacaccctcttccagtcaatatcttccacccgccacctgcacttctaaagccgtagattcttggtgcctgctgttttaacatagaaataaagccacactcttttcttttttgtcgtctttggctcaacattgtgtttgcaagattgttgcatgtaatttcagtgctttcattctcattgctggaatgcascacacatggatgtctctgtcctaatcttgatggacatttgggtaatgtcctattttggggccattatgaataatgcttcttttgttaatgagtgagcgcatttctgttggtatacaccgaagactgcaactgctgagccatagaatatttgtgtcttccactttcacagatacctgaaaagaccaattgttgatgactttacagtttagccatgggtttgggatttttgtttgtttccattgtggtcttttaatcaacatatactgttgttttggacagaccatgmgcacaaaygcagatgataatggttggagacagtggttratgcctagctggctttctctccctccatttattaaccagagcacaaaatgggttgttttctttctttttcaatcttttttytaatataatagcaaaaaggagagaaatggaaaccattcgtggccataaattgtacaaattggtttctggaagccatataataattataacatccatcttagaaaacgtgggcagatggcagattcattctatactcaatctcccatgtgggggatgctttgcattgttactttaaactcagaaactagagctgaaggagtacaagtctttttttttttttttttttttttttttgagacggagtttcgctcttgttgctcatgctggagtgcaatggtgcagtctctccccgctgcaacctccacctcccaggttcaaacgattctcaacacactcagctaatttttgtgtttttgtagagacagggtttcaccatgttgactaggcacatcttgaacttctgagctcaggtgatcctcctgccttggccttccaaagtgctgggattacagtcatgagccactgcacccagccacaagtcattttttaaaaaataattcaatatactcttagggatgaaagcacagcagttatcattactggagatttaatttcattggagttaatatttggggaaaccacatacatgtttaacaggctccttgattaattatttaaatttttttttttttttcagacagggtctcactctrtcacccaggttggagtacagtagtgtaatcatagcttattgcagcctggacttccctgggctcaggtaatcatcccacctcagcctcctgagtagctgggactacaggcaagcaccaccacacctggctaatgtttgtgtttcgtgtggagatgaggttttgccgtgttacccaggctgatttcaaattcagaaggctcaagccattctcctgcctcagcctctcaaagtgctgggattacaggagtgagtcactatgcccagcctaaattaaattttgaatagataagatatttatatacgtcaaaaataaaaaagtacataaaaagaaaaaaacagtgaaaagttttccctgcacactattcctcatctagtacccctccatggtaaccacatttactctgtgtatccttccaatatgttcttctgaatctttctatattaatgcataaaaagccataaagttattttttatagagtcataatctttcattatgcaaatataccatattttatttggtcaggcctctattgttggacatttaggttgtttccaatctttygctattgcaaacaaagctgtagtgaatatctttgtattgcgtcacattcagtgtagaataaatttcttgaaagagtgggtcacagttgcaattttaacagatattgccaaatctccctccaaaggaaattcatacttaccccatcagtgcatgaragagcttatttctccaaagttttgccaatacaatgtgtaattaatctttcaaaattttgctaataggtaaaaagtatgctgagatataaatttgcacttttctcagtaaattttggccatatttatatacttaagagccatcggcaattccttttttacttttattaatatttctattggtttgttggtctttttcttattaatttatatattggacagatgagccttttgtgatgtgattacaaatattttccctatttcttttttagtcttttgagcttgcttttttttttccatgcagattttatcttttttgtagtgaaatatatcaaccatttgcttatggctgttgaattttgagacgtaattcaaaagtctttcatcattctttattacaagataattacctcgtgttttcttcttttttggttgcattttttaatatttggaatttttcttggtgggtggtatgagacatgacttcaactcctcagatgattatgaaaaccagaatatgagaattaccaccacagagctacaccaagatccgatcaactttgtgttgattgtgtcttctcaacgtcccaccacgagactgcggtctttcaggtgtccacgtcaccacactcacaggccttttccttccttttcacatctcctgtttcctttttaaaattttcattatgaaatatattgctgtttaaggaataataataatacaatgaaatcttcttgtacctaccaccgagccttaaaaaaaaaaagtcattctcgtcctttaccacgaccagcatctgtagaaggttccatccctctggaaggttgaagaaggtaacctcatctgctcccgaattgctcagcttttgaacattcccccaacaccctagaatccagcaagccttgacttagaacatccagagcatgtggctcagctgctgggtctcactgctccacccacacgtttcagtaacatctgctgcctagcaaagccacgtgcatgcacaccagggtcagtgaaattgtgggttgtaattttctgggagagtcctgaacaccagacaggctttggattactgtcaagtgacagtcccagctgggtttgagtctggactcgagcattagctagctgtgtcctgggacaagtcatgtcacctctccaagtcactttctagtttccccatctaagaagtgaaatggttgaattctttgatctctaaactagttcatgagattcttttatctgtgtcaaacacttakgaagactcagacaaaccacatatrcaaacaactgtcagttttgcagaaaggatttagaatcatgccccaaaattgggtgcctccaagcctggccaatggaccaactgtacctgaatcacatgattacctgtcaaaatgcagattcctgggcccaggacaaggctttctctctagctatggagcctgtgaatctttattataataagcatcattccccgcagcacgccacaccacgtgattttgagacacacgaatatttgagaactactgttttagaagtccaacacactattcattgtgcaacagagctgagaactactattttaaaggagttgaagaaacacattttattgggataggcatatacagagtagacaagccaaatgcttgtctttggaatccctaattttttgaagaaaggcataggcagagaaaaacttgaaagctaagttttactgtttattgaaattcataataaatggagataaagaaattatcagacaaatcagtgagaaaaaagggtttgatgtgtaaacatcaacagagatgggatttttcaggcacagatctgttgtgccttgtgggactcctgtgaaccaaaggtggatgagcgtcagtgaccccaggtttctaggctaatgcttctcaagcatagcctgagtctgaatcagaataggtgctaataaaaatgtagattgctgagccccactgagccagttgaatcagaatctctgtaaggaggggtctgaagatctgcatggtttaacaagctcttcaggtgactccgatatgccctaatcaaattttaagaacatccactctagaagagggagctgaagctgaaatgagtggagacagatttagatttacaaatgctcagtcatcagaagctgatgtcctccaagccattttggcatgggggcaaaactgcaagcgtcgcacatatgccagatttaaattaaacaacgtccctagaactccgaagagcctaatatttcaagacacagtgggatagtttgtgtttttcttttaattgaytttcatgtacaagtctgggtgtatacatttatggaaaagtcccaatttccttagaagcctcagttttcagctctcaggatccccagtcccctgtgcgatttcattctcagcacaatgttaaaaaacaggtctctgttggtttcctttacatgcagtagttagaagaattggaagagaggattgtcttttttcccagtattttttattgtgataaaatatgcatagagtaaaatttgccatcttcacatttttaagtgtatagttcagtggtattaaatgcattcatcgtgtggtacaaccattaccaccatctgtctccaaagctctttatcttgtaaaactgcaactctctatccactaaacaaaaactcctcaacccccttttccctagcgcctggcaaccaccattctactttttgtctttatgattttgactgctctaagtacctcatctaagtggaatcatacggtatttgtctttttgtgactagcttatttcacttaccataatgttcatccatgttttggcatgtgccaaaattttattcctttttaaggctaaacagtatttcatcgtattcaggtaccacattttgctcatccattcatctttcaatggacacttgagttgtctcagcattttaactattttgaatcatgcttctgtgaacgtagatgtgtgaatatatttttgagactttggttttttttgttggtatatatgcagaagtgaaataattggatcatatgtcaattctatttttagttattgagaaacaaccatactgttttccacagtcccatttgcattcccaccaacagtgcacaagggttccaatttctccacatccttgccaatacttgttgttttctgtttttctaatagtagccatcccactgggtatgaggtggtatctcattgcagttttgatttgcatttccctaatgattagtggtatcgagcgctttttacctgcttattgggcaattgtatttattcttttgagaggtggatatgcaagtcttttggccattttacatttgggttgtttgggttttctttttttttttttttttggttgttgttaggttttaagagttctctgtatattctggatatcaatcccttatcagatatacaatttgcaaatattttttcctattccatgggttacctttttatattctagctattacattgatagtgtcttttgatgcacatttwaaaaaaaatttagggagtattgtctttttaccaataaatatttttctaaaaggcttgagttgtcctcagtgacatgtctgtaaaaacaaaagaacagtgtagtcccatctccgtgtatgtgtttgaaatgtcttcatagaaagttttgcattgaaaaacaaatgagcactgaattcctatcctagagcacaggtttgcaaagcctgtgggatttaggaatgtacctttttttttttttttttttgaaacggagtttcgctcttgttgcccgggctggagtgcaatggcacaatctcggctcaccacaacctctgccttccgggttcaagcgattctcctgcctcagccttcccgagtagctgggattacaggtatgcaacaccatgccctgtcaattttgtattttttagtagagatggggtttctccatgttggtcaggctggactcaaattcccgacatcaggtgatccacctgccttggcctcccaaattgctgggactacaggcctgagccaccgcacccgsccaagaaggtacatttttattagtgcttctagtgattcagatgtaggtagtccatgtctttgagaggttagttagttgactattgagaaatggagttctgtagtgactaaacaggacaaggaagagggaggatatttcagaaggagggtgcaggatgggtggagatgtggcaaaatgtgagtttaggtttaggcatattaagttggaagtgcctttggaacaccatcatcatatgtccaggcatctttgcacttaatgtgacctgacaattagtgagctacagacctgagcacttcatatgcctaatctcaattaatcctcacaacacccctacgatctgggtaccattaatatcccttttaagagatgaagaatgtgaagctcaacaatgttaacctaattacccaataggctattcagctaagtaactacattgcagaattagtaagtatagaagttaggcttacttccccacttggaaatgccacctaggcagttggaaatayggggttatggttcaggggagaattkaaaactaaagttagatattacatatgtgcatatattatagagtacatatcatattaattgatgatctgagaactgataaaatcacagcattatcatttctatgctcaaaagaaactggttcagggatattggcattcccaaggcaaaggtaaaccaggagagtataagggttgtcactgaggttcagttgctctgcagagcaaattttttcaaagatgccatttgagcaggttttatttgctgtattttatcagtcaaacagaatcagacacaaatggttcatttccagctgctgaattcgaaagcgggcatagacatcagggttcagtgagctgttctaaatggggtagcgtcatctccagagaaaatcagatcaacaatgacctggtttctgagatccacccccacactgcaaacaaagctcaaaaataattgcttccacatcatagagttagaaagttttttccttaataaaaactcaagtaaacacagacatcttttttttttttgcgggggggtggggttcttggaattatttcctggtaagctctattaaaacaacgttaaaggattttcaaggccacctataaaaactttttttaaagtagaaaaaaatgtctgtggggggcaggagttaaataaagtgagatcataattctttaaactcagagacggaaaaaaaaaaaaaggyaaaaaaaacagactaaaaagaaatatatcaaaatgttatcggagatgctgctaggtgattgggatgatggactttacatctttttacatttaacaaattttcagcaacacagtattacttgcaatagctagaaaaaagtttcttctgactataattctctattttttcctgcatttcattcttgtattgtcaacgcatatatacaattcatacaagttgagtcggtgcatatgcaaatttgttttgcttttctcaattaaagtagacagttctgttgtttagtttccacatttaaggaccaggtgataattycattgagctagaggaatattaattaatttagcttttactgctttgtgttttcatcatgccttaactagcactgaagggtactacaagaaatagttatttttgaaaaggttgctgatacggttattacaggacagcttgtggagaatgtcgtcctgtagcatccctcacacttctgtacgatgaagagcattgctttgttctgtttgasgcacgctttgatcttgttgacaacacaattcttataacaacttatggttttctttttgcttggattaccgcacaattcagagcttaatgcatgattcttctttcacaattgtggagcctttggcctgaaaatctgtttactgactttccctaagactgagctactattccacttctgaattcacttaactccaattgctttatccgtatgtgtaaaccttattctattctattacagtgagtgtgagctacctgaattgctttggacacaaagcaattctttgttttttaaatttttttattgtgtgtttttatttattttattgtttatttcttttttctttcttttttgtttttgttttgagacagagtckcgctctgtcacccagactggagtgcagcggtactatctcagctcagtgcaacctccatctccgaggtttgagtgattctcatgctgcagcctcccaagtagtgggattacaggggtgcaccaccacacccggttaatttttgtatttttagcagagacggggtttcgccatgttggccaggctggtcttgaactcctggcctcaggtgatcctcccacctcggcctcccaaagtgctgggattacaggcgtgagttaccgtgacyggcttaagtgaggcatttctaactaacagattccatttattgggagcttacctgagtgccaggtactgtgttaaatgctttgcctccattatctaatttaaacatcatgacaaacctatatgacggtgaccatcargattttcatccacctttgaggaaacaggcattgagagattaagcagcgtgtctgggatcaatcttacgccagagcccctgctttgagtcacaatgtaaawaaaataaaaaatatgactgttctcataatattccacaattaaggccgtttctaatggcccaccattatgcaaaacctagtaccaatttcgtcatatttttacttcaaaagttctccttttttctttaaaatctttactactgtttcaaaaggggcaatgtttcttcttccattgagataaggaaaataaatgaatgtgtggagcaagagcgtggaggaaatgaatttcttctattcgagccaagccacaggaagcacatggtcagaaaattcctcctggggaagaactgtgaagaagcaggaactccctggcaggttctatatccttagggatcacctcttgtttgtttttgtttgtttgttttttgagacagagcctcactctgtcaccagggctagagtgcagtcacgagatcttggctaactgcaacctccatctgcagggttcaagtgattctcgtgcctcagcatcccgagtactgggaccacaaatgtgcaccaccatgtctggctaatttttgcacttttagtagagacagggttttgccacgttgtaccaggctggtctcaaactcctgacctcaagtgatccgcctgtctcggcctcccaaagtgttggaattacaggcatgagccaccacacctggcccacctcttgttattgcttgctgaactcacatgggaacttcaaacatgtgacctcatttcctcctgattcaactctgccagataatcattttctccattttatagaggaggacactgaagttcaggcagaagccacagttcgtctgaaggttaacatctaatgagtagcagtgccagcattcagttgaagacccaacatcttttctgacccatgatgttgtgctaacsctctgcttgtcctgagaagggaacagctctggcaagggttgtacctatctgttacaaggtcgtggggttaggagatgcgaagttgctctcacccatgaagcatcacaggtttggaatagctcagcttcctttctccccacagtaaaattataaacacatctccactgacccaggtgctaaaaaggtcatggtgttaatgtatcagccctgtgtgttctcttgctgcagggagaagtgagttttcctggcactgggctcactcagaccatggaaagcctctaacacaggttaggagacactgtttacaccccatggaaagtgcccggggccaaccccagacagctgcctctcccaaagcaagccccacctccttcctcccatagagaaatgcaggtggaggagtgataggaactcaggtactgcaccttcaggtgtccccagtgaagtagtttcctagagtggccataaccaataacaagcatggtgggttgcaacaacagaattttattctcagttctgggggccagagtccaaaatcaaggtgttagcagggccttgctccctctgaaggctctaagcgagggccattctttgcgtcctccagtttctggtgcctccaggtgtttcttggcttgtggctgcatctctccaatctctgcctccatctccaggtgaccttcttcccttggtatgtctcctcttcttctaaggactccagccgttggagttaggacccaccctaaatccaggatgactttatctcaagatccttaaacaattatatctgcaaagacatgattttcaaataagggcatactctgatgtcccaggtgtacatgaatttggaggtatactcacctaggctgtagtgtggttttcccaacatcacctcctgataggtatccgacatcagtgctgccagtggaggctgtcctcaggtgtcttggggaccagggraagaggccatgctgcccagtactttatctgggtgtgctgtggggagtggtggtgtattccacaggaatgcacagcacacaggtatgcaaagtggattcttgcgtgtgaactcccaccatcaggtggtaattgtgctggccaatttcccataccttccctatcccctgcctcctggtctcagttgtttaggtagccctcactccatgccaggaagtttttctttttgagacagagtctggctcattcacccaggctggagtgcaacrgcgcgatctcggcccactgcaacctctacctcctaggatcaagtgattctcctgcctcagcctccagagtagctgggattacaggtgtgtgccaccatgcccagctaatttttgtacttttagtagagatggggcttcaccatcttggccagactggtctcgaactcccgacctcaggggatccaccctcctcagcctcccaaagtgttgggattactggcatgagccaccacacccggccccagcagcttttatgagtgtattacctgtaactcttagtttaatcttcacagcttctctgggaggttggcatgcccagcatctccactatacagacagcttaagtcatgacgcaggcacagtgctggtaagcttcagagctgggatttgaactggctctaggagctatgcccttaaccattaygctatattgcttctcattaaaaaatgtatcctcattgtaaaaaaaaaaaaatgaaaatacagataagcattcctttggcttggcatctcaatgccaatctgttgtctgtttgatgtacgttccatttctccaagacttttattatatgcatttgcatatgtttttgtttttctgagacagagtcttgctctgttgcccaggctggagtgcagtggtacgatcttggctcactgcaayctctgcctcccaggttcaagtgattctcctgcctcagccaccagagtagctgggtttacaggctactacaggggtgcgccatgacgcccagctgatttttgtatttttaatagagatggggtttcaccatgttgcccaggctgatctcaaactcctaaccttcagtaatccacccacttcggcctcccaaagtgctgggattacaggagtgagccaccgtgcccggtctgcatttgtatatattaatatatgtccacacagaataaaattttattctgtggaatgctatcaaactctatgcagtatgtcacagtttggttttcagtgaacgatatgttttggagagctttccattttttgccttcattctctttgactgctggaaagaactccatgatatgcatgcatcagartatttttaagcattttcttctcactagactttttttgggggggtgggatgagggctatcagtcatatggctgtgttaaggatcgttggggagtcctctgtgtacctctacaagtggttttctaggaatgaaaccaggacatagaatttctgggtggaagtatttatattttcttgaagccttcaaacttacgtagtcaatttatttgatttgcttatttttatattttctgagtggcctcttggtgcagagagtggattttggggtaagaaacgcctactttaatattcggtctctaataccagctgtgtgacctttggcaaattaaataacctctctcagcctgtttcccacatgtgtaaaatcctatttcctggaattcctctgagaaataaccaagttgacttatggaaagtaccctgcattctatctaacacataatagcattttcacaaatctcgatgtttttcggaatctctctttcactctcatgttttctggcccctgagagtccctgtctttcagtcctcctgtgtgacaagttccgtgatgtcgtcactactaacagtatgatggggtgcttaaaggataagcatcctggattcgaattcccactccagtgacatccagtgttgggaccttggacaagttattaacatcttagactccagtattccacttttataaaattatactaattgtgctgccttcacttggaaatgcactgtaaagattaaatgagatattccggcaaagagtgcagtgtccagcacatagtaaatgttcaagaaaagtctgaacaaagaaaacctttttgagccatctttctaatattataaaaacgctatgcttcgtgaaatctgcagcagaatggttaggtctgacctcaacccttgaaaagtacaatctaagaagctctataaagagtagcattccagaaagaaccaatactgttcctatgtcagagcatgagttgtggtgaagaaaatacagcatcgcatagtgctttgcaattcaccaaacaaattcatggctgggacttcattcaaccagtgcataaacataggagacagattatgttttccttcctgtcagatggggaaatcaaggcttagagaaatatttagactttcccaactttccacaaagtatgcagagccagttctctgaccctgcatcccagctgaggccttgcactgggggagcccggcaatggtgtcctgaaggcacactgctttggtgagtgacagaccggtctggaaaaattgggcggagatctctgggcctcagtgtcctcatctgaaaaatgaagagactggattacatactgtctcaactccttgggtatagtcagtttgggtccaacgttacatttaacagaaacaaagtacttacagctagatggacttggacaatcatttcaatccttccctatctttgaaattagcagtcaatagacaaagtgggtacattcatctcttgggtattctttctctttctctctctctctgtctctgtctctctttctctctgtctctcctttctctccctccctccctccctctctccctccccctctccctccccctctccctccctctccccctccacccttcctccctctctccccccactttttccccctctccctccccctctccctccctctccccctccccctcccccctccctccctctctcccctccctccctctctccccccactttttccccctctccctctccatctccctctctctctctgttagttcattttcacactgctgataaagacatacccgatactggataatttataaggaaaaagatgtttaatggactcaaagttccatgtggctggggaggcctcacaatcatggtggaaggtgaaaggcatgtcttacatggtggcaggcaagagagaatgagaaccaagtaaaagaggaaaactcttctaaaacaatmatatctcatgagacttattcactaccacaagaaccttatgggggaaactggccccatgattcatttatcccccactgggtccctcccacaacaggtgggaattatgagagctacaattcaagatgagatttgggtgggcacacagacaaaccatatcactgtcctcactccttccccgttaccttcttctatcctctttttctctctttctttccccccttttttctcttagtttcttgcaatatatctcactttttattctctccctctctgtaccttactaacatctctttctccttctctgtttctcttcctcactttctctttctcatcgtttttctctctttctgtctccgtcttcatgttttgcttggtacctccttccatctggatctcttcctcctccctagttctcttcctctcttctatcctctccccttctctgcttctctctgcctctgtcttacaaaatcactcaggatttattatcagctaaaaaaataaatattaaccatcchtcttttttgcccaattcacagtgaatattattggtaaaaaaataagccacacaaaataaactgacaagagctgaaagcacacagggtgaaatttggtattgactaaaaatccatagatgactcaaatcttcttagctaattttggatctctgtacaattttgacccaggagaaatggacttgacttggtggaaataataaccacaaaagaaaactcaaaatggcagaagttataaattagtaaaatttgttgtggtccaaatcctgatcratgaagcaaatatttataaaatttaaacacaaaagaattgaccccagtaaaaatgtttccaaaaaagttggaaacaatttaactacgctatgcaagacatcgatcgaggaattaaattagcttaagggagtttgctttgaaaaatgcttcctttgtgaaaattcatcaatgttggtataactctgactttagagtttgtattcacaaacccagaatcaaaatgtgattctaggccattttcccaaagccagttttagaccattctgtgctgatggcaggtagtccctgtataggttgagtgtctcttgcccaagtaaacaatttcaaagcttgtcatgcctcagtggtgccatttctggggatcatgaatgcccttccccgatgggtacccggtggtgatccacacctccactgcttctctgcataatgataccaccactgccagataatctcctaaatcccaccagcatctgcaattacaagcaaaacaccttcacttccattttaatccatccaacagccagccctgtaataagttattatttatttcccatcttacagatgagaatactgaagctcagagaggtcccatgaccgggcttcactcatggagctggtgaagataaatctgaattgtgttccctgttccacagttgcccaaacatgccaactgacctcaagtgctaatgtgttcctcttcctggcaagggtttggtttgatctgaaaaaaatatattcagttatcatcaaagagatgttttaattttcagtaacacacacacacactcatgtgcacatgctggtttcattaattcatcaagacaagcagtgtcttgttaaaggcttcttgaatgttaatgaatgaataattaactttaactatataattagcctttaaatgtgctgagacccccagagagcatctgcaaacatgcataagaagatgatgagctaaaaccggaaacttttgattaggaaatgtcaagccgcttgataatacaagttcccatccctaatgtgtccatgcctctactgtggggtatagtcctccccagggtagggacaattagatttgccagtaaacagtcttggggctaggattggactttcaaggccattgtgcaggtataagagagacccactgactaaaggaatggggtcagatctacacacttgtgaaagctgtagcagctcttgagagctgtcaataaggatggcaggaaaccactaggttaaagtagcatggggcacatgtgacatccgtccttaccttgcttctttgctaatttacagagaggaggtcttatttccccctcttgttctgaattactgtcatttctaatcatttgtgctccttgaggactgccggtgatggagaaggtaatggcacccgcacagccactaagatgcctggcagggggtgagcctgtcatgtagccagcatagcatggcattcttttgagctccagcactgctccagccctcatggtgtgaagccaaggtgtctttggtctgtcgcagacattggagaagagggatcgctcctctccaacatcttctatagggagtggaggcagaaaggtggcatggaccccagtgtgtcagayggtgtctctgtcctcatcacaggcaacatcccacagttctcagacctgacctctgaacgtcctcctgcccagtgggagaaacacaaccctggtacctgggtaggaactgagaatgtggcacaaagacaaattcctcttcaaaaaaggaagagaacatgcaccaagcagagaagagtaaatgggttcccttagctgtgtgttcttaactgggctttcagttggatgctcttggttctaaggaaccagcccctcagtggtgttccaagccagtgctgcccataccaggctgcagcctaacacgtcactctgagtccagcagtcgcagctcaacccctccaaatgccattggtccacatcagaccaatactctgacactgtctactatggaaattaagcacttgaaatatggcgggcttccgtttcaggtggccttttttctctttcttaccctccatcttcaacaagaagctatggccacctatacctacatgtcttccgatggactggagtagactatgttaggggcaagagttttctatggaggtaactgcagccccttagatgactctgtggctgttgggaacgagacagatgaagtggaacaacccaccacgactattgaaactccggccgctctggccccatccttgcctcttctgtcaaaacatttggcttatttatagctaaaaccccccatctgaattttctaagtaatagagctgcctccatttactctacaagtcttatggatagcatggcttggtcacagtggttatgtcagtggtctttggtgtcagactgcataggttccaatgccacttttgacacgtatgggctgggtggtagtgctgagtcactttactgctcaatgcctcagtttctccatctgacaatggggatggcagtagtatgcccatccctgcacaaggagaaggaccaaaaaatataataatgcatataaagtatgcagaactggatttctcctataggatccataaaattggtgagcccctttggcataaaatctgaatttgattgaatgcatttatgtgtttcgagcatttgttatgttctgagcattgcacacatactttacttatataataacactttattcccarcagccctctaagggcaaatattgttggctccatttttctttcttgtttttttttttgagatggagttttgctcttgttgcccaggctggagtgcagcagtgcagtggtgcaatctcggctcactgcaacttctgcctcccgggttcaatagattcgcctgcctcagcctcccgagtagctggaattataggcatgtgccaccatgcccagctattttttttgtaattttagtagagacggggtttctccatgttggtcaagctggtctcaaactcccgacctcaggtgatccgcccacctcggcctcccaaagtgctgggactttaggcgctagccacygtgcccggcaagttggctccatttttcatagggaaaactgagcctgagaaatgcagttgctttgcccaaagtccctgttgacaaatctcagagatttaggggatttttttttctttttaacaacaggaacaattattttttccaatagaaaacggatcaaaagtagactttttgggtcagagcaaaaagggagacccagagtcctgctccctaagccttccccttgcttgccacagaacagctagggctgtgccgcaatagcccataggcacgtgggaccccctacattacaatctaaattaatgaaattaaatgaaatttacaactcatttgcactaaacatatttcaagtgctcgatatccatagtagatggtgtcagagcatttccagcattgcagaaagttctattggacagtgttgtcctagagggttttataatataaagtctggaaatatcaccaacaagccccaggctgccttaggctttctgaaccttgtctgcttatagacagaatagaaaaataataayaataataatatcttgctactggacagttgtgagrcctcagtgggatgatgtctgtgaaatgctaagtattattttataaaacatcttgcagacaatggccatctcttttttwaaagtgattattagtgattccatttgttattatttattttaattcatagtttgttcctgcatcagtttgctcaggataatggtgtgcacctccattcatgtctctgcaaaggacatgatgttgttctttgtcatggctgcatagtattccatggtgtatatgtaccatattttctttatctagtctgtcactggtgggtttgattgaggttgatgccatgtctttgctattgtgaatagtgctgcagtgaacatatgtgtgcctgtgtgtttataatagaatgatttacattcctttgggtgtatacccagtataggtctttgaggaatcgccacactgctttccacaatggttgcactaatctacactcccaccatcagtgtataatcttttctttttcttcacaaccttgccagcatctgttattttttgactttttaataatagccctttctgactggtgtgagatggtatctcagacaatgaccatctctctgggaggggactgtgtatgccccaggatatttttaaacacgcagttgtctgtagcccattgtgtgtaggccccagctctctagaatctagaaaccagttcatgtggccctacagtttcctttctgtgttgtaatcacttcagttctgacatggccctaagatgacagtcaggccatggagggctggcccaattgtgtgcctccatggccagacccctctgacagcatgaccaccagcccaccccagtcatgccaatgtgtaactgctttggtcagagtcaaccacatcttttgcagctgtcctgcctctgacttttcagcattgtgcttttataaactttgttcccaaagaaaacttcctttattccttgtactcatatgtctgtctgttgctcagctcaaaaagacctgtcatgaaatatggtactgatttgaagatgtctatgcctgtccataaaataccaacttaaactgcttctggacaactcttatgtggttgctaggtacgtgtgtagatttccagcctagcagcacctcagtgcacagtggcttagcaggataggagaaggtttcaccccatgaattccaacagagggccctaatgtttgaatgtgcccatgtgtacatgtgtgtgtgtatatgtttattttttgaggaatggagagacgagagttgggtggtacttagaaagtctaaataaaaccaagtttctatatctccatggcaacatggatacgggaagtattgacgttgcaagtatctcagctttatcaagagaccaacaccttccacggccctaagtccttaggatacatgtgttatccagagtttcaatttccctatggatagccacagaatgtgactgttggctcacacaatcttagaataccacagctgaacaagtgtctcagcaagaccacaatgaacgccacctctcacagaggagaaaccagaaatccaaaaggagaaagtgactttcctgaggttgcaccatcatcctagcctagactagaactcaggttcctttcacctactactccagtgttcctgttacacaccctactcccattatacacaagttacttttgaccttgtataactctccatcccatatttctgcaggtctcactattgctggctgttcctcttgacttgctgtcatcaagccaagctctaggttgctccaggttacgtatgacagctctaggttaccatcgctgttgccaatcagtgcccagttctcttctgctgctgcttgatctgattccctttaatactctcagagcctaaaaccaagtctctgatacccctaccttgagatcaaagcttcakagtgtttctgtggatgagacaagtcctacagttttgcgccacctcaaaccattatagaaacaaaaaaaaattaaaatgaagaacacggctgtaaacctgccaaatagttttgttcccatagggagtccttcggcagctgtctctgaaaagatgcagtgtttcacatcctctctttgccatttttatttttatttttttgcttcactgttttatgttttcttgttaaagaaaggcaataaagttgagaaagtgtcatgaagttgagtcatctccgatttagttttcttacccattttagagttgagacattcatccctgcattccacagtgatcatttcagcctcgttaaataactttaacatttggaaacaatatmcaggactactgayagggatctaatcataattagcacctgtaatcccagcactttgggaagccgaggtgggtggatcacttgaggccaggagttcaagaccagcctgaccaacctggtgaaaccctgtctctactaaaaatataaaaattagccgggagtggtggcaggcacctgtaatcccagctatttgggaggctgaggcacaagaatcacttgaacccaggaggtggaggttgcagtgagctgagatcgcaccattgcactccagcctgggcaatggagtgagactccatctgaataataataataataataataataatatttaggcacagttgtgcccttggagagattacctgatgcttattttctggggtatgcataggatttctaaggaaatgataacattccacattttgaactgcatggtgatttcaaggatatatacatatgtaaaaattyatcaagcattttattacacatacgttatacctcaataaaaataagtgtatcaaaaaagaatttaaaagtgctatgtgtattcacatggaaatatattcactaggtatggaatgagagaagaaagcaatatgtgaaatagtttgtgtggcataataacattttcgggattaaaacaagggttggcaaactacagcccgtggacccatctgttttcctaaataacattttatcggaacacagcaaagttcgtttgtttacacattctctatggctgctttggcactatgtcttggtttcctagggcagccataacaaaggaatgcaacctgagcagcttaaasaacagaaatgactgtctcgcagctctggaggctagatgtccaagatcagggcatctgcaggaccacgcttccaccgaaggctccagggagggatctgttccaggcctctctcctgacttctggtagttccttggcttgcagcagcataactccagtcttcatatggcgttctccctgtgtgcatgtctgtgttcagatttctccttttaataaggacggcagccacagtggattaggggttcaccctacttctgtatgaatgttaggggtggacacagtgcagccccataacaccctacaacagcagagtttaatagctgcaacagagacggtatgtcctacaaagcctcaactatttattatcttgtctttatagaagaaagtttgccaatctctgtgtatgygtgtttgtgcatactcactaaaacatttggaaggctgttcactaacatgttaacaaaggttgaatctgagttatagaattataggtagctttaattttaattgtatttttaatacttttctatattatttggatttttwaaaattctgcaataatttctgtatgataaataagcagcacatgtatttcttttgggaggaaaaaatattcctatttagttcctttccccttcatacacactaccaccaaattcttctgccccttagtggtttattttgttctgatgcaaacctttctaaatagggcactgtcctccaccactgggagtgttaaggacaaacacttagcaaaccagcaaactcaactgtttactcacttgggtatatggatccttcatgtctttatttagctgcctcttgtaagttggagagaaaaggttctggcttttatctcctcattaaaaatagatccttttatgatgaggggatggagaggccatgagtcatcatcaccagcatgaaagaaagtgtgggatgctttcaggatcaggcctcaggagctggaccccgaggtggtacctggccacccctatgaccccctggtttcttgtcatttcaggaagctggacgctttcatctacgatgccgcagtcttgaattacaaggctgggagggatgaaggctgcaagctggtgaccatcgggagtgggtacatctttgccaccaccggttatggaattgcccttcagaaaggctctccttggaagaggcagatcgacctggccttgcttcagtttgtgggtgatggtaagaccccgggtgacccctttctttagggggacttgagaccctcacactcgctttgtttgctcctgggcttcccagtggatctttgcatgatgagtttgctccctaaaaatatttactgagttcctgtcacatgaaaccatggttctttaggttgcttataatggaaagcaattctagataactaaatttaacaaacaaaagtattctaaggatacagtctctctcaggggatttaggaaagagttaaataggtttagaaaaagacaagagccaggacagtcctggtgccttaagtgggaatttataggtcttctgtctagggcagtggttctcaaagggtgaagggcaattttgtccctcaggtgacatttggcaatgcctggagacacattcagtgatcacggctgggaatctgcttgctgatctaatgggtagaggccagggccagaagatgcaggaaaacaccttacagggtccaggacagccccctacatcacaaaacacaaaattatccaacctcacatgttggtaggctgtggttgagaaacgctgctgtacaaaattacataactaggctgtaatcagtcccaatttcactccagagaaaggatttctgatgcattttgaggtcaaagactctttcctagacttatcaggcatgactcacggtggagtcatgttgtaccaacatggcaactcatgttcttatcccgtggaggaatgaaggaaaggcaatctctattgcagtctaatgagactgtggcatttatagaactgtaaagccgcttgggccagctrtgtcaccagaagcatttcctcctgtctgccctttctacttcatagctggtgatctcactatagcccggggtttcctggcatggcctctagaggctggccgtggcttggaatggcaggttggtttcctttcaattgccaacacggaggaaataggaaaagcaaagtcagctcagatagcaggttaacaccaaaaatgagctcgstatgaggaggatagaaaggctcaagccagagggcagaagccccgttcaaatagtggaggctatattcagagatgattacagaacrtgttatgccaggctacaggtgggagagaaaaatctagttaccactacagtgaaatgcaatatcaaaataggcagaggttagctagtkcatagggttagtgtgaattcgaatgaagtgcacaattacttgtggcttcttatcttctttctattcacagagttaaatcctagattctcacagtgccatcaggcattctaaatgtgttttatatttaactcccaaatgagaacatgtgagtctttgaattctccatagggcatttgtacctycctcagatcactggccatgttctctgctgtgtaataatgatttgtggctgtgttggtcmgctttttgctgtgagatcttagaggcgtacaacagtaagcatttattttcctcatggtagtgcaggttgagtggagaagctctgcctggggtggggatagtgcctctgcttcctgccacaagcgtacgaatcagtggtrtggtctctgctccacacgtgtttctgctgtgtctcgggctgaaaaggtagcagctacctggggaagctcttttcctggccatggcagaagcacagaaaggaacgcctagctgcacatgcacatttcaagccactgcttggtcacgttcacgtctgctaacatccttctgtccaaagcaggtcaggtggccaagttcagggtcaagggattgcaggtatactctgcctttcatgagataggtcttgaagttttatggcaatagtgtggacactgagagtatgctgaagaattggggccaaatgttttgcctatcacaggggtggataatcacccttacaggggatgaactattcagcaaacaggagtcttatttccagcattacaacaaaacactgaacatcacaggtaaattggtcaataaaggtttgaatgaataaatacatgtatggatgaatgattgattgatgttaagatgtatttcatttggctggaaacttttaaatgtgataggtatctgtcaaataagtgagttctaactctagccccacccaccattggtgtcactctcgaagcatctattataaaacagctaacatatttagggacttgggtatgtcaatcatcatactggatgcattacatacgttcctcaatgtaatcttcgtaaccttatgaggttaaatgttgcttattcccactttacagaggaggaaattgaatctcagagggcaaatcccctagctagtaagtggcaaagcttctacttcagggaccttactctggaagggggccaattagggaagactgttgttatatttaattctctaagttatctatcaaagatgactaaactcttgagatgtataaatcctttaggaaggagtaatttagtgcacatctgaactaaatctactgtcccatttacaaatacttctatgaaagaagtgatcttttttagcctcggtttattcatctgtgaaagggtacagaaataattacctaataaggctggtgtgaagatgaaatgggagaatacatgtaaagtgcatagcttagcttagcatagaccctgtaacatacaagtggttcaataaatgttagccatcaccattgtagttacagaaaaggggtcccaatgcagacctcaagagagggttcttggatctcatgcaagaaagaattcagggcaagtccatggagtaaagtcaaagcaagtttattaagaaagttaaggaataaaagaatggctactccatagacagagcagacccaaggctgggttatttcttgatgatatgctaaacacggggtggattattcatgcctcccttttttagaccatatagggtaacttcctgatgttgccatggcatttgtaaactgtcatggcgctggtgggagtgtagcagtggggacgaccagagatccctctcatggccatcttggttttgttgggttttggccagcttctttactgcaacctgttttgtctctcagcatggtctttatgatctatatcttttgcccacctcctatctcatcttgtgacttagaatgccttaagccatttacgaatgcagcccagtaggtctcagcctcattttacccagctactatttaagatggagtgttctggttcacacgcctctgatatcattattatcattatcatcaccaccaccatcaccgtcatcrtcatcatcatcatgaccattgccatcatcctcattaccacgatcatcaccaccatcatcatggccatcaccaccaccctcctcctcctcttcatccttctccttctcatcatcaccatagttgcccgtgcacaactctagtatcaaacacaacttctttagtgttgcactggcaataatgtagtcaagttagtaacacagaaacaacttttgtggtgctaaacagaaaaggtcttctttgcaccaaataaaaaataaacagtaaaagcatccagatgggccagrggtttgttcatgtacttacagaacatctaggttctcatcgatattttctgttctggctcattgccttcctggtcagacttgggtttgggaaatgtctctattcagcttcatctcttgaggccatcgggaggcataagacttgggagagaaaatgccattggtccagggggtgtctccagatgatcttcccggaaagccatgaccaattctgaatgtctctctaggagtaaatacatgaattaacacagctgcataaatatttcacttatcgtatgcagcttcagcaggattaattatgctctaaaattagacgtgtaaagagcacagtgctgagcagtacctaattattcatcctctagaatggagtgtttatctcttgttacacagtagcttcagtggacgattatgagtctaatgagtgtcaaaagtataaaaaattttcctaatgagctgtgtaaatataacctttgaatggagtgtttggttattgagggaacctcttacatgaagcctgccatgcatttccctaggaaaaaggctgttcatctgcctggaagcatacacaagatcctagcaagatgttgccttccttttccatctaattgtctgtggtctttctaaaatgatagagtgcaccatggcatctttggctctcagtactggagtaacaatgctcatgcatatgtttcagcattgctcagcatcgatacccaacatttactgagaaacagatgttttcgtaggcactgatattcccagaaggggttatcatggtctttttcttcttaccctcaatgaacttacagtccagtaggctgacaaatgtataaatgcaaaatatctaatcctaaaatcgaaacgtttctagtaattcacatatataaatttatatcacacgtgtatatatacacatatgtagacatacatatacacaygtgttatgtaygtggtatatattcttatgtatgtgtatatatatacatacatatatattcttaggtgtgttgggtagataagagaatggtcaaggagaaatacgagacataactagtatctttaagaataaaggacagaatgattcataaagaaaacacgtgtggcaagatttagacaaagaatagaatgggccagggttcacagaagmctcagccatttattcatccagcaaccagcaactctttattgagtacctcgattctgcttggtccctaaaaggtaacacttgagtgagaacctgaagactgggtaagccttggacttaaagaatggcatttctggctttgaagtaaaggtgaacaggggatcccataagtcccatctatctcatgcattttgtgattttcaaaaaaatgatygtggggtttgaagaagcagaagaaagaccataaaggtcaaacccttctcatatctgggggccagaacaaaagatactgagaagaacaagaatgcctaattttattattcagtcacaagtgatgctgagaaaagggaaggaaaaaattgttttaggtcctctcatctatggttcagcactatgccaagcacatcacatataatatcctagtaagcctttatataatattctggagtaaatcttattatctcccttgcacaaagcaggaaaatgaggctccaatgagtaaagtgaactgcagcagagctcattcagctttaccatgagcaagaatcacgtgaggatcttcctaaaacaaagactgtttcagtgggtctagggtggagcctgagacccagcatttctaacaagctgccaggtgatgctgaggctaccagccaatggacaacaccctgttcagacttttatagaggtaacaattggctctagttcatctgagtccaattctgatcatttcctactaaaccaagctgcaaggagaaacctggtttgcaggcggccaggtcagcttagctataagtaatactttttagtattgagaagcgtttaatcttcttctttgtattttgctcagttttaatggttgtggatttatttttaaactccaatagacattactcatccctgacatctagtctgaggtcatttaacacataaaattaaatgtatatatttatcatgtatgttaaaaattatgtatatggcatattcaattgcacctatatcatatttaggtatatataatagatatgtgaagtatttgaaagatatggtacacatatctctcgcattgatattatattaggctaggtgcagtggctcatgcctgtaatcttaactactcaggagcctgaggtgggaggtttgcttgaatccaggaggtcaagatcagcccaggcaacatagcaaaaacccatctctacaaaaaaattttttaaattactgggcatggtggtacatgcttgtaggcccacctactcaggaggctgaggcaggaggattgcttgagctcaggagtttgaggctgcagtgagccatgatcatgtcactgcactgcagcctgggtggcagagtgagaccttgtctccaaaaaataattacattaatagagtgaccaactcaaccaatgttgcctggactgtccaagttttaaaactagtgagtgaccccagttatatcatatttgtacatataatcatatgttaaatatttgaaagatacacacacacacacacacacacacacacaattttacttcatcaggttccctctgttccttttgtactgcaacttttgccagcaataattttaaagactcatctagattgttaacagattggagaggaccacaarccctgctctcatgttaataaggaamcttcctgcaatggactctagagttttaatagcaccattcagcataatgatgctcacagatcttggagtgggggagccttggaagtcaatggagaactcactttctccctctgagtgggtcagtgttggcatcctgagtcctttttttgttggccttgtatcttccactgaagcatacaagatagcttttgacggcaggggaccccgtgctggcaggcagaatagaaagtgtttgtgtggtcacagaagtccttgtatctaattagaattctcataaattgctctgggccgctggatgggttgctaatatcctcaacactgcccttgatcaacttcccagcttaatatctttgggctgacatccgagtctggggtagagctggacagtcccacagctcaggcagtgatgaccacacatgtgtccattctgaggacggcgtatccctgagaggccttcacagccagtcttcttagggctggcttaggaatggtatgacagtgtggactggggaaatccttgaatgccccttacccctgaatatttttccctttcaactttctacagcatccagaatttcaccatttgaaattttttttttagataagtgtggattgctgcatgcaacaccctataaaaatggaattcctccttccctcttttcctaaccccatttcctgatatgacatctcatccatccttcagcctctgcgctcctctgtgaatactcccataaagacctctaagctagataccctgcctgtgaactcccttatctctacrcttgtggcatttagcaaagcaagagaagtgaaataagtaagatgaaggttctgcagtttcctagtggtgtgacctggggcaaattaatttcttagagtctcatttttctcattttaaaatcagaattctttaaggattaaatatgaaaataaacataaagaagctagtccatgcctggcacacattagatgccattgttggcctctccatgtgccctgggccacttgagtgcactgcattatagattcctcgagggcatacgctatccatgtccacccctgttgctgttcccttactgcaggactcagtggagcttggcataaacaaaatttgtttaatgaatgaacaaatgaatgaattagaaaatactgcagatacacttttgcaagtcttatgtcatcgatttaataccttctttaatgaaagggaccttattttctttagaaaggacactagatacctctagagagagagatgcaaggaggtaatcactgaatcactgccaatcttttgacagtcttcccaggcatcttacctctgtattcaccacaagatagaggcaaattcctccattgtcttatttgtatattataatagtcaaatatccctgtattatgctctttaatgcaatatatgcaatatgcatatgaggcacatatatgcacatatttaatatgtgcaatatgaggcatataaccaacagaattatataytccctggcttttacaactgtagtggatcataaattgctacttagtccagtaatatggaaactgaagccacagaggggatatgacctcacctaaagatgcacagcgagggagtgcagagttggggctcaaacccaggttctctgcctcctagacaaattatatattaaaaacaaaacaaagggaacacaaaaccagtgatggtcctttgttctgtttctttgggaaagacttgacctctgcagtagaagtaatggtcgtagaggacagttggggtatctccaggcatattggtcagcagccccatccaaatcataaaagcctccagtagaatgagccttgctgtctcccaggcaccctccttccctgcagcacagtagaggcaagacaggagaaacaatgtggactccaaaacatgtgctttgtttatttcaggcaagactgcatgctaatgggagaacagtagacaagtttcatatccatagtgttcccaggcacacaccactggtttatgtctttctttgacaaaccagccctgttcacagtttctccctttcttccatgcaaacctcttccaaactgtagctctaatgccttccccaaggaggggcttgtgaaataaagctgcgttgctccacccttgacttttgctgttcttcactgatgtggttttgttcattgcaatgtcattagcatgaatagagaattctaaaaccccaacaaccaggaatgataattgcacagttttgacttagccagaccctttgccaaactggatcragctcctactgtgttctttgctaaacttgctgctgcagtcctaagaatttaaacactcaaaagcgtcctccttaatttatttatgtgtttgtgtgtgtgtgtgtgtatgtatgtttcatatatcttatcaaccaaggtttgttttccaaattctctaaactcagacaggaattcaggcgttcccacataatagtcagcaacataagtcagaactcatggttcttccatgtccaccagatctagggagggttctggaatatgggattcagtctctttaatcaagaacctgggagagagggactgtaccttcaggggcccagaaattagtaccatgaggctgaaatctgttctttagtctgctggtttatgatgaagagggcgaccaagaaaaaatagtatttcccttagcatttatcaaaacccatgacccaaatcccggttactgcctggttttgaaaatgaagttttattgaaacccaatcacatgtaaagcctagtcattgcaacagaaaccgtaaggcctgcaaaggccagtatgtttattatctggccttttacagaacaagtttgatggcacctagtctagactgtctggagacagataagaagggcagagaaggctgggtgcagtggctcacacctgtaatcccagcactttgagaagccgaggagggtggatcacgaggtcaggagttcgagaccagcctggccaatatggtgaaaccccttctctactaaaaaatacaaaaattagccaggtgtggtggtgggtgcctgtagtcccagctactcaggaggctgaggcaggagaattacttgaacccaggaggcggagtttgcagtgagtcgagttcgcgccactgcactctagcctgggcaacaaaatgagactctgtctcagaaaaaaaaaaaaaaaaaagaagacttaaagttggttgtccagttctcctaagagaagggagaagatgaagatgagaacaagaagaaagaaagacaaatagtgtggggaaggaaaaagggatagagatatatgagggagaaattagagggggaaaaaaggagaaggaggtggtaataataaaggataaagaagagaaaagaaggccaggcatgatggctcatgcctgtaatcccggcactttaggaggccaaggtaggtgaatcactcgaggttaggagtttgagaccagcctggccaacatggcaaaaccccatttctactaaaaatacacaaatcagccaggcatggtggtaggtacctataatcccagctactctggaggctgaggcaggagaatcacttgaacccaggaggtggaggtggcagtgagctgagatccacaccactgcactccagcctgggcaacagagcaagactccatcccaaaaaaaaagaaaaaaaatagagtcaaaaagtaaggagagagaagagaaaggaagagagagaaaaaagggaggagtaaagggagagagaggcaaagaaagaaggagtgggagaggtaagaaatgtttgctaagtgatagttcaggcaatgtttagcctgtgcatccacagagcaggctagttttattaaactgagaattagccatgctgcagatgaaattgaagatgtctcagagccatccgtgcttctcctcggctccggtgtgttggtacaaggcacagaccaccagatgactcactcctgccttggagatgtctaatctgtctttcgatggcttccctgccagcaattcttcctgacataggtccctgtgtcctcagatgactcagcaacacccattacaaccagcagcctcagcccaattaaagagataaatgcaaagtaaaaatagaggggagaggaactgcagagcatctgaaaacctcgtttgagaggatgggacagttttccatttctccacatggaagtagttcaacagctaccatgattgttatagatatttgtcataataagtaacacgagaaggataactacatgtcacaaaatcatctcagtccttgtatgtatttatccatgaagagagccaaactctgtaaaatattcgaagaaatctattctgagccaaatgtgagggccatgacccaggacacagccccccaggaggtcctgagaacaagaacatgtgcccaaggtggttgggctacagcctggttttacatgttttagggagacaaaagacatcaatcaatacctgtgaggcatgcattggtgcagtctgatagggcgggataacccgaagtggggtagagggtggggcacaagtaaaaggtagagtcaaagtccaaagattttctgatttgcaattggttgaaagagttaaattattatagaaatgcctggaatcaagagaaaggactttctgggttaagagaaggagttgtggagactagggttcttatgtgcatgaagcctcagtgttttctattcagacctctaaaagatgctggattctcagatagtctcttcaagattgggagggcctggaatggggaaagatcttgttatgttaatagagaatatatatataagatgcatttttccccaacaagaatggctttgcaggccatttaaaaatacggcaaagaaacatatttggaggtaaaatattttgacttcctcctttatctgtcatgtgatgttctgccaaagttggaaactaagccatgttatatagcatggaataaaacccctctgacaagactttattgtctgtaggatgtgactcttcaggycccttagatagggctttgggcaagagaagaaaatggtcggagtttggtccttatattaatttcatttgcccctcacaatgactaaatggcatggagttataattattcattcctatttacatatgaggaaactgagtcacaggtcagttaagtaaggtgtccaggattatccagctaagtgggagatctgagattggtacaattggtacctatgcaggagggcgccaggatctttgctttaatctttacatgatgttacttctttagctgctataaaccctcatagacatcttggaagacaggtggttttctcatctggaaaggggcaaggctgtgatttaaacacaggtaggtcacaccccagagtcagtgctccttcctcttttactaatgaaacagcatcattaccctgcagaaggtactgggcaaaatcactttgcgacagaagtttagggtgggagagaaaatgacctacactttttttccrttgttcatggtgaaggagactcgtccatgcctcaggccccagcaccgtgggagcaggcccagcctaatttttgagatcattcaaccctgccagtttggggaaaactaaggacccagaagcaggagatgagaaggaatgaaacaaggacagaatgtaattaagagaagtcagatgtttggcctcgatacaggcttgcaaagcagcctctccaggttcacaaagacctgtcttggttgctggaattgcttgttccccacagagcttcttggagctgcataatctccagaatttcagaaagttattgttccttgctaaacgtgttttaatcaaattgagacttcaaaggcagaaatcacagttggggatgagctgggctagtctgtaaattactaactttctaatcaagttaggaagaactgggtgccattgacaacccccttcccatgtattcacccatttgttcattcattcattctcccttctagtcatcgattcaacaaagaacaactgagcagcttttaaactccaggtggtgggatataaaaatgattaaacactcctgctctattgcccttgcctatggagatgcttttgacattttgcatccaatagaatcacttggcaagaaaatacagacacctaattttcacctcctgtggggcatttctacatcctttctgggtgattctaatacacattaagggttttttttattgaaacttatactttttatctagtgttctaaattgaatctccatgtacataattttataatattttataacttttaagtgaaaattcttaaagcaggcatttgctccctttacattatatatatatatatttaattatactttaagttttagggtacacgtgcacaacgtgcaggtttattacatatgtgtacatgtgccatgttggtgtgctgtacccattaactcgtcatttaacattaggtatatctcctaatgctatccctcccccctccccccaccccacaacagtccccagagtgtgatgttccccttcctgtgtccatgtgatctcattgttcaattcccacctatgagtaagaacatgtggtgtttggttttttgtccttgcgatagtttgctgagaatgatggtttccagcttcatccatgtccctacaaaggatatgaattcatcattttttatggctgcatagtattccatgttgtatatgtgccacattttccttaatccagtctatcattgttggacatttaggttggttccaagtctttgctattgtgaatagtgctgcaataaacacacgtgtgcatgtgtctttatggcagcatgatttataatcctttgggtatatacccagtaatgggatggctggctcaaatggtatttctagttctagatccctgaggaatcgccacactgacttccacaatggttgaactagtttacagtcccaccaacagtrtaagtgttcctatttctccacatcctctgcagcacctgttgtttcctgactttttaatgattgccattctaactggtgtgagatggtatctcattgtggttttgatttgcatttctctgatggccagtgatgatgagcattttttcatgtatcttttgactgcataaatgtcttcttttgagaagtgtctgttcatatgcttcacccactttttgatggggttgtttgtttttttcttgtaaatttgtttgagttcattgtagattctggatattagccctttgtcagatgagtagattgcaaaaattttctcccattctgtaggttgcccgttcactctgatggtagtttcttttgctgtgcagaagctctttagtttaattagatcccatttgtcaattttggcttttgttgccattgcttttggtgttttagacatgaagtccttgcccatgcctatgtcctgagtggtattgcctaggttttcttctagggtttttatggttttaggttttttgtttgtttgttttttttttttggttgttgttgttgttagagttttgctcttgtagcccaggctggaatgcagtggtgagatctcggcttactgtaacctctgcttcctgggttcaagcaattttcctgccttagcctcccgagtagctgggattacaggcacccaccaccacgcctggctaatttttgtatttgtagtagagactgggttttgccatgttggccaggctggtcttgaactcctgacctcaggtgatccacccacctcggcttcccaaagtgctgggattagagctgtgagccaccacacccagccatataattctttttaaaaaacttttgttggaagttcatgggtacatgtacgggtttgctatataggtaaacttgtgtcatgggggtttgttgtacagattatttcatcacccaggtattaagcccagtacccattatttgtttttcctgatcctctccctcctcctatcctccaccctccattaggccccagtgtgtgttgctcccttctatatgtctatgtgttctcatcctttagctctcccttgaaagtgagaacatggggtatttggttttctgttcctttgttagtttactgagaataatggtcttcagctccatccatamggtttaagaatcactctttaaagtaacaatatttaccatttagaaacattttatcctgtgattggcagaygttgagtacacatatcagttgccatccaatcactcagttggggtccatgatattgaatctttgccctgagttttattcattctctttctctcagggcttctaattgggtttacacagagcccttggtgattgtgaaaactagaggcataaatggtttggcacttctaagcgttagtccacatgccaaccacaataaagaacataggagatatgagggtaggctatgaatggaagacgtagtcagataagctttaatgttaagcttcctcatccaggaaggatcgaaatagacatgaaagcctttattgcttccaaagatttcattttcatttattgactataataacagtgttaaaaataaagcaggcaaaactgaaaaccccacatttgggtaaagactgagccagcacttctatcgattaaatcggatctggaactagatttggacgcaatggctatcctgattccttatacgtgtagacggggtctcatgtgaaaccacggggaaagtgcagctaaagaccgttgattgagtctaattttttatgtggatttcattattgctcccacgtatgtgggtgacttttgcatgtacataaacctcatgtatacacaaagataatacactgatgatatagacatcagaagggggtgatcattaataaccattctgatgccccaacaactaagtcacttactctcctatgacccaaaaactgtctagggcaaaccatttattcagaaatgcaacgttttcaaataagagatatgtcagttctaagcatagattagcaataaaggacttaactgcttctccattggcctgtgaccagatgataccataaaaattagacttgtttatttccctcctaattttaactagagacatatttggaataataatggaacagtacttattaagaaacagataatatccataaatatcctggagagccactgagtcttcctcagtggtaaaactccaggggatttaatctgcgtaaatttgcagtgaattccctaatgggcctgttgagattcagaatcttagtgkctgttatcaatmcaacaccaggattagtacaaggtcagcatgccaggcccatgcctgacaagcagtgaattgctcaaaccagagaaagtcaaatgtcaagagaaccatcaaagtggaaataagayataatgaatggcttgttggtaagtcaaacattgatgtcacataggctygtgcaaaatttatggcatggataaacagtggccccaaatccctctcagtctatattttttaaacactttmatttggaaaggcaatatattatatatacagttgtccctcagtattgtggaggattggtttgagggtctcctacagacaccaaaatctgtggatgctcaagttcctgatataaaatggtgtagcatttgaatataatctatgcacatcttatactttaaatcatctctagtttacttataatacctaatgsaatataaatgcgatctaaatagttgttacaccgtatggtttaggaaacaatgacaagaaaaaaaagtctgtatatgtttagtgcagacaccattttctccccaaaatattttcaatctgtgatcatttgaattcacaaatacagaaagggctgactgtacatataatcaccccaatctactactttaacataattgtttttaatttatgtattatctcctgatccctgttacttgcagacacatttctttaattataattattggttatatatacttttataktccatgatttttcacttattattacattttaagcattcttatgtaactatactatctgctttcayaattattttaattttttgcataaaatgtcatcatctttattaaaccagaaaccattacattattttccaaatgctacacattttgatatttggctagtatagataacgatggaagaaatttcttcatgcctatttcttttttcttttgaactatttgcaacaaactcttagatgtagaatttaaaggttactggttctaaagatctctaggagtcttgatatatggcgtcatattgatgcccaaaaggtttgttaaccctgggtgcagtgactcatacctgtaatcccagcactttaggaggccaaggtggggggattgcttgagcccaggagttcaagactagcctgggcaacatggtgagaccccatctctacaaaaaataaagacattatctaggcatagtggcatgcacctgtggtcctagctactttggaagctgaggtgggaggatcacttgagcctgggaggttgaggctgcagagagcagtgttccttccactgcactccagcatgggtgacagaacaagaccctgtctcaaagaaaaaaaagttttgtttccatctaaagtaatagtaatagtggatcaatgtaccaattttaccactatctagcagcattaggcattacagttctttttgctattttagaaggtgcaacatgctatctcttttatataaatataaaaagttatttcatgtttcatgttttgattggttaaatcagaattctgcaaattatggcccattacatgttttttataaagttttactggaacacaaccacactcattcctgtattacgcattgtctatggctgtttttgtgctacaaaggcagagttgagtagttgtgatagagaccrtatggcctgtagtgctgaaaatatttactaattggcygtttaccataaaaaaaaaaaaaaaaagattagtgacctctggcttaaacaataaaagtgacatgttattttgaaacaattccaacaattggaagaatttaactaaacatgactggtttccccttatccttaaagaaattttctctttttgtaaagaaatatcacgcttaaaaaagtttrtatttttctctcctctggtttagaaagtctgttttcttcaactttccttattattacctcacttaacccccaaagtaaaagaacacttatacctgtactatgccactcactgtttttttctatttgttaccttctataaactatgacatacattcgttatattgcacaaatcccaatatccagttaatttttgtacagctgtgcaactcccacccagattgagctataaaatgtgaccactatcctagaaagcttcctcatggcccatgccagtcaatatgccccccacaagtaatcaacattctgtcctccatgaccatggggtggttttgtcttcttttgatcctcaaataaatggtggaatcatacaacatgtattcattgatgtctcttgtgacattgatacatattactgcatgtaaccacagctcattattttttttcgttgctgggtggtattttatcgtacaaatttatccattttgctgctgatgggcatttacatcacttttagtttttgtctgctttggatatttttgtacctttcttgtgcacaaaggcacttattggtttggaaatatacctaggaatgaaattgctgggtaatagagcgcgtctactcaactttagtagatactttgaaccagtgttctgaaaatgtaaaccaatttacattcctgccagcagtgcaggtagtttctccaatttgcaagtgctccttttcgactttctgtaagaggtaaagctggcttgtgcaacwgaactctaggtgtcttcatcagtggctgtgtggttggctgttgccaccagtcatttagagatccagattcttgccccaacatcaacattgccttattttgtgaccttggttcatgtaacctgacctcagatttaatgtcagtacaatgggggcagaggactgtggagtctgccccacttactttcctgagttagaattgatatctagcttctctgccacccgcatgtgctcttccactcatccctggccactgtctcaccccatctggtgccttagacttgggaaaagggagaggaggtcagaggagcacctccatacctggggagsgggaggatgtcatcaaaggaagagctgagagctctcctaagtcataacccagccctgcacaccaccctattaccctctatggaaagaaaaacagggtcttccttctgctttagttacggatggttctgacagctgatatagggtcccttctgtaatagttttatttctcactttctgtccttctccattcccctttttcttcctcctccttctcttccctgtcctcttttctttcctttccactctctccttctctcttcattccacaactaagtctccgatgcccattaagctccttgtgtatactaagcaatggggaatacagatcaaatggaagtgatccatttygcttctggattttacagcttcaaggaacttgttgacaacacttcrataaaaaagaaactgaaaagcagtgagataattttacttgctgaaaagaggagctatttcttggcatgtagaactgagcaacacagcataggttaccttggrgttacaagagaagcatcacacccaaatggctgaagcccctggccagagataagaactcagaggcatctccccaacctgggagaccaggctccatgctttcccactgcttcctttaaatggatcattcaggcatttgcctgcaaacttaaagtgacccgcacgctattcccttttatgtaccactagttggccacattctctctttctcgggctgactcttcattcttgccttgtgtgatgcaggagcagaaaactgtcctcttgattcattgcaccctccctgcccaggatgtgtaagtaataaatctttgagcttattttctatatggtggtgtattgaatttgcacctttcatctgaagacctaggaactaccgcagactgggttttccctcggggakactacaaggttgggcttccagtgccagagcgatgatcaggcagacataaactggacatgggtcagacaagagctgcaagggcatcagcagttataaataagttcctcctgggagagatcccctggtcatggataggaaaactaggcatgaggttgtctactaggtaaaagaagcatcctgtgaaaggcacrtgtaaacacccagatttacttcccctcrttggtcattagggcagggttgttagctgctgtagtactggaaacccagtttagccagtggctctcaaaacagcacgggatctgaagttattgctatccttttttttcttaaatctgtatgtgtttaaaacacaagaactcctttgtgatattaaaaagtcctcataaccttcccatgataagtcatcagattttgaggactattgattgagaaaatatgcaatggcaaaaagtcactatgaattcatttgtgctcacaaatgcatgtgccttttaagccatgtcagcttgaccgtctttatttgtgtgaggcagattggttaagcagattccagaagtgcttggtatataataaggtttcctrgattcctacaaggtttctgccgtcttacttcaaagaattgtatctctccaacttcatccagtaatggaaaattatgaccatgtgtattgtttgatgtttgatagagttgtccaatcttttattgtccaatcctctttttaatttttcttctgaaagagacactggttgggaagctgcacaagttgtagttgggttttttgtkgttgttgtttttgagacagtttcactcttgttgcccaggctggagtgcaatggcgcgatctcagctccctgcaacctccacctcccaggttcaagtgattctactgcctcagcctcctgagtagctgggattacaggcgcccacgaccacgcccagctaattttttgtatttttagtagagatagggtttcaccatgttggccaggccggtctcaaactcctgaccccaggtgatctgcgtgcctcggcctcccagagtgctgggattacaggcgtgagccactgcacccggccagagttgggagattttatggttgggaacctgtgtgcataaaatcccccaactccatccaacttgtgcgactaatcacgtggcctgtgaaatcctgcaatgtgacaagtagcaatgaacttaacaatactcaagtttcatccayggagcagaaatctcagttggaaggtggyggtgaaacatttatgccaaagacagcctgtccctgcctctaactggatacatttaagcctagccctatttttattttggttttgtgacttctcagcattatacagaaatggaatattctgacatttaaataaggaatatttatctcccaaattcaatctatttgtgtccmgaatcttgtactatttcctatcaccaccaccatcaaaagtattttttcacttcggcaaatagttcagtgaccctctgagatcgtgagaacagaggtcacagsctccagaatattatttctgaacccagggttacttgggtcttatttttctctagctcatttttttttcttatttgtcagatttattgggcctttgttttgtccttttgagagtttttaaatttgtctttaaaacaacatgggtgttgggtcaccacagggargagagaaaggaatgagtttctcactgctgcatctgggagggtggacttgcctcacatggctttgagtcaagatggtggaattaatgaagttgggccctcaaggtcaaagctcagatggtctagctgatcttactctgctccaaggccacagaccacatccccaaatctgatacacaacttcctttcatctacaggacaactgggcaaggagaggatttggccccaattctgtgtcccccaggccatcctcaattgcaggaccacaactcagaactcagaatgaccaagtctgttgtcatcgagaacatgagcctgccaatgaatctgtgccctagatttcccataaaaaagttgttcctttgccatttccaattccaatcgggcttctgagaaacccaaagtacccaacccctgggcaagacatgaaacaggattgaaatggggtcagttaccctctcggtgttcacagcgaacccgaatgagatcagcagcaacaaccttctgacgtctttcagctatagatggaagtctgttccctgtaggaaaccaccaggctctattgctgggatctttgatgagaacatactcgcccaagagccagccttgatttctgggtttcagaatctattcctcacccctttgcctggggcttctcaaacttcttcctgtcttgggctctgaccgatcctcagatctgtggatcacaaactaatcaaggagacaggagccttgtgttatccacagttggtgcaatgtcatgaaccacatgtaccaagacctgtgccacagaytgggggtacaaggasaataaaacaagatccctgccctgaataaastcacctcccagtgacaattacgttccactgtgacaaattctatacaaaaaaaaaaaaaaaatccaggatgttatggtagaggaaaccatggcgtcatatttacattcctgkgccttcagggaagacttcctgaaggtggatacctctgagctatacaccaaagatagctattgccaagttttcagcacaaataccatgcagctggtatatccagagtagactgtaatgggttatgatattggtgacagtttacaatgaatccttgccagcagtttcttgtaagtgcgtttctcccagtcactgcataacctcggaacaggaaagcttaagctgcgtcttctgtctgactctgaaatcaggacaggactctaatagtgactgtgtcaccaggatagagttgactggtgaccttcctccacatggtagcaccattgtacacatttgcaatttgaatgagacattgcacactcactcatcacagcttacctcctattgtatgtgaggagacactggatttccaatcagggggccatgactggagaaacatgagcaacaactgaagaaccttgggtccactaagaaaatagttgggtgttcactacagatgtacatctgacggccttgctgttccctgggtaccccagacttgttagaatgaaaatcaagttcttagcattctggcttctactcttcgggctcctcctttgatcccttcttccttcccagaaatcctgaactgctctctgatctcaacactccttgtttcttcctgcctccagccctatgcaaatccaatcatctcattttgccgtaactactggttttcatgactgtctctctcacaggaatgagctcttagaggccaaagactatctgtaattcatctctatatgaaaatacagagatgtttgccacatgttaagtgctttacaaattttctcttttcaatgagtgaatgaatgagtaaagaaaaaaaacaaatgaagtcctcggaaaaccaaaaagcaacagcttccttgaccagacatgaaatagaacatcgaactcagcttctcagaaccacatactctctcttttcatctttcatcactgccttgggtcaggtgctttggcaagaaaccaagaaaaaaaaaatatgtagacgtgtgcctgtggaagctgattttagaagatatgtttcagcaaattttggacaaagcctaaagggtacaggttcaaaatggatttttcacaaatgacctcaggggagaggtacttgggaagtttgaaggctagtcacattgcttgctataaaatccattcccaaaaactgcagttcctctgggaaaggcctggaaatgagatttttggccaaaattgacaaaccaatttctccttaccttgggaaaataaataaaaaattttcctgtgaaaagctgaaaccctcttccccgggaactttcggcccttgggaatcaaaagaaaaagagggaggtttcaagggggccccaggaacccttttttttgggggcatatacaaccacccccgaagtttccctgtgtatgacgggnnnnnnnnnnnnnnnnnnnncacatgttaagtgctttacagattttctcttttcaatgagtgaatgaatgagtaaagaaaaaaaacaaatgaagtcctcggaaaaccaaaaagcaacagcttccttgaccagacatgaaatagaacatcgaactcagcttctcagaaccacatactctctcttttcatctttcatcactgccttgggtcaggtgctttggcaagaaaccaagaaaaaaaaaatatgtagacgtgtgcctgtggaagctgattttagaagatatgtttcagcaaattttggacaaagcctaaagggtacaggttcaaaatggatttttcacaaatgacctcaggggagaggtacttgggaagtttgaaggctagtcacattgcttgctataaaatccattcccaaaaactgcagttcctctggaagtgctgagaatgagtcttagggcaaatagagaactaatttctcttactttggatataagagagtctccatggagagctgaaccttctccctggacttgcgttcttggaatcatagatagagtgagttagaagggcacagagagcattatgtggtccatcccaccccccagcttccctgatttcaggcaataataatatctccagaaatactgattttgtaattagtgtatgccaggcactgtgtgtatgcaacatcgtttaattctaacaaaactcctatgagataaattctgatgtactcccatttgctcgatattaaaactgaagcttagagtgattaagcaaactccttaacctctctgcacctgcgtgccctcatctgtaaactagacaagccatattaagtttacatgagttaatttttttaaactctagtatagtacctgaaggacagtctattttatgtaattttgttaaatagaaaaataaatacatgaatggatgagcagttggatagattaaagtagagtacctggaccatgatcaaagagccggtacctgtggaagccaagagtctaatgcaggccgtctgactcagatattgagtgtattaatacctgagtgtattaatacctctgtgttactatctagaccttaccagatgactggatgtgctccccaaaatcttaagggaagggtgcttccttttatatctcattctagtgttttctacctgaaacattctttcttgtaatttgctggacagtatctagttgaattttctttcattcctttttgcaaatataaaacccctggcttccaccttgtcagtgggtggatgggtaatgggagaaactcctccactgtctgcatcctgtctgtgccttttgtctaaccagccttcttacagcctgacccaagcagccagtggaatggaatggaagcaagttggagacacacacacacaacactgcctcaattatccttgcctgttcccttttaaatggaatggaagcaagttggagacayacacacacaacactgcctcaattatccttgcctgttcccttttagattctgcatctctctgacggttgactcctgaaactctattactctgtcttttaatgttgtcagcattaggaaaagagtgaccttgacaccttgctccttctactgaacttacagctttcctcacgatggtgcagaactaagtggttagtagagatacttgtggctggaaacatctcccctgaaaacagatataggaagaacaggtgnnnnnnnnnnnnnnnnnnnnatagaaaaataaatacatgaatggatgagcagttggatagattaaagtagagtacctggaccatgatcaaagagccggtacctgtggaagccaagagtctaatgcaggccgtctgactcagatattgagtgtattaatacctgagtgtattaatacctctgtgttactatctagaccttaccagatgactggatgtgctccccaaaatcttaagggaagggtgcttccttttatatctcattctagtgttttctacctgaaacattctttcttgtaatttgctggacagtatctagttgaattttctttcattcctttttgcaaatataaaacccctggcttccaccttgtcagtgggtrgatgggtaatgggagaaactcctccactgtctgcatcctgtctgtgccttttgtctaaccagccttcttacagcctgacccaagcagccagtggaatggaatggaagcaagttggagacacacacacacaacactgcctcaattatccttgcctgttcccttttagattctgcatctctctgacggttgactcctgaaactctawtactctgtcttttaatgttgtcagcattaggaaaagagtgaccttgacaccttgctccttctactgaacttacagctttcctcacratggtgcagaactaagtggttagtagagatacttgtggctggaaacatctcccctgaaaacagatataggaagaacaggtgcaagttcccatgggcgcaaagaagttctgcaaatgtgcatgagcttactgtcactggaggaggtggaaacacaaaaggagagggctttgagtgctacatggggaccagtcctctccggtggggagacaaaggcagtgtggtttgactgcaaccccaaaacttcccaggctccatctgttcccaagagagcatttagcttgtgtsttcccagcaagaatgagtctgcttcaggaaagagatttaattgccccatttatcagctctggttcacaagatcacactgacaaagatcacggcctctttttaataggagaaactggcagcagaataaatatcatagagccactccttggaaaaacgacatttgatgcttcaccctacctaaaggatgcacatttcccagccttttactctcaagcccgctgcaagttcccctttgctttgtattccttctatttatatggcagaataactcactaaacagatttgaacacttctgcaatgctgcccagtttaagcctggggatgtaagaaaagaaacagaaacagaaaatatggattcaatgctcactacgtgctgcaggccacgaaaaatatcaaaaccataaaacatggtccctgatctccctccaggagattacaatatacttgagtaaattaaaaatgaaataagaaagtatttgaactacagttcagtacgctagtcaaagagggccacgaggcaggaaatgattaatttgaaaatgattggaacaggctgtaattggtaatgagaaatgtgcatttgctcttttttttttttttttttttttgaaattgaagtctgctttaccatgttgatttcctctaaaaagaggtattgtttgggcaaagggcagaaggaaatctttttatttacatcctgaaaagaatcgagatgatgtttcttatatcagactgccctccttacaggcttacaaacctggcttggtttgaggcaacaccgaaaggaagatgttctgrgaatctgatgagtcatagtgagaagacccatttttgtgtcctcccagactccaaagggtctgagcacggtggctcacgcctgtaatcctagcactttgggaggctgagccaggtgggttgcttgagcccaggagtttgagatcatcagcctgggcaagatggtgaaacctcgtctctactaaaaatacaaaaaattagcacagcatggtggcatgtgcctgtcgtcccaactacttcggaggctgaggtgggaggatcacctgagcccaggaagttgctactgtagtgagttatgatcgcaccactgcactccagcctgggcgactgtagtgagaccccatctcaacaaaacaaaacaaaatacctccaaagggaggggggacgtcaacagcacattgtatttycaaagrgatggcattggtgtttttgtgagaagaggaagcagccgtgcaggtctgaggtacatggtgggcagagaaatctggatgagtttgagatagtgttggtggacagtgagatattatttcaaagtctcccatgactttgtgactgtgcgaaagcatgggaggctgttggaagaaaaggaattgaatcaagataccctcttctcatccctttacctacacaaccrattgatcagcacccatttttgtgggtgaggaactggaaagggatggatttcctatttttttwaaaaaaaactcattaacatgtatgcttttttttctggttaatacatttgagaactttaatgagtcacttagtctgtaaaaagaaaactaggaaaatctctgtccatcaaagtgaagaaaatgcaaggaggtttaccatctgtttgaagctgtcagtaagaaattaaagcccaaatgagcatgtgagttcaaatgtatgctacttaaatggtgtagtaatcaaagtaaaaatttttccatacaaaaactcatacattgaaaattcctggaaccatggcagaagcaaacccagaaactctctatagggatgtttctgtagcctagtgttcttgggagtcccatggggcttagagggaaaataattctgcagaagattagctcatggtcaaaagttacagacgtcacaaggaagtaacccaccatgagagtcagaacacacagcaaacagaggaatgagaatcccaagaactaaggtgggggtgggggggagtaatctgaaagactagaggtttaaaattattaaatatatgaaagttttaaaaacttttaaactttatataacaaactatataacaaaaggatgggatattatgataaaaagaacaggcagaactgtaaaagaaccaaatgaatatcacaattaaaataaataaaattaaaacataaagctaaatattaccaacaaaagaataaattaacgggaaaatacatctattggaaattacccaaatgcagcacagagasaaaaaagaatgcaaatattaaaacaaggtaaataacctagaggagagaatgaaaagttccacagtattttaaagttttcaggaaaaaaaaaaaaaaagatgggactattatataccattagggaattgcaaattgaaataatgagctagcactacatccctatgagagtggctaaaaccccaaacactaacactaacactgacaatgaaaagggtggtgaggacttggagcaacaggagctctctcattcattgttgatgggagtgcaaaatagtacagccactttggaagaaagtttggcagtttcctacaaagctgaaacacagacttactgtataatctagcaataatgctcctaggtatttacccaaatgaactgtaaaaactgtaccacactaatgcaagatgttaacagggaaaaccgaagggagcggggagaggtagtatatgggaactctctgtactttctgttcagtttttctgtaactataaaaccactctaaaaaaataaaatctattaactttttaaaaaagatatgatagggagaagtaatattcaaagccatagcaggtgaatttttgccagaactaaagttctaagtattcagattgaagaatcgtactaagtccagagccgaaccaataaaacaaacccacacctagacttcacaccaaagacaaagtgaaattctcaaaagcaactagagagaaaatatagattgcatagaaagtaacgacaattagatgattagccaacttttcaacaactgccatccagatcagaggaaaatttaacatctccaaaaggtcaaggaaaaataattgtcaactttgatttttatattcagccatatcattcaagagtgagaacaaaccaaaaacaatacatgctaatttcacataacttaaaaaaagaccaatattaaatcattttgattgacttcttcaaagagaattgatataaacatttggagtatttcgttaatttttctctgcatgtccccattacatcttagagatcatgtatatacatataaaatatagtcatacttttcatttagcatacacatcttccttgatttttactgtccttgaaagatcatttttaaaggctgaatcatagtctaagtgccatagtttagtgaattgctagacagtataattgctagacatatagatcagagaattttctcctaaatggcaacaggataaaatgcacataaaagagggacagaataattctaagcatgcctactcttttcttccccccattggaaaaaaccacctggttctttaattgcctactgaagttggggggtgggtatagtttagtttgcaaggggccattcagagccagctggatgtctcttttcaattaaagttttgtgccctaagtatgctgctcatgtgtgacttttctaagtaatcctgaatgttctaaagagagagagaaaaagaaacacacatatttgaggattgccataggccaggcactgtgttaggcattttcttcacaacagtaaatagtagcaaacatactgcttatgaaaacttactatgatctgggtcctttagggattttatacattctcatctcattcaatcctcatggcgactctaggaagtatgttctattattatgcctatttcacagacaggataactgtagctccgaggccatgcagctagcagatgatcaagtcagaattgcaatgaagtctttctattgtcacgttctgcccttttattcccatgtcttgttccaagcttgggtgggtattgggggcaggggtaagggaaagcaaggtcagaaaaacataataatgaccaaaawaaaaaaaaaaaaaaagacaaaactccaaaaaacaaaaccaggaactgtgctaagttatatatattatatatgtatataatatataatatatatacatattaatagagaataagtttgctatactctctctmtatatatatattatattctctatttttatatataaattttgtcctcactgcaacaatattaggtaggctatgtaatcattattatcttcactcaagaagtgagcaaatggaaacccagcaaactcagaaacttgtcttaaggttacatagctgtgagttgcacatcgtctgttccaaacccagaagcgtctgccccaaagtgcatgttctggtcctcactgcctgtgaatgttgtgatctgtccaggtgagatggaggagctggagaccctgtggctcactgggatctgccacaacgagaagaacgaggtgatgagcagccagctggacattgacaacatggcgggcgtattctacatgctggctgccgccatggcccttagcctcatcaccttcatctgggagcacctcttctactggaagctgcgcttctgtttcacgggcgtgtgctccgaccggcctgggttgctcttctccatcagcagggtcagtacaccgggtggctactttcttgcactgcaagcaggtttagaaaagcgcttgggttcttgatgtctcagtggggtctgcacttcctccccttaccagcctttcttgggcatgtcacaagagcatccagattttgtgcattcataagmcaggtgttgcaaacttagatgactaaggaaggcagaaaggaaacgggagtgggtgcagcaggcgggacatgagaaaaatagcacagatgacgtgaaacggcagctaaacctcagtatcaaagtgagagaacgatagggaatactgaggactgtggccaattgcatgatgtttacctcaccagtagcgtggcagccatcctcaactcctgctgagtattgtcttatgggaatgtagagtcaatattatcaggtcttctagttttttaaaaagagaaaatgtcatctgattttgttagaaacctttccatttttaaatattrgtaactaattccatgtaaaaattttttggccgggcacggtggctcatgcctataatcccagcactttgggaggcccaggcgggcggatcacgaggtcaggagatcgagaccatcctggctaacacggtgagaccccccccttctctactaaaaacacaaaaaattagccgggcgcctgtagtcccagctaccccggaggctgaggcaggagaatggcgtgaacccgggaagcggagcttgcagtgagccaagatagcgccactgaactccagctccagcctgggtgaaagagcgagactccgtctcacaaaaaaataaaaacaaaaaataaaaaaaaatttaaaaacactgggccagacagagccagcctgtggctcccatcactagcacccaggtatgctgtataacactactaatgctgctatgcaagatgttacaatttgtgtatgcattgtaacagaacatgcccaacaaaacaaaatctacttgcaatgctatggaatatgtatacacatctaataaaacacaaagagcatgtggaatgcaatagcacatgaaaggaaacacaggtgtaaagtaacagaagaaaatgcacacgtatcaagcagaaaacaaagtttaccttcaactcaacataaacaacagcacaaaatacatatgtatctaccttcttatctatatgtccattcattcgtttcagccatctatgcatccatctatttatccactcatctctcttatttgcccaccttgtttttttgtttgtttttttgttttgtttgtgtttttttttgtttttgtttgtttttttgccttggaagaacttcattaattaggatttgaaaaatggtgaaaactctttggttaaaaacatctaattgcagcaaaccaacacagcacatgtayacatatgtaacaaacctgcacgttgtgcacatgtaccctagaacttaaagtataataataaaaataaataaataaaaatctaattttatatgctattgtttactgagaaagctaactaattgctttaaaacagatttgtatattcttaacatttgctagtttcaagaactgtggagattcggaaggtacacattagtttagtgaggaagatttattttctccattcacttgcactccaaactcgggttctgtgcaaatacatatttcctaattagcttgatggcatctaaacacatagattgcttaaaaataacaacgtacgtgcatagagctaggtattatgccaactttaagctaattctcccagccaattaccaaaggcttttcatatccaaatgattctgggattagcaccaaacaaatgcacactgttgcgtttacttctaaatcttgcttgtttttggaagagcatttcctctatctatctaaaacactgctaaggaagccaagttgatttatcaacattttaagaaatgaagtaaatccatatcttcctttccaaaggatgggaatggaaggcaaactgggcagcacagggcaggcattgttggtggagtcccttgatcatctagaatttgaactttggcctctccatccctaggggagaaggaccccaagttttatgggagcaatgtgcttttattgattgattgattgatttgatttgatttatttacttatttatttttttgagatggagtctccctctgttgcccaggctggagcgcagtggctcatttgtaagatttccacatccacagtctggatgctccagcagctctggaagcagtgatggcaggggcagatgttattttgtggcaggacaaacagccaaccacacattatatatagaaggagaccacagataagtttgcaggaatgcaggaaaggatgtaatgccagtgccctgagcctcagggggccttcaccaaccatgaagcctggggtggagaggatcagagaaagagcagctcaaacttgcaactgtaggcttttgtgtttacggttccttgaaggctggagtggagagactgtctactacaagaaaaatgtagcagtgaaaatgagttgaggctgtcacagttccgtgagcatccctgcagggtgagcttgtccccaccatgggggaccgatggagccaccattatcagagtccacagttaatcacacttactttcctgtagtttatgccaaagtcagcagccactgccaattctgccctacaaaccccttcatagtttggctccctgtcagccttgggaagaccaggtcaaatcctgcagccttgatctgactgtttcctgtaggtacggctgctgaaatctggggtaggagtggggagaagcaggggaagccacagatcaaaatgttccagacgtccttttgcctgttattgtggtaggaatcaagggctcttcccttgataacagttgaacagctacttttaagtgaacgtaaacagttgttttctaaaagaaagaaagagtagaaaatgagaagacatatagatggaggtgcttgtatttgggctgcccaggagcccttaagtcattcagttccctggatggatttaaaggyggtgtcactgtgtcatcagaactcttcactgtgactagtaactaaaacccagttctaactacattgaatagactcacacacaaacaaacacacaaggaatagattgagtcgattaagtaaaaaagttcaagggagtggctccaggggtttaaaccatgtctttctctatctcttgggctctacttttcactgcaatggcttcactgataggctcacacccccacatgatggtaagtctgcaactccttctatccaagcatccacatctatcccccyctcaaagagtatgatgagcctcacatgaatttcatgccttcctttagatgaatcaatgtgtgcatggagaagagattttctgattggccacttaggacacattctttgattgttagcttttgcataagagtaggggtaattccagaaaagaattaacaatggatgatcctttcatgctgactgtgtttgtcagtagttaactctctggtgcctaaactttcaaagatgatgctgggaaactttaatgaaagcttggattggtgacccgggtgctgggaggctcagttatctgttcttatatgccactttggagacactgaggcattgacagttgtatgagcatcggttgataccttttctcaaactccatgtgtgactctttgcaaaggtgtcagctaatcttgagccagagcaataagataaaccctatgctttgcaacttgtctcatacctttaagagacattatcaggattcagactgaattttgctgtttctccagggctcctgcaagaagtgcaaatctcacctttgcaggtaaagttcaagtgcaaagtggtttcatgttcactgctgctgctgctgacagtgctttatgttgctcccctacagggcatctacagctgcattcatggagtgcacattgaagaaaagaagaagtctccagacttcaatctgacgggatcccagagcaacatgttaaaactcctccggtcagccaaaaacatttccagcatgtccaacatgaactcctcaagaatggactcacccaaaagagctgctgacttcatccaaagaggttccctcatcatggacatggtttcagataaggggaatttgatgtactcagacaacaggtcctttcaggggaaagagagcatttttggagacaacatgaacgaactccaaacatttstggccaaccggcagaaggataacctcaataactatgtattccagggacaacatcctcttactctcaatgagtccaaccctaacacggtggaggtggccgtgagcacagaatccaaagcgaactctagaccccggcagctgtggaagaaatccgtggattccatacgccaggattcactatcccagaatccagtctcccagagggatgaggcaacagcagagaataggacccactccctaaagagccctaggtatcttccagaagagatggcccactctgacatttcagaaacgtcaaatcgggccacgtgccacagggaacctgacaacagtaagaaccacaaaaccaaggacaactttaaaaggtcagtggcctccaaataccccaaggactgtagtgaggtcgagcgcacctacctgaaaaccaaatcaagctcccctagagacaagatctacactatagatggtgagaaggagcctggtttccacttagatccaccccagtttgttgaaaatgtgaccctgcccgagaacgtggacttcccggacccctaccaggatcccagtgaaaacttccgcaagggggactccacgctgccaatgaaccggaaccccttgcataatgaagaggggctttccaacaacgaccagtataaactctactccaagcacttcaccttgaaagacaagggttccccgcacagtgagaccagcgagcgataccggcagaactccacgcactgcagaagctgcctttccaacatgcccacctattcaggccacttcaccatgaggtcccccttcaagtgcgatgcctgcctgcggatggggaacctctatgacatcgatgaagaccagatgcttcaggagacaggtaacccagccaccggggagcaggtctaccagcaggactgggcacagaacaatgcccttcaattacaaaagaacaagctaaggattagccgtcagcattcctacgataacattgtcgacaaacctagggagctagaccttagcaggccctcccggagcataagcctcaaggacagggaacggcttctggagggaaatttttacggcagcctgtttagtgtcccctcaagcaaactctcggggaaaaaaagctcccttttcccccaaggtctggaggacagcaagaggagcaagtctctcttgccagaccacacctccgataaccctttcctccactcccacagggatgaccaacgcttggttattgggagatgcccctcggacccttacaaacactcgttgccatcccaggcggtgaatgacagctatcttcggtcgtccttgaggtcaacggcatcgtactgttccagggacagtcggggccacaatgatgtgtatatttcggagcatgttatgccttatgctgcaaataagaataatatgtactctacccccagggttttaaattcctgcagcaatagacgcgtgtacaagaaaatgcctagtatcgaatctgatgtttaaaaatcttccattaatgttttatctatagggaaatatacgtaatggccaatgttctggagggtaaatgttggatgtccaatagtgccctgctaagaggaagaagatgtagggaggtattttgttgttgttgttgttggctcttttgcacacggcttcatgccataatcttccactcaaggaatcttgtgaggtgtgtgctgagcatggcagacaccagataggtgagtccttaaccaaaaataactaactacataagggcaagtctccgggacatgcctactgggtatgttggcaataatgatgcattggatgccaatggtgatgttatgatttcctatattccaaattccattaaggtcagcccaccatgtaattttctcatcagaaatgcctaatggtttctctaatacagaataagcaatatggtgtgcatgtaaacctgacacagacaaaataaaaacagttaagaatgcatctgcactgtagtgcgattgacatgtgcaagagattaggaagtttggctcgtaacagtttcagctttcttgttatgccttccatcacagcccaggctcaccccaagaactccaggctcccctaaagaatagcaaatcagtgtgttcgtgatgactgtgctaccttcattatagttcatttccaagacacatctggagccaaaggcccgagggaccctcaggtggggagagctacaggaatctctttggatgttgatgtgtgtttctctcaccctcggcttcgatggtcttgttcagagctgcataaactaacacatttatgtctccgagatctaagtgtggatcttctgtctgtgacacagtggccattgtagtttatcccgaagacgcctatgtacgtaagtttgcatttcctcccttctggtgatgactcagggttgtatagtatctgttaccccttccctcccagagtaaccataactcgttccgtttccaaacagccatggtggtgtccaattagctgtgtatcgctcttcccagagttgttaatgtggtgacatgcaccaacagccgtatgtgtactgtgatctgtaagaagtacaatgccatctgtctgccgaaggctagcatggttttaggtttatcttccttcacatccagaaattctgttggacactcacttccaccccaaactcctcaaatcaaaagccttcaaaacacgaggcactcttggatctaycctgagtatcctccaaactgtggatacagtttagtgagacaagcaatttctcccttctgagttattctctctgttggtggcaaaccacttcatagcaccaacagagatgtaggaaaaattcctcaaagtatttgtcatttctgagtcgcctgcattatcccattcttattctcctcaaacctgtgcatatatgacatgaaatgatatccattttttttttaagttagagacagagaggggaatacttatgcatggggagcctgttagcacagtgcctgccacaaaaacaagtgcccccgacaagatagttgctatgttatgacactttctcagatcaggattttctagtttaaaaattaaatatcataaaaccagcaaataatattaactaaaccttttatatagttctactctgttaattagtgtatttcatgtacatgaatatttttgaagtatttgggataactagccatcagtgtttgcagaagacctcagtctgttttgggccattacggaaacactaagctaatgtagactcgcctggccatttcctggtttcctcctgcattctgctttacattcttgaagaaagggataaagtggcaggttgaaaaattatcccatttcttctcctcatggtgtgcgttctgttttgtaagtattattttcttgcatgtgggcaagtgtcagggatgattcccttaaagctcaaggatgcatggaatagctccatctttgggaaagtacacctgacctacagtgttcctataatgaaaagtggttgcaataaatttcagggtcaatcatagggagacagagggaggcagtgggtgagaggagcttcctttcatttttgaaaggcagaaggggctgactaggtgctggggatgcatgtgcttgaaaatgacattttatttcccggatgctgtacctctgctgccccaagacccagccatggagaagcctggatcgaagggcccagaatagtcaccccaacatctgatcctaaatctgaatctccatgactgtgtagccttttagccctttctaccttctgcccttccagtgcattccagaccttaatccaccccagcaaggatcgcctccatttcctcatgagtctgggatgttttgacatgaatgaattaaaaagtcttcccagaatacagaagagtgatttgtcgtcaagccaaagaggctttctgtcttcctctggtgtcctctaaacccagggggctgccaaatgccacagagacctccagggagagtgagagttatacttggactgacttcatcggtcagaaagccttcccctaacagcagcattatttctgctattaaccccatacatctctggataaagaaactgaaaacgtggcctttggaagaatcaacagtaatgttgtgaaaaaaatatatattcttttcactgaccgaagtgttttttcaaataaataatcagaaatgttatgctacacaaagtttatggtatcccttctctactaattcaatgactcttcaatgtgatgatcccaagcaaaaaaaaaaaaaaaaaaaaaaaaatcaactactgatcagatggtcaatttctaaggaaaagatgtagagttattcaaaggtcatctaagtcagttcagtctttgcaaaaagaatatcaggaatgtaacgtccagtggtaaatggaacccacagtatgagaagtaacaagaattaaataggaagcctggaagcctgagactatagatctatcacagaagattcccgtaacatatcccagctctgagttcttagatttgttgatgtcaaggagcccaaatttctgaacacaaatgcctgagtttcagctggcttaagtcagagctggcatccataatgatattttgttaattctaattggttttccccacttgagaaggacccaactagtcctcagataggtacacttgaatgcaaacggttgggtctctgtccatgggtaatagcacgcacatgcaaccaatttaaaatactctgggtaagagagtcttctagagcataaactgtacttgagaaacctttgtgcttctggaaaatgggtttcatcatccttacatctgcaggttcttaggccacttatggtttcaatgctctgagctggcaagtccctataggtctatctttctgccagagagacttgcaggattataatctcacaatctcaccactcattactgttatgtcctctgcaaatctctctgcgttattttagccagcaccatgactgggcatccacggattactcttgattttctcttccctgattcacaggatgccagagagtctgagtatttagtttttctggtgaaagcattaaaattcacacattgcagcaaaatctgtcaaatcatttcacgcttattttctggggagaaaaatagaaaattacaccttgtttacaaatgaaatagtttcacttaaatgggactctagccaaggcagttaattagtcaaaagatccacagctgtcatatagtcacacattgtttattctatttgctatgtcgaccactgatgtgtatttaatattctgcatccttcacaggaaatgacaaatgccctgaattatttgcaaatagaattgctaatgaaaaagaaaaaaaatgttgatgttaattaaatggtgattaaaaatttatctcctttaaatctaaaaagtgcagctttaataatcagttgtcatataaataagtaccttgtactgaaatcccttgcggtttaagacctaaataaacactaatttgagaactctaaataccttacagaggagctggatatattcgttaacattatgcacattcctgtactgtttctttgtgcatagctgttgtgcatgaatccttgaaaaggggacatgcgttgtttctgaaatggagcctgtttgtattaaccatggctatagtagacatgattggactcaaagaaaaagaagtttgagtaggtggaagctaaatgtgttgcttgatatttaatgagtgaagggttctatgtaaaggcaattttccttccaaaagtactgtttattttcactggagacaaaattagacctttccagataccccatctctttttggtgaacagggttgaaagtgctgtggggtctatacttgaaaagttctcccaatatgcagttactgtttcccattcaatccctatacattgtactgtgttcatatctaattgtatcagatgaggtcagcttgccacttgatatagatcagagatgatcaaatgcacttatcctgtgaatacaactgcttgtgtacacatgtatataatatacatgcttgatttctacaattcacacgtaagtgtattatccaaataaaattgtacatattgtaaagtttatgttaaaaattaaatggtgatgatggtattaacacatggaaaacccattctggttatttttatgggaggatatttctgtagagagggcactatatttttttaatctcagttgtagggaggatgacagagcctaagtagaatatgggtgttggcgttcttggccccttctttaaaaaacaaaactctgggatgaggggtatagaatatattctgctcgcatttgcttctgaagacaatgccgatatggacttgtgtgtgatttccttaaacacatcaaagggcatagatttcctatttaaattccttatcctctttcctcacctgcactctttctgtgcccagcagtactttcagtatagtattagctagaagtgcctgcccagaagggtcttagaaaaatagagttcgtagaaccacaccaaaagttaggagaaggggaggagagatgagaaaaatgaagtttacaaatgggcagttgcctgtttaagatcatcaagttagagagtatcagagcgaggattagatccaagacatggttcaatttctggctcgattctctgaccgggctgacttatttctaggtttctttcaaggggaaactcctgagtagctctggaataagagccagagatccccataaggctgccctggtttttgttttgttttgttttttgtttttgccacttgccccagaaagacctacccatgcttctttgaatttggttttcctttaaactccctcacaatccctgtcttaaagttcctagaagagaaaacttttctcagagaccgtctccttaggaaaaatcaacagggatattgtttaaaacctcaaactgaagataaaaggctggcagtgaccattgaaataattgaggtctatgtatcatgcattgaggaagaaccaagcacattgaccagctaataggacttcactgaatgtccactttattttgaaagccagtttgggattgtgggggaggggatgcaaaataaatagaaaatatagtctcttcccataagtagcttatggtttagaagttcagttctctaatacaaaggataaccaaggacccatgcaatgcaaacagagactaaacagcaaaaattagaaatgacaactaaagttgtagccaggaaaaaaaaaataatctgattctatgagcataccttttttaaaaaaaaaaaaaaagtccttccctaaacctttaagtaactctggagaatagagttagtggtcccggaaatgcagttgatttattttaatcttcaaataatggacttaggagacccaggagctgctaaccaggtgaacacactcacactcctacatttttgcacaggaaggcttttgtctggttccaaccagttctccagtccttgccaaatcatgcctcctcccagccttgcattatgacatgtgcctcaagaaaaggttgaaaaaattccccaaaggattagaaaatagaccatgatgtaaaaagacgaagcatttccctaaagcttttttgtttggttttgtttttgacatttgaagaacccttctgatacaccagggtatgaatgtatcagggaagcatagagggaaaattctttatcaagttccaagtgcctactgctgtggctgacagaaagcatcaggttccctagagagaaaacggggcaaagagatggcaaaaggaatagaggtgtatttcaggaaggatggcgaggtggagagggagcttttgtcactctgtctatcccattctgtgcattcttggaatgttacattttctgcttatcgcaagtacttgccatggatctgcacctgaatttgaaaatatcaaaatatatctaaattgagtgtaggcgatattctaggcatatcctagaatgtgatcctcaaaacaaccttaagatataaatatgattgctcccattttacagataaggaaactgaggctcaggtttttctcaacctcgtcagcaactagaattagctagtaaatccctaacgttagacatattttcaaagtgcctggtctcctccagggaggtcagaatagaagtcagaaagagaggtgtgctcttttgaggttcctgggcatatacccttgagtatcagcctctgtgacagggaagtctgttagggtcttacccctcattgcctgatctgtgtgtatggagaacttctggggatctcacctctgttcatagttccttctgagacttgaacactgtttgtgtctccctttcatatgcttgcacttagcatttaaaaaaatttctggggagttattttctctacttagcatgtgcctaatcttaaatatctctttcctaatgtctcatctttttatcagtcaacatcagggctaattccattaaacatatatacatagtacatgctctcatgtgtgtgggtatgcacacacacacacacagccatgtgaccctccattaaagtcctcctaaatattgtgacccatgttcaaagaggtgatattatttgcaagttgactattcctcctatttcatgtctatgtttggttatctttgccaggcagatggaatgagtttcagaggtgggacagggaataggaaatagagtttctgcatgaatgatggagagctttggtagtcagaatgattgaggaccagctattaaaatgttgttgttgttttccttcttggtctgttcctttttttttttcttttccaaattgtcttagagataattcccggctcacttagcattaggataatgacggttattctgtcccactgaagagtgttgaactggaacgcttccaccgggctttataggtacccagaatggcctaatgtttaacatatcctgcaggcatgcccctgagcacacactgcctttcctgcattcccccctctccatggtctaagccacatttctttcctggcatttatatttactgagaggtgaggggtgcattaggcccatttgatggatgaggacactagcggggatttgaaggaatgtctttctgggagtctccatgaattctctggagagttagctaacttaatgcaagttaagtgctagtctatgagaaaaatttctcagctgttttcatctttcaagctggcagtaaaaagccttttaagacagaaagattattatttgttatttggagatcctgttgttgggtctacaagtgcgtgaccatgttctccttggaatgttgagctatgcagaaatggagcactccaaagaacgatttgaccaatagcatttcttctctgggggttgtatttcaaagcatgcaactctccagggaaccagaactaaattgcttaaaatgaagtcattcctcagattaacttcctcagataaagtgtcagcggtctgcagaaacgaagaagacaaaactgagattatcactcataattctcttacttactatgtcagtgaaacaatgagtttgcatttttgcaatcctagaacattcttcattagccctgggtcatgacctcttccagttaattctctttcacacctttaggaaagatttaagatgaaccttcaataggatattaacataactcatagccaataccacagctgcctttcaaattaatgaggttaattgttctccagcaaacatgagtttgtctttggcattttaaatgcttcccattgatctgacattttgctgtttcaagttttaaagggctcaaatcaaagactattgataactgagcaaagagcgaagatccagaaatacgaaaacattgtctttttttttccatgaaaaacaatcatagccttttgaattcaatcgaagtttctacattagccatctaagacttatttaattatttctgttctcagtcaagctaattcaagtgaatgaacagtattgacttttaaaatcttttttaaatttttttaaatctttagtttattaagtttgtaga

SEQ ID NO: 96169 - DNA, 66557 bp, Homo sapiens
  misc_feature (1)...(66557): n = A,T,C or G
atcagaaacctagcacacctgggcaccgcaacccccacctgtgtttcaggctatggccacacacaaatcagataggagccctcggagcccccactccctgaagccaagcagagtccttccttcagcaggtattctggaaattaaatggagactagagcagacaaggtctcccctcacagagcctatagtctaaagggaagcaggaaaaatacaagaggccaggcacggtggctcacgcctgtaatcccagcactttgggaggccgaggtgggtgaatcatttgaggccaggagtttaagaccagcctggccaacatggtgaaactccatctttactaaaagtacaaaaaattagccaggtggtagtggcgtgcgcctgtaattccagctacttgggaggctaaggcaggagaattgcttgagcccaggaggcggaggttgtggtaaatagagatcgcaccactgcattccagccagagtgacagagcgagactctgtctccaaaaaaagaaaaaaaacacaagaaaacagaaaacagataaaacaagtgcaattgtggtaagtgctatgaaagaagcaaacagggctgagaaacagaataaaggtgggatggggtagaggatgattttatatgggaggaaaggggaagatgagagaagagacatttttgttgagacaagaggatgaaaaggtgcccactctaggaagaggagggtttggggaagaacttaacaggtgtaaagatttttatcgggtttgaagtctagttcaaggcagatctttcaatatggggatctgattgggactgggcaaaatttataacagtttaggattggaggacatggtgaagggagggtcttgaagaataaacaattgtttgataagctactggtttgcccagttaagcaaactattgtcccgagaagggggctgtttgagcagtctattgttcagataaattgattttcaggaagttcctgaaggaaataatgaagttatttaccagtttacagtcttatcttcctggggaagaaatttctggaacaaatattaaagtcatgcagatgtaggcagcctcagtgaaatgatgtcaccgcaggtgaggccgttgtagtctggctgagtggtaggtaattgtggcctggactagggtggggtggtaaagacaggaatggatggattgggatatatttttggagataggccagtgactcactaaattgattagatgagcgagaaacaatcacagatgatggctaggtttttgacttgagccattaggtaggtggtagtaccatttactggatgggaaagaagatggtactgggttggggatgatggttaaaggttcaatgttagggttaggatgtggaagccatcctcacagggttagcaagtattacatgctaggttctgggcggaaatactgttataatttaaccttaataggcaagtgcggtggctcacacctgtaatcccagcactttgggaggccgaggcgagaggatcacttgagcccaggagtttgagattagcctgggcaacatagcaagatcttgtctctacacaaaatgaaaaacaattagccaggcagggtggctcatgcctgtgtatgtagtcccagctacttgggaggctgaggtggaaggatcacttgagcccaggaggttgaggctgcagtgagccgtgacttcaccactgcactccagcctgggtgacagcaagaccgtgtctcaaaaaagaaagaaagaaagaaaaagcattaattaggttgcactttggcgcacttccttgttgctaaaagttccatagaaccagatactgaccatttgcatccccatttttcctatagataggatttctgatgttagaatcataaggcttttgttgaagaatcgatttgcatccccattgttcctatagataggatcactgacgttggaatcataaggcttttgtttaagatttgcttaagatgtttttagctcttgagttccagcagaatggctgatgccaccagtttgaagaccctcacagaggagcgtaatcagcatgagaatgcagtttcttcatctccctgtcccgtgactctgcgtcacgggacatccacagtgatccccacacctcggcccactccaaaccccttaaaatccctagcccccaactcttcggagaagcagatttgaggttttctctcctctccttgttcagccttgcatttaaaattctttttctgttgcaaccctcggtgttggtgtattgacttgcaggccctcaggcaatggacccattacggttacaatgtctgtgaggccctggggtagaaacatcaagtgtgtggttggataatagtcttggatattaaataattgggagaatcatcaccacatagttggtacttaaagctatggaaaaggacaaaattttacctagggagatgtggtaggaggaaaatagggtgtaggagagagcccacagggaatgcccacctggagaccaggatggaggagggaacataaaaaagggtggctgggaaagagcagccagtgaggtgggaggactcaagaaagtgtggactcatgaagtgagtgtttcaaggagtggctgactgggttacatcatgtaaatttgatagttgttcctgggaaatggtgcagtagtagagaaaatctagaatcttcagtcagatagcttcctgtctcactaattggagcttcatttttcttatctctaaaatgggattccaggtactcagggacttgcaaagagatggaattaaattaaattaaaaaataagataaaatggggataatgacaccaacatcacagaactgggataaggtacaaatagataccatataggaaaacagtattgtgcctaagacccagtagggagacactttatatcttaatttggtggcagtgagtggaagggctgatctttgctcttcctctcttaatctgctgttgctaaggacagctgcagggaggtacccacaatcaagttgcccccctgaagatgatcaggggccagagaaaaacaaccagatatatggaaaacacaggcatgttgtctgggaggaggaaagtcttggtggcacttgggtacccttttttttttttttttttttagacagagtttccctcttgttgcccaggctggagtgcagtggcatgatctcagctcaccacaacctccgcctcccggggttcaagcaattctcctgcctcagcctcctgattagctgggattacaggcatgagccaccacgcccggctaattttgtatttttagtagagatggggtttctccatgttggtcaggctggtcccaaactcccgacctcaggtgatcctcctgcctcagactcccaaagtgctgggattacaggcgcgagccaccgcgcccggcaatttgggtaaccctttcatgatttctaggatggcttcatccatagttatccaaacatcaagcctttaatgttggcttctcccactctcttacacccacctgttttctcctttccattccccctactcccagcttagctcaggcctgcatcatttttaccctggccactgccattgtctggtcactggcctccttcctacctccagctagattgatgccatctgagaccttgcttagaatccttcagtggctccccatttccttccatcaacaagtattgatcaataagtatttatgaagggcctgctctttcccaatctctggctaggcacactggagagatacatccctgcccttgtggagcttacagtccagggcggagacagacaaatgaatggttaccatattatttacaaatggggtttttccagagcccacagatggggcacctggcccagatatggccatcaagaaaggcttcagggaaagttgatgtctaggctgagacctaaaagatgaataaaaggagttagccaggcaaagcagtgggcaaggatgagcccttagaaggccttcagagccttgctgaccatcacctttgaacacatgctggccacccacactgtgggcatagacttattagtaggtccatgattgtcactcctttaatctgccctacacccacaggtccttccaagacccatttcagatgccacctcccccaagaagttccagtccccatatcccagtgtctttggtggccctgtgcccatttgcctgccctatcttagccctctccacttcactgcaatggtatattcacccattcctttacaaaatcagaatccagaaagggcaggacaccgtctcatttgtcttcgtgtccccagcaccccggtaagccaggcataggtagacttttttttttttttttttttgagacagagtcttactctgtcacccaggctagagtgcagtggtgcgatctccactcactgcaacctctgcctcctgggttcaagcaattcttctgcctcagcctcttgagtagttggaattacaggcatgcaccaccacacccggctaatttttgtatttttagtagagaggggttttcaccatgttggccaggctggtctcgaactcccaacctcaggtgatctgctgccttggcctcccaaagtgctgggattacaggcgtgagccactgcgcccggtcatatgtagacatttgataaatacgttgaatgaaaggaaaccaactctccattctcccccaccctcccatataatgggacaggagaaaataagatttatttgagaggctgcaaatgacaggattagggagtggttggagatatcaggaatccgtctagctacaggtgagatcaggttttgttttttttgagacggagtctcgccctgtcgcccaggcaggagtgagtgcaatggcgcgatctcggcccactgcaacctcccactcccgggttcaagcgattctcctgcctcagcctcccgagtagggggttacaggcgcgccaccacgcccggctaattttttgtatttttagtagagacggggtttcaccgtgttagccaggattgtctccatctcctgacctcgtgatccgcccccgtcggcctcccaaagtgctgggattacaggcgtgagccaccgcgcccggcagagatcaggttcttaagggaagtccggagaaatggggtttttaaaaaacccgagtccaggctatctgtttggaggggttgggaggcttggagctggaccaataacttcttaggtcttgctttaaggagtgaagattctctgtagcgaccctcatacctgggcagtgggagcgggcagaatccttctttcttctcttctctacaccccctcactccacccccacccttccccgccgcccgtaaaccttagctttcccctttccaacagaggtttccagctgttgatgcctggatggacccggctgcagggaggaggaggaaactctctgtccctcccttcttctgcaagtccccaccctccctccctcctccccctgcgcgctctcggtctccctccctctttctcctctaggctgtccagtcgcctcgcagcagcgagccgcgagcgcccttctccagtcccggcttggaactgaactgtgtgagcacgggtcctggaacccgggcccagaaccggcgagcccaggtctgagcccagagctcagcggtcagcctcgtaggccctgactcggaatcgagccgaggcgctgaggttggagccggagagcgtgagagccgaagagcagggagggcgggccggctgcgcgtccgacgagtcgcagagcaggaccgcggaaggcagggagacggccgcaagcccagggcagagggcagagggcagagagcggcctggctcggcggagagggcgccgccggccggaaccaagctcgccgcccgggacgcgggccccgtggggtcggacccagggtggccgtgggtcccagcgactccccggccgacgcgggggtcgtgccccgtcccagcccagcctccccaacccggcccgcccgccgcgtcgcggggcatgtgagcgggaagcctaggctgccagcgcgaggaccgcacggaggaggagcaggagcgcggagccgcagtccccgagccccgagcccggcgcctggctgagtagtaagtgcacccctccccgccatgatcgcgccgtcgcgcccatttccccagctctctgaagtttgacacttgcgcccctacgtttctgggcacccaccggctctcttccctgcgagtttccaccctgtgcaaagtttttcgaggagagacggaccctcacctacccccaacaacgctgggcagtggcggctcctccctggccgacttgggtccttgtggagagggatggcagcctctaaggcagtgcgtggctgtgtgtgtgtttgtgtgtgtgtgtgtgtgtgtgtgtacgcgcgcgcgcgcgcgcgttcaccacgcgggtcgagcttagggtgcacccccaacccgctcctcgccgaccgcagaggactaggtctttctcatcagcccgactatgcgcctagtttaaggatttctcagcgggaagccgaagcgacctgcgcgcgtcctgcgtggggctcaggtgcctgcgacgaggcgcagagctcctccaccatggttgcgtggggtgctgggggacagacgcgctccccttgccacggtttcagggtcgttccccagcggaccagaccagcgcggcatcctgtttgttttctgctccggctgctcctgtcccacccccacccccaccgcaggctgcttcttgctacccccacctcccgccctgggatatcgtaggtgagccttttcatcccgattccgctgcaaacgctgatcgcgcctaggggtagggagatgcggagcgggtagtcgttcagttcccagcggctcgccattgttttcccaccccgcgcgttccgtacgtaaacacacacgcacacacaaggttgtgtgtgtgcgccggctctggctgcttcccgtccccaggcgcgcagggatcgcccgcgggattcgctcagctgcccgcatgggtcttcaggctggaggcgctccaggacttaactggagctggagaggacaagagacgtgggggttgccggacagtaccgggcggggcggtgagccgggcctgggcgggaagtgaattttgaacttcagccctggacctttccgggaggaccccgagcgctggagcggcggctcccgccctggagggcccgcggcagctgcaaagactccgctggcgctcttggcagccgcctcggtgacagaggcttggaggaagccgaagagttttcctgggaagtttgctttgactctctgggaatttccgggcaggacgcctcggcgctggcgctggcgctggcgctggtgaaggggtctggccaaagacggccagagacgatgctgctggctcttgaccactaggctgtacttggctctcagcagtccaagtaggtgggtctctacctcccggagttcatgccttccaaaccagtatcccccaaaggatcacgacatgccggtttcaaagatgggtgcataactctgctcgttttggagtccagggaggcaagctcggttccagccgggcggcgctctccgtcgagccaggccgctctctgccctctgctctctgccctgggcgtggggctgtctccctgcctaccgcggttgtgctttcggactcgtccgacgcggcgccagcccgctacctcccgctctccctctcccccgctccctggctccccggctccctgactccgtaatctgcgcctcggcgcagttgcgagtcagggcctgaggctgacccctgtttccactgtgcttcattagaaagcgcttcacaagatgctgggattcagcacatttggattccagttccccatcgatgagcagcgtgggtttggacttccccgcatgcgaaatgggcagagttatgcacccaactttgaaactggcatgtcgtgatcgtttgggggatactggtttggaaggcatgatctccaggagggtagggacccacctacctctggatcattaagggccaaatatagcctagtggttaagagtcctggagctggagttagatcccggatgccactggcggtgtgactctgggcaatttaacttaacctctgtgcctcagtttcctcagccataaaatagggttaatatgaacgcttcatggggttgtcttgaggattaaaagacttaataaagtgaaactgagaacagtgcctggcacataataagtgctaggtaaatatgagctattattgccattattacttaactgaccttgtacagagcccagaagagcacttggtgattgtgctcaactaatcaattataacattgcccacttctggagaggaggagatcttgtactctctcccacccttgcctgattccagcccctcagatcaaacgtatccttcttactccttgtctagtgccatcttctcgagtcttttttctttttcttgtttccttcctttctccctcccttcacaacttttgtgaaagcatttcattccctcctttcctcattcttaaaaatcaatcttggctcaactgcagtgttctctccatggaaatcaggtcccaggaaggaattgtctccaaaagggtgtcccttgagcgtcctcagcctgggctgctggatcaggattggatgtgcatttgtgtctctggggcagggtgaatttccagagcaaagagcctgtcaggtgtctggggcccaggggaagagtcaggtggaatgggctgggactgtcccaggaggagccctgctccctgggtagtgtctgtgtctcctgctgctgggctcacttgggaacctggaatagcacagctgcttgggtagactggatgtgggatttggggtgaggggcaaaagtgtcacctccaactttccacttgcagttggaggattttctaggaatttgggtttgtcacaagttccttgtctgattcaggactctgcaaatgcatagcacaggtaaggggcgagctgagcaaccaggaggaagaacagggtgctgctgcccagccacactgccttggacaacaggctcctgtcctcctttctcagaccctccaacctccaccccaggcatgggggaggatggccagaaggttgcttcttcatgttggagatcctgcaattggcagtttttagtcattatgacaactggcactgcagtcaccccattcattccttcaacagaaattgttgaccacctgctatgtgccagggcctgtgctacgcagtgggataacaggggagaacaagacaggcagcgtgcctgccttcaaagaggcttctttctattgtggggagacagacagtaaatacttttaagtaaccaagactatcagattatgacatgcaatgggaaagaaataccacagggtgatgtgatagaaaacatatgtaggtcaggcagtggtggccctagattgggaggccagtgaaggccaccctgggggagaggatagctcagcccaggccttgaaggctgaggagccagctgcataaagacctggagacaggggattgcaggtagagggaatagcaaatgaaagcccctgaggccagaacaggggcaacagctatgtggctggagaggagagactggagaaatcagaggagagccaaagcctggtaatactggttagaagcctggattttattgcaggcgatgcatccatcagagagttttaagtgggggagtgacatgatctgctctatgattttaaaagattatttgggacacaagaaacggtaatcatagttgccccaagggagggaaatggtggctgagggatgggatggagaaaagattgtttttgctgtagacccttttgtcctttctgaatttagtaccaggtgggtatacaaaccatcccccaaaacctcccaaaaacgtggttaacaaagaacagtttataacctggaaaattacataagaagtgaaaaaatcaggatataaaactacagagtacaatcttaatcttgtacagagaattgtaagtatacacatggctatcatgcacacacgcaaggacagaatctgggaggatgcatcagaatatttacagaggttagctctggatactggacgtatggatggttttaatttctttctttatcttccatttgttttttcacttttctacaatggtcgtgaattacttttgtttgtttgtttgcttgtttgtttgtttgttttgagatagactcttactctgtcgcccagactggagtgcagtggtgtgatcttggctcactgcaacctccacctcctgagttcaagcaattctcctgcctcagcctcccgagtaactgggactacaggtgtgtgccaccacacctggctaatttttttgtatttttagtagagacggcgtttcaccgtgttggtttggctggtctcgaactcctgacctcaaattatcccgccctcctcggcctctcaaagtgctgggattacaggcatgagccactgcccccggccaataccttcctcttagaactgttgggaggctaatggctgatgatgtctgcggcagcagygctcyatgaatggtaagggctctggggttttctgttgccagacaagtgtcggttgagctaggcctattccaccaagggatctaggtgtccttgcccttgagaggctgacactggattctacaaagattttctcctctctgggggtgctttgagatcggtccttattgggcagctcccctgggtaagtctccaggaagctgacaccaccggaaaaagtgraattcaaatgcagctgtgctcctgagccccctcccccagccacattcaggggtgaagctgagtgtttgaaaagggctctgtgctgggagggccggccaggcacacagtaaatcgtgctttgaatgggagttatttttgtgcccagtgtttgcttaagagggctcgctcctgcctgaactcgttgcggtcctcaccctttgctagtcccctttctggaacccggatgtgtcagccagggaggccatcacagtgccttttaccagatggggaactagacccatggaggattgctttccctctcctgtcagctccctgccccgaagcaggaaggcatgctctagatggtggtctttgcctcggtgactaccccccttttgactggcccttccttagttcttgggaagacttgattcagagattgctataggccagctcagcagggttcctccgacctctgtcagcttctctgataaagagtgactgctttttaaaaaatgcaaatactttctctgaggagcagagatatggtagttccctcctaagagcacttgctgtatgccatggacccagcttaaagccccatggtgatgaagcctttgcagctcccctaggaaaagatttctgggccgggcacggtggctcacgcctgtaatcccagcagtttgggaggccaaggcgggcggatcacgaggtcaggagatcgagaccatcctggctaagacggtgaaaccctgtctctactagaaatacaaaaaattagccgggcgtggaggcgtgtgcctgtagtcccagctgctggggaggttgaggcaggagaatggcatgaacccggggccaagatcgagccactgcactccagcctgggtgacggagcaagactccgtctcaaaaaacaaacaaacaaaaaaaagatttctgtccagcctgtggtgtggtccacagcatagaacattttttttttttttttttttgagacagagtcttgctctgtcgcccaggcctgagtgcagtggtgcaatcttggctcactgcaacctccgccttctggattcaaacaattctcctgcctcagcctcctgagtagctgggattacaggcatgcgccaccacgcccggctaatttttgtatttttaggagagttggggtttcaccatgttggccatggctggtctcgaacccccgacctcaggtgatccgcccacctcagcctcccaaagtgctgggattacaggtgagaaccaccgagcctggcctcacagcatagaaccttgtagctaccacctgctactccaggtggctctcccgccttagtgggtggcagggggtccttcctgctttaggaatgccctgaggcctgcctccctgctcactcctggcaagagcacattgtggtgctgtcagggaggacctccatggtctcagatggaacagcagcagtggtcagacctcctagaggctgtgaggtgaggaggaagtggctgaggtttcccctgcctcctcctaaggtcatccatgggcaaaccaaagctgcagsatgtgctgtgtgtgtggcctggtatctcagagtcctgrgtgtgcacagggtgtgcacagctaggagacgtcccgagatctgtacccacatgttgagggcttcagccaggggtgttttttgggggagcggaatktgtgtggcatagtagaggaaaagaaggaagaagtggggacagtatctccagctgccacctttcttcccaaatagctttggatacccaggcccttttggtcacaggaagtctgacactgggaagtcatcaaatttggaattcagttccctccactctccccccagcggtggccttagcatttaaatagccttggcatgaagccctataaactgcccaagggattggggcagggttagggggaggggtattggtgttacccccaacattgtccccctgtgtcttctggggacatgtccaagctagggtgtcagtgttttggcttgagaggagagaggggaaggggccacagactgggcaggagccctcctggctcccctcccgctctggtggttttgatcgtaatccctgcctgccaagcctggagctccctgggggatccgccccagaggaggcccgactgttctcctcccctctgccttacctcccccagtccccgccccctgcttgactcagaatggaatgtgcagcctgtggaacaagatggggtgagaactagttcccagagggccttggtcccgcccctcccatcccccaacaaagggggtgaggaacctggaggcagggcctgctcccaggtatggctggtgtttccctgatgcagactcaggtcctgtgctgagttggtgcagaggcaggcaggtgctgtgggggtccaggactagccatttgaaggttttcatataagtccaccatgcggggcaggtgctgagttagagaaagtgcagcaggcagagcagctccaactccagcttctgtagctgggggtggtcaatatcctttgttgacttttttttttttttttttttgagatggagtttcactcttgttggccaggctggagtatgcaatggtgccatctcagctcaccgcaacatccgcctcccaggttcaagcaattctcctgcctcagcctcctgagtagctgggattacaggcatgcgcgaccatgcctggctaattttttgtatttttagtagagacgggatttctccatgttggttaggctggtctcgaactcccgacctcaggtgatccgcctgctttggcctcccgaagtgctgggattacaggcatgagccaccactcccagccatgacttctttcttttttttaaagatcgtggctcatattcgttttcttatttctgtagtctctaagagtaatacaacaatgtgtatcactttcgtcatcaggatgaaaaggatttaaaataaatctaatatttccagatagtgaaacagaaatgtcatcagtgtttgtttccacggaagaccaagaggagtcacggtttgaccagcgctaagaggggatgtggcaggaagagtggttgtgcaaatgtgtcagactgggctgatgccctttcacgatgacaactgagtgggccccacggaccccctggcgggctctgggggtgggggttggggggttgcctgggactcatggggcctcctgctttggccctggcgcctaggaaaggctagacagggaggggagccttggcgtgagctgccctcacactgacttaaaagcattaactcttgcctggccacacaaggcaggacctggcactcctcagagtggagggtgaggagggttttctgtcttagccctcagcctgtgtggggtatgaggtcccccaccctcatgcgaacaacctctccccaccctccagccctaytgaaggagtctgaagtcactcaaccatccttgtgaggttttggttctggcctgttccatgagggtggggtagggtggggaaagaagggggaataaaatgtagtggggaggggtggaaggaagcctgtgtgcaggtacagccgtggctcagaggcaggtggggtgagggcagtggggcttgaatagggcgctgtcgaaagcagagggagtggccccttcagcccctgctgtttctcaggcttgcccggctcctcttttcttggctggtggtggggtgtgtgtgggggggagggaagctgagtrtgatgtgtgtgtgagtgtaatgtgagtgtgatgtgtgtgtgggtgtatgtgtggggggccaggtgtgtgtgtgtttgtgaagggctgagcgtgatgtgtgtatctrtgagtgtgatgtgtgtgtgtggagggccaggtgtggkgtgtgtgtgtgtgtgcacatatgtgtgcaggcaggcaggggcctgtgctctggagaccctggccaggctcctccaacccatgggaaccaggcagggcctccgagaactccagggagacagtgaggacattagacggatgtcaagaaggaagggagagtagaatggaagaaaaaggaagagtcagaacagccagcttctggtgccccaagcasgttggggtttcaatcccagtatacctggggaggagcagtagtgggctatcacccccttccctccttttgctgtcaactttgtttccggggcagtcatggaaccccagccatccccctcgcccgggagcacttaatatgggagtgtctggccagggcaaggggctgaggaagagaaaggagaggtagagaaagacccaatggtgggctccctaactggggcttgtggggcagggagaggaggcctctcctccctatccagtaaactcctagggaccagaacaggaaacagggtcagagaatagagaaaggggacctgtgtcaaatcttgacttgggtagaggtgggtagcaagagggctttctgtttgatatctgagtagacaagggatggacttgactgctctcggccagagaatccttgaaatgggtgtacaagtctaggtgaatgggcctttcttagagttgtgcagtgcacagtctgtacaactgtacacgatagcctgttggaactggctgaaagcatcagggacctttggttttcataatgtaaattccccttctcttctactgggttcacctgaccttagatccgtacttctcaccatggtggcaccctccatttggggctcattttggctatctgtgttacccttttctgggcactgattaacttgaagtttggagaaccagaattgtgtgtgtagtggggaagggggttgtgtgtgagtgttggtgtgtttggcagtttagagagggtctgttggactgttgacaccctttattgagcctgagtcctcttgggccaattggccacaggtgtaaggarcctcctgattcctgagtcaggactgatggggtttaggagctctcagatggggcaggtaagactgaaaggaggcacgtggggaagagaggaagtttctgcctcacctgacagcaacccctgccccaggcccttctgcttttcctcaacccacagggtcttctttatatccctgccttcctctctctatctcccatcatctaaactcatccattccttgcccttcgggatccgtgctccttgatctctaaggagatagcttggatagtcagctttaccaatctaggtgtgtggacagattaacaggtaactccagaagcacattggccttttaagcagccgcggggccttactaatccaagaggtgattgaaaagcaagaacttgaggtggagatggagtggatgttggggactgcgggggccttctctggtcctccgtccctgaggcaggtatgtagggagcacctgccttgtggctatgccgggccaccctgggctggggctgaaagaccatgaagccagcatagccctgacacaacttggagaaagtgaagtaagtaactgataccagtactgacaaastgaggggagggagggacagggcaggatgtttcgggagcacccacgaaaagttccctgaaagacataacataaagatctggagggtggggaggagaacaggtyagagggaagaggaggtcataagggtaggtcccctccacatctcccaggggccccacctgggcctctaagggcatgtcagatggtcctattcctcactaaggacccaggcacactatgactttgcgggaagagtgagtgctgggcatttgaagacaaggtggccaggggctcccagagctcaggggccttattcagctacaagtcgtgtgtgcaagcacggggcagcatgggttttggtgtgcactaccatacgtgggggccctgcctgtggtgtggtgctgtgggttcaagcaggacttgggcactctgtggtgtgtggcccaagctgccaggggattgaaaccccaagcctctcccaggcagctgtggggggtgcaggattgctagggccaactgcaaattagccaggctggcattaaatgcctttgctgcctctctcctcctgtccctccctaccctcctgaaaatcaacaactgtgtcaacagcagggtgattgtgcttggccagcagcctccagggctgccaggaccaggcaggtgctggcaggggctgctggagccccatgctgggagcaggctgggcctagctgccagggctgcaggataaacaaggccgcacacaggctcagccgggagggaggccacaggcaggcaggaggcgagaacaggtgtctcaggagctctgtagacacaaagggcctcttgtctcctcctccctggcctcagggagccagccccttcctccctcctctcaggccccgcccagagatcagtgaccaggtcagccaggggatgctgtcttccagattcacccccttgcctctcagggtttgttgytgcttgagacagaggtgagactagaccatgtgggggtgaggtgcattagcctgagaggtaggaaatctgcctctgagcgaatccaccagccctgaggtctctgtgtgtttcagtttccctgctggaaagacagcaagatctctcccactgggacacccaaacatgaaatggatgggagatgggaaaagcatctggagatttggggaagaaagacgtggtgaatgtcaggagtgatggaagctaagatgagacttaagggattccaggtgggatttagggcaggaggtggccagggtgtggcaaccctccttcctccttacctatttctaaagcagacctttacagagcacctactgtgtgccagccactgcactagggactggggaggacatggagaataatatagtaccagcacagacagacaggcagcttctggagccagactgtctgtgtgatcttgggtaagtaatctagcctaaccatagagatgataacaattgtacctgccacaggctcatggggctattgtgatggtgaaatgtaaagatgtaaagtatagagaaaggatgtaaaactgcccgacatatagtaagkgccatttaaaagatgcctgttattgtccctcttcttgagagcatattaagggctcaaatctagccagagtctggcgggtacagaggtaaacaaataatggcaggttggttaagtactggacaccagtgatgtccaaggtctctaggatgccctggagaaataatgaactcttctaagattgtttggaagggatttataaaggacatctaggctgggttttgagtgaggtatgggagttcgctggtcaagaatgtaggaattacaaaagcagaaagtgcatrtttaaaaaaaaaaaaaagakccaggcctggtggctcacccctgtaatcccagcactttgggaggccgaggcaggtgggtcacgaggtcaggagatcaagaccatcctggctaacacggtgaaaccccgtctgtactaaaaaaaaaatacaaaaaaattagctgggcgtggtgccgggggcctgtagtcccagctactcgggaggctgaggcaggtgaatggtgtgaacccgggaggcggagcagtgatcgtgccactgcacttcagcctgggcaacaaagcaagactccgtctcaaaaaaaaaaaaaaagaaaagaaagaatgtaggaagtgccttctagccttctaggcagagacaccatgtgagccagaccccggaggtgtgaaagtatgagtatgtgtcctaagtacatgtttgtgagcacagctggaggagtggcctgggccaggtgtggagggcctgtgcagcctggaaaggagttggggctcatcccaagctccttgccggttcctccagggtcgggtgccagctttggccatcactgtgtctatcttccctccccctcctcagttcactgcattatgaataactcagctttgcacactctggagtagccttcaactttttaaaaaattttttttrtttttgaaatggagtctcgctgtgtcgcccaggctggaatgcagtggcgcgatctcggctcactgcaacctccgcctcccaggttcaagagattctcctgcctcagcctcccgagtagctgggactacacacatgtgctgccacacccagctaatttttctatttttcatagagaaggagtttatcatgttggccaggatggtctctatctcttgacttcgtgatctgcccgcctcggccttccaaagtgctgggatgacaggcatgagccactgcacctggcctgccttcaacttctagaaaggcaggatagtttagtgacaacatcatggggtgttagagtcagaaagtttggaagtttctgggttttgactctaaatatggagccatttacctaatttctttgagccatattttctttatccataaaatggcgtaatggttctcccttgtggcagggtgatggtacggattagagaaagatgtgtgtgtgctgggctcacagtaaatggtagctattagggtccctctgtgatctggctcatgtccgaagcctgtctgggccttggtctctagatctgtaacaaggagacaatggtctttctccttcctttttttttttttgagacggagtctcactctgtcacccaggctggagtgcagtggcgcgatcttggcgcactgcaagttctgcctcccgggttcacgccattctcctacctcagcctcccgagtaagctgggactacaggcacccaccaccaggcccggctaatttttgtatttttagtagagacggggtttcaccgtgttagccaggatggtctcgatytcctgaccttgtgatctgcccgcctcggcctcccaaaatgctgggattacaggcgtgagccaccgcgcccagcttttctccttccttccatgacttctgcagaggcaaaagggccaggctgcccatcacctgggtagataagtcaggctgggaggcctaggactgctcgccttatacagaggggtcaggtgcctgccttcccaggggcaccagctggaccctgctgactccatggtggctgcagctatctgttccaggaccttcctgtagcttcccagggcctgctccctgtgcatgaggcagtaggcccccctgtcccaccttttcttatgggagcaccctgacatctcccctttctgtctgtgctggtgtttccgggaggtgctgggaccaccagtgctaaggccctggtctagcttctactgctaatggcttgtatgccctcagggctgtcacttagccacttggagccttacttcctccatctgcaacttgggaaggagcattttgagttctcttgctataaagtaagaattctggtttgctggaaatagagttagatgaggatgatgacaaccacactggcagtttttgctgcagtttcaaagcccggatgtggagtcagacactttgccacagccccgcacaggatgcttctgtgaggcttgtctcrggtacctcataaaaccttctagtttggaagggcagggagcatctactcctcagatttggcagatgaggatattggaaattgtctaggtagtggggcttccagagtcccacctggctgtggatctgcagggatgaggctggtctatgcggtatgtctgactctgttcagaacaagtgacagcccacactgggatcttgctttagagtcccttggcctcctgccctggcatcttgccattggttttggggaaatggtgatgggaagggcccattgggtctccagacagtcacagggaaccatcctgagactggatctggaaggatgtgtgcttgtagggccctcatttaccttctcctccctcacttcccaccttggctgtggacgtagccctgttttctcttcccctgtggtcatgtttctcagatagccacaaagtgggctgagaccaaggagaggcattggtgcaaaggggatgctggtcgattcggctggggacactactctgggttctcctagccaggtggtcagatgactccctacgtagccttggaaactgcccaaataagaaagagagcgaggcagaaagagcagcagggacactcggatttttccaggggctttgtccatatttacatggcatttgcatataaccagtacactaaacataattttataatctatccccaggcacattcagatttgccttttactcttgttctttccagagatggctggttctgcctttttgcacctgtctgtgccttctcactcctgtcccgttacccccactcccagactgggggtaggtgactgggaacagagtcagtgtggggtaggggtcattcctgctgttgaactgatctgataagatgagatcagacctgacctctctgggcttagcacagasggctggatgcacaggcccagcctcccctctgcatcccaccccagcggccaccacctcgcctcgtcagggatcaggacaccatgcctggcactcagcaggtacccattaaatgtgaagtgaaagctcaattagagttcggacaaatacatactgtgcaggctcctcgggacctggcttttgagctcatgaagggagatgctggtgggttgaggggagcctccagtggtccagagggtgggaggaatcaatttccctctcagcgattgtgaccagggaggcatttctttctctgcttggccttgcaggaaacagtgttgagaatgagaggagcagaaaggaagagctaggccttgtattaatttgtttttcagattgagtctctgttactagcaatttattacatccgggtctccagccaagcacattctgttctccagtgttgggggaagatgcatgggggggtggggaagaggctggacaggaaagaggagcagatcaacaattttatgactgagtgtgtggtgtcttggcgtgcgctagaggacggttttagcacagggcattttgagcccagccccgtgtggggaggcactcctctggacrgcatggcattcccatgcgagcccagacagccctggggagcaggatgaatgggcttccctcccactctcatgcccgccggcctcagggtccagatttctctctgtgaaatgaggtcaggacagtgatgcctggaacaaaatcatagtttcttgaggcagcggggcctggggagatccctccgaggaacaggggagcagctgtgtgaggggaccccggaagaggggtagcaggcaaggcggccaccctgtggaaagaatggtgcacaagcaaaacaaccccctctctgcaaaagtgctgagctggtggaatttcacttggcggctgtgagatcagggcagtagatagagccctgcgggcaccagggctgtgtgggtgcagggggtcccggaagagagggcaggggcagcacctgtggcaccctctcccctgagctggcctccacattgcccagggctcatcactggtccccattcctggaggtgcgtcccttatctctatccacctgtcacgtaagttggtctcattcttcccattttccctcattctcttcccaactgtggctttgactagaagtagctacatcatctagtcttcaaggggccagcattgcgtagagggccatggtgccagagggcagggaactctggtaggaggaactctctccgaccaggatggtggtggctgaagcccccggggcctctgccttatggctgggcctctggtgggagcccaggctgcttaggggagagtgaacccttcggtagtggttttttgcatcccagccacatcttcaagctgggtgccattggatggttgttgaagggcagattcactggaaggataagaagctctggtgggactctgggtagagccagcacagagaatgtgtgtgttgggcagtcggggagagagggtgttaggcagggagagcatgggcctggtttccagctgtgaggtttgaactattattatcctccacactgagctgatggccacttaaccctgaggctggttacttgttctctgttctctgggttgactgcctcctccctgactagctcaagacttcttcttcttcttttttttttttttttttgagatgtagtctcactctgtcacccaggctggagtatagtggcatgatcttggctcactgcaacctccgcctccagggttcaagcgattctcctgccttggcctcccgagtagctgggattacaggtgtgcgccaccacactcggctaacttttttgtattttcagtagggacagggtttcactatgttggccaggctggtcttgaactcctggcctcaagtgatccacccgcctgggcctcccaaagtgctgggattacaggtgtgagccaccatgcccggccaagctcaagactcttgccaaaggctcaggaaaggatgaactcaaattcgattcagcacgggtgaatttggtaagtgtgtattgagcatggattctgggcccagtgttctgctaagatgagcatctgtagggcacctttgcaccaggtgctgtaaggaacaccggtgacttacagaggctgaggaggccctgtggggtgggaagggatggtgttagtttagattgcagttaggcggagaccatccaggttagaaggaaccttggacacgggccgaggagctaggactttgttgacaatggggaaccagaggatctgtcagagaactttcagaatgggtggctcattcattcaggctgaagctgctctctcattgtcctgcaaaaaattccaacagaacactgttcttttcctttccattcaaagacatttttgctgccttccgtattgaactgcctggtaactgagacaactttcccttccctgccagggctagtgggttcccagggctgccaccctgggaaaaagacaagtcgcgtttcctcgtctgccctgacccatgctgctcacggctttggtcccactgggacccaaacgaatcagtgtggccagctttcctgggatatccagcatgtgcagtttccagcatgagcatgcttatattgttcaggatcgaggaatattgatctctagatgtctttttaaaaccaatggtttggtatatttgtgaatgaatgagatactcatccaatggataagctttaccaagccctcattatgtgaaaggcactgggcaaggctaggggtgaggggatcagaccccaccctcagggatgctctaatctctctggggaggtgaaacagttcattgtgggaacaaagcctctttcccatctctgtagccttgggttggaaggctgggggcaaggtgaaatcagactggggtttgagtcctggctctgcttctgagccctgtgatttctggcaaataacagaacttttttcgttttctttgtgtgcgtgtgcgtgtgtgtgtgtgtgtgtgtgtgtttgtgttttagatgggggtctcactatattgcacaggctggtcttgaactcctgagctcaagcagccctcccacctgagctcccaaagtgctgggatcataggcgtgagccactgtgccccacctctttcttagctttggctctttctttctttgtttctttgctttctttcatttgtttgttcttttgttcattctttctttcgttctctgtctgcctttctgtcctttctgtcttcttttttctttccttcgctttccttcttctgtctctttcactttttttctctcttctttctttgtttctttgatgtagggtcttgctctgttgcccaggctggagtgcagtggcacgaccctagctcactgcagccttgagctcctgggctcaagtgattctagctgtgacttaggcatgtghtactacacatggctaatttttaagkttttttgtagaaacaaggtcttgctatgttgcccaggctggtcttcaaagtctgccttggtctcctgaagcacgctggattataggtgtaggcccaccacacctggcccagaacttttttttctttttttttgagacaaggttttgctctgtcactcaggctggagtgcagtggcatgatcatggcccactgcagccttgacctcctaggctcaagcagtcctcctgacttggcctcccaaagtgcttggattacaagtgtgagccaccacttgtggcctcagaactttcttaaaccctagttttctcacctacaaagtgggaaaagaataacacctactttgagagattaaaaggatttaatgaagtgatgtatatattatggcccttagtataggacctggagtatagaaggctttggtaagtgggagctgatattagtgtgatggctgctgtggaggtggttgttgaagtctgtcctggggtggggacagtccagcattcctgggcctacttggatttagggggctgctcctcctagggtcatgggcatggcctttatggggtatgggaaaggaggggaatcagcttcccggtgtgtggtggggacaggcactgtctcctataacacctcctttggttgctacgtgcagatttgctgtgcagcacgggtcaagttacttagcctctctgtgtttccgcttcctaackgaaatgccattaatcacaatgctctcacttgagaagagagaacattagaagggtcacatgagaagagtctagaatagtgcgtgggaatcttatccaggtgttggctatttgttgctgtgattattctgtttttggagtgacccccrttcagtcaaagaagcaagggtgagagctgctgtcccaagtgtatcagcatagggacgtggggacgtgggggaggtggactggggcatggacctcgctatgctggccccagggagcagcctagagaaggaaagaaactgtttctcgaatgctagctgtaggtagggcgttcccaggtgtgactgaaatgacagtctggctcagagcacactgccttttcttcccaccttaactggttactaaggggacagttctacactacacaggattgatttctgtgaaatctatggaatttacatatagttttgaggggctgctttgaggcatgaagccaccgtattcacaaaacccagctgcgggtgaattgcaatttataataataaacagcctgtacctgacctttggaccctgggtgctcaggatgatgcctgtggggcctgacaggaagtgaaggcggtggcatgggtgtggggggccacccctccctctgaccatggtggcgggtggcatccaggcccagagaagccttgtcactggctgtccccttggcacccagcccagcaggcggagagggttaattgggatttggagtgtctgtggaaagtagcctcttctcaaatatcttgtgctatggtttggaactttggaatcaggcataccgaaagtggaattctgtcttcaagtaagcctcagtttcctcatctgtacaatgagttttgtccctgaagaaaatccacctgtgaagtgcttagcttgtgatcactcagtaaataggcactgtcattatctttctgatgaggggcttccrtatgtgacctgccctgggctacaactcgaacatggaaatcagaagcttagcaacactattatttccactgcatcaaaggcctgggagccctcccctgcctatacttttgtctctcagagaagaagtaataattcactccatgtgcaaatggaaaaactgagacctgaaaggttgagtggtttgtcccaggccccatagtgagttaaaggcatcaaaatcccttacacatgtatggggctttataaaccatcaagtgtgtaaagggtgttgacatttagaaaataactgtgccgagtctcctagggatctggtacatgtattttgactgccagtttacggatgggaacgatgagactcagagaacttagatgagcccaagattgtacattgagtttgtggcagagttgacgctcaaactcgagccctctgctctttccaccgcacacgcagacctctcacctgggcccttctagaccctctctgcaattattttttcccctccatacaggtagatctgtgaaggtggagagtcatgagccagcagggacagggttaaattcttcctaagcaacagagctggttttgagctgggcaccttcagtgaccccattgttgacccccttccctcgggtcaggactgcaggcagtgggggaagggaagcactgcagggagctctaatggcccaatgcgggcagagagagggccaggaagggatgctcatctgtctccctctttggacagagatgaacaaagatgccggtggctttttcagtctccatagaaaatccccaaggctcccttggggcgggctgccatcagctcttcctgcactcttaatcacaccgtggagcacgggcagctcctgtagacacagcaaaccctgtgatgtgttgttggttaagtgggaactgggataatttttgccagtaaagcaccaaatcagaaaatggaagcatcaaatgaaccttagggctagtgggattttggggcttgcctgtcattcattcattgaaaaggaaaaggatggcttgggtggcccacagaagccagcatctgtgaccycaaatggatgagtccctgcaaactgggaaggctgcccagttcctcttcctcttcccaagtggcccccgtcctgccactcccttctatgagcgcagaccttctggtttagagcttcagtctggaccattgtgctgtgtcctctccaggcggggagggcatcaggagtaaacctccttccacggccmtgagccgtacagtaagtctcccagggttgtacggcaaggcaggggcagagctgttctgtaaacaggcgtcagttcagttgccttgaaaccgccaactctaagatggacatccgaggggaaaggatttccaggaaagtcgaggaactgattttaggggaagactaaatctctttctctatccccatcttcttgtcgtctgggtcccttgaactccctgctgagaaatcctaaatacaccttgtctctgggttgcgcatggaagcctttaattgtttctagaggcagtgagggaaggccttctagttggtcgggcaggtctggcactgtctgggtcttgctgcttctagacacttcaattagggatgttaattatggccttgtgaacacaggctctcccaaggcagccgctctccagccctgctgcccccatgttgtcccctcrccagtcagtgaggctatgtttatggtctcgcctctgtccatctgcagattaaagatgccctgaaagcataacttattagcagttttttgttctctccatcttttaaaaaattggattaaagtagacataatgtaaaatttacaatttgtaaatgtgtagttcagaggcattaagtccattcacattgttttgcaaccatcaccaccatctgtccatggaactttttcatcttcccaaactgaaactctgttcccattaagcaatagcgtccccttcctctctcactccagccctgtaactctattctactttctgtctctatgaatttagctgttctaagtacctcacataagtagacacatacaatatttgaccttttatgcctggcttatttcagttaacataatgtcttcaatatttgtctacatcgtagatgtgtcaagattgccttccagcttagggctgatgatattccattgcatgtatatatcatactttgttgattcattcatccattgatggacacttgagttgtttcccattttggttgttgtgagtaatattgctatgagttttgggggtatatccccagaagtggaattgctggatcatatggtaattctatatctaatttcttgaggacccgccatcatatttttcttttcttttctttttctttctttcgttttttttttttttttttgcgacagggtctcactctgtctcccaggctggagtacagtggcatgatcacagctcactgcggcatcaacctcctgggctcaagcgatcctcccacctcagcctcccaagtagctgagaccacagtgtatgccaccatgcccagctgatttttgtatttatttatttatttatttttgagacagagtcttgctctgtcgcccaggttagagtacagtggtgggttgtcggctcactgcagcctccatctcgtgggctcaagcaattctcatgcatcagtctcccaagtagctgggtttacaggcacccgccaccacacctggctmatttttgtatttttagtagagatggggtttcaccatgttggccaggctggactcgaactcctgaccttgtgatccacccacctcagactcccaaagtgctgggattatatgcatgagccaccatgcccagctaatttttgtattttctgtagagatgaggtttttccatgttgcccaggcttctatctgtttttcacagcagctataccacttttcattttacattcccatcagaaattctctacatccttgccaattctcctcctcctctttcttctctttttcttcttctttctccttctttttttgataatagccatcctcttgggtatgaagtgaaaatccactgtgctttttatcttttaagggggaagtcaaggcctgagaaacactgatacgtgcctctgcattgcagagccccttgggcccaggctttctagccccatcctggcttccattctctgtcctaaacccctttgtctccagtccatcaagagagggcaggggcgaggtccactgactgttaggggccctgccttccctcctgtcacagcagcagagtggctgtgacctggcagaggtgttgggagggtggatgtccctaggggtcaggaggaggtttcagtaatgtgaaattggaagagttgaatcatttcaaccacggggcatggggataaaggaaatcatgatgcagccatagagtggaagatgtgcagccattaaatatggctttatgaataatttttaatatccagtttttggtaacatgaaaactgctgatgtgtactattaagtgggagaaaataaatataaaaacttgcttatgaggccgggctcagtggcttattcctgtaatcccagcactttgggaggccgaggtgggtggatcacctgaggtcgggagtttgagaccagcctgaccaacatggagaaaccctgtctctactaaaaatacaaaattagctgggcgtggtggcgcatgcctgtaatcccagctactcgggaggctgaggcaggagaatcacttgaacccgggaggtagaggttgcagtgagccgagattgcgccattgcattccagcctgaatgcaacaaaagcgaaactccgtctcaaaaaaaaaaaaaaagaaaagaaaagaaaaaaaaacttgcttatgaatgaaaaacaaaaccaccttcagaaaaaaagatttgatagaaataggccaaattgttgtcaatggccacctcctggatggatgtgaaatgggtgatttttaaaattgttttcttatttttaaattttaatttaaatttattttttgagatagggtgttgctctgttgcccaggctggagtgcagtggtgtgatcatggctcactgcagcctcaacctcaagtgatcctctcatctcagcctccttagtagctgggactacaggtgtgtgccaccacacctggctaattttttcatattttttgtggagatgggatttcaccatgttgcctaggctgatctcaaactcctgaactcaagcaatccacccacctcgaccttccaaagtgctgggattacagatgtgagtcaccatcgcccaacctgttttctttatgttatttaaaattttgcagattggctgaacacggtggctcatgcctgtaatcccagcaccttgggaggccaaggcgggcagatcacctgaggtcaggagttcgaaactagcctgaccaacatggagaaaccccatctctactaaaaatacaaaattagccgggcgtggaggcgcatgcctgtaatcccagctactcgggaggctgaggcaggagaattgcttgaaccggggaggcagagaagttgtagtgagctgagatggtgccactgcactccagcctgggtgacagagcgagactcaaaaaaaaaaaaaattttgttgttgttgttgttgttgttgctgattttctacagtaagcacacactccttttatatttaggaaaaaactgataaaataagagtgactacgactattcattaggcatatgtgttgccagggtctactgaacactcagctctgcttgatgctattgaaagttcaggaatgaatgcgaagctaacagggaggtgtggggttaggtggtggggaggactggccagaacacagaggggtgatgaatgtaaggggagtcagggtctgggcagcctggagccctccagaatgctgcctttgttcatgagaagcctcattcatggggaagataccgtgggtaggactctggccttgagtcaccttgtctctgcaagtggcgcaggcaggctccattgagctcttcacccatgttcacctggtcccttggcatagctggcaggagtgagcgaagcttgtagcctgtgaraccaggggttttcctgccccaggttgactattacttcccttgcatcatccgtaccagggccaagggcctggttcccttgacttccattgtgggagcagcactggcccagcagaggtgggacagtggggtttccaggagataaacttccatggctcttgggacctctgactagtagaagagaagccagtataatccaacacttaaaagaagagactcattagccagtctctgggttcagtttcttggtcactactcactggctatgaccttgggcaatggcttagcctccttaggcctctgtgtcctcatagtagctatttcacaggactaatgaaggaattaaaaggctaaatccttatagattatgcttagcatgtaagtagttgattcctatggtctgactgagaggtggattctgatgctagactgcctgggctcaaatcatgttggtgtctcagtgtctttttctggctttttttttttttttttttttttgagacagggtctctgtagctcaggctgaagtgcagtggcatgatcatggctcactgcagccccaacctcctgtgctcaagccatcctcccgagtagcttgggctacaggcatgcctcaccacacctggcaaatttttgtattttttgttgagatggagtttcatcatgttgcccaggctggtcttgaactcctgggctcaagcagtcctcccacttcggcctcccaaagtgctgggattacaagtgtgtgccactgcgcccagtcggcatctcaggtttttcatctgtaaagtggagatgataatatgatctacttcagatgattattatgaagattaaatgaattaatataagtaaaagtgattcgaacagtgcttggcacatagtaaatgctcaataaacgttagccataggctgggcatggtggcttatgcctataacctcagcattttgggaggccaaggcaggaggatagcttgaggccaggagttcaagaccagtctgggcaacatagcaagaccctgtcactataaaaaatgaattagctgggcatggtggcatgcacctgtagttccagctacttgtgaggctgaggtgggaggattgcttgaggctgggaggttgagaggctgtagtgagctgtgattgtgccactgtactccagcctgggtgacagagtgagaccccatctctaaaaagtaaagttagccataattggggtctttcaccacatactagtgtgactcagccagttgtttgtggctggcaactgccaattcatctgattgtcccaagagcctcagtggattggtcagtgcccatgactcccttgctaaatagtcttgaatgtcaccattattcattactattattagtattgtgggttccacgtgtcaggatcccttcctgggttgtatttcatcttacccctttgccaagtcttggttgatgtggtcctgcctcagtttccaaagggtgctggtgatggaaagcggggtgctgggcagattggggtgaaagctggctgctttggggattgtttgatgagcattatagtagattaagctrcttctccccttccttccctgcccttattgaaaaggcgccaaagccaggaaaaacaaacagccacccataaataaagaggaccatgaaataacaaaatcgaaaaagaaaacttgctttagtggcgggcttggctgacgatagggtagataatgggagaggaaacgcagcctttggagagaaaaagaacggaacgckttgttcactggaagaatgaatgctgcctgaggaagagctgctaaactggggtgtccgatgagcgagcctgtgttaggggagctggtggtgattaggcttacatgaggcatgagtgtcatyccaccaagaacccctgggatgggggacaccttaggcttaagcgggctgygccaacgggaggccggtgtgccagtctggcctagagccttggctgccatgatcatagagctgctgctcacctcctcaagggctggccaagctgggagctggatgcttgaatctcttagggagcccctagaccttctgtcaaggtatatattttttctggagtgttagggagacaatcccagggaggagaggaggaggccaaagttgtttgctgactgtttgcattcaaggctgtgctcctgtcaacactgcctggtggctttctgggtgaatgaaatttactgacttctcttcctttcttgtaccacttacccatctggatcgtggacccatttctcctgcctctgcaatgagttgggtgcctgaggtgggaaggggagagaaacctttcctgagcccttgggatcccaggatgctgtgtggaagtgcccactttgggagtgggctgtgggctcacagatgggtagaggctgatatttgaaatgcatttaagaagggccttagatggctgggcgcggtggctaacacctataatcctagcattttgggaggctgagacaggaggatcacgtgagcccagctgttcaaaccagcctgggcaacatagcgagattccctctttatttaaaaaaaaaaaaaagtggcaggaggccttggaaacatactggtttggggctgagtggtctggctggtagaggtttcctggaaacacagtccttcattcagccaccacaatactaagtgccaatctgctttgtgccaggcattgggctaagtattttctatataataacttatcagttctctagcaagcataagaggtaggtattgttagcccccatttcagacaatgaatctgaggtgtaaagaggttaagtctcaagtattcactgggctacctagagcccagctgcttcccaattttccacccttcacctcctaatctagatgacaatggtaaaatgcccattacagttgttcatcacggctgtgtgccaggcactgggctttgcctgtgttatctcgtttactctttgaaaccccactagtgagtatatattactatttgccccagttacagataaaggcaggagggtcatttgagcccaggagttcaggaccagcctgggcaacatggtgaggctgagagagttaaactagttggctagttaagacggatgctgggtttgaaccaatgctgcgtgtctcccagagcctcatttcaccatgtactatgagggcttagtctacatggcttagacttgtcacaaagcaaaagccgataatgcccagcccaccccagtactgggagaaggagtgtttggcaaaggtgagatttcatcagcctggygggtaaacatggctgtttgcagactagttgcgcttgtcctttccgctgtctgtagtcatccctatggtccccaccttcctctccctctggggttggcaggagaacgcaagggttaatgatatagcacttcacccttgtgggctccagaggaaatgagggagctcatgagttctgcagagcttttgtgtcatcagccggggaagggaaggcaccgtggcttggccagataagcggtggcgctgcgaatgtggggcttccttggcagatttgtagcctttccgcctgtttgcactgtggggcacctgctggggcttccagggtggttggggacatcaacagggcattcagaaaactgataacctaggctagggagggagacctacatggagcagatggaggaggaagagggtggcgggccctggtgttctgcaggtgcatgtcttctgcttgtttgaccatgtgggggaagggggtggcggtgggtcagggagcaaacatttttttgattttcacaaacaccatcatattcagtcttctctatctctatggggtaggtgttatttgttcccattttagagatagagaaactgaaacttccccatggccacacatctagtggtatataatagagccagtcttcagacacaggtccatgtgacaaagtcctttttccattagccacaccaggatgcctcccagcaatgctgggtcatcacacccacccacctgcctccggaagagctgggctggctggggaggagaatagggtgtgagtccttctcccccttgccctgggggcagggagggagagggactccttcctgctttagggctctttctccttacctccttccctgaacatatattctgtaccagattctgtaattataccttatctcttactcacaaaatagttcttggaatctctattttacacatgaagaaatgggggttttgagaggtgaagtctttcccccaacttgccagagctgcctgggtttcttttgactaagttttccttggctatgactcaagtcagaaacaactgcaatcctgtaagaggtgaagacagtggccattctatctctgctggaccagagcctgttattttgcaccgaggagagtggccagggcatcagctgataaatgaaaggatgtggatttagacatcagcgaggcctgagttcaaatgctacttctgctgggccctcagtaggacgttctagcccccgagccttagtctttgtagtgttcttgtgaggattaagcaggaatgtgaatgaagagcctttcacttagtgcttgcagccaagtaagtgctgtagcattgcatgcttgctttttgcctcccattcctttggtcagtattcagggctatcccccaaggggcctttgacatggccagtcagcctcagctgcacaatttctgcatctcccagccctaggctgggcactgtccctgcaggaagccagatgtgctcacctgtccaggacacaggcttggccttgccattgggaaacaaggatgaggcctacccctgccttctagcactgttggggtgcaggagaacctggagacaggcttgggttctagaggcaggaaggcctccagagaagggcctcctagagacactgttgacctcttctcggtttgggaccttctggaggcacacatcacactgggagcctcaatggcgctttcaagcagtcccatctgtctctttctcgacccactcactgggttgggagaagactcaggtgcctctgaggcctgaggaccaggtgggaacatcacagctacagtctctccctggccactgttttcctttgtgcccttgggccagggtcagctgagtcccggcagccacagaagctcaggctggactgtgattctgtacctgaggtgctgtggggaagtgcctcttctcccatgcttgggagttgacccagcctctgtctgatgttggccactctaccaggtgaatgccaccctgaccagcctggaaacagccgagggagtgttggctgtggcccccctgagctgggctagaccagaccggccgtgccctggatctgataccccccagggctcacagaggctggaaagggtgagagggactcgcaggaaagctttgtcccaagcctgcagccagtccagctcccagctctgagtaaacattagagataggatcgggtgtagccaggaagggtggcagggtgtggtctgtgagaagaatggcaggatgtggcaccggggcactgttctgggcacccacgccttggcctattgtttagggcagcctgaggttctcagctctctgggggctttcagaggaagtggcattcccctgggactcaagccctgccccacccctgctgcatggatctctttccctggtgatgccccttggcaccacccactcagagcaagcttgggagtgggagccagcagtggagggggattagtgtgtgcccagcggggaagtgtagccattggccctctcagagggtctgcctgtctgttcaggcttcctgtaccccagggtctgagtcacccgtcatgctacgatgactggaatttatctctatctttatcttcatctagatattttttgtagggtgggggaaggctgtcgttgtggagggaggaaggactgacagtaaaaactcctttgattccaatccaacagggtcagttgttgactggttagaagaggaagtggctggtgatttgttttgggcagaaaggggctaggtttgtgtgcgcctgtgggttggtggggttcagaggggcngtgacagggctggttgtggggaggagagaggaagaggatcggcacctgcagcgggctttgtcatataagcgccatgctttgagccactgtycctccatggaggcgggtgcctctctataccttgtctcagrtgctggatttgggggcctcggggcctggtaggcacaagctgagactcaaggctctgcatgtcaagggcgaagatggctggagccctctccttagaggtcttcacttcttaaggatgctcacttgggtgagataagaccacagaggaagaagaatggaagagggattgtgaggtgggttcctgagaaggaagggagggcagagcagagatgccgcttagcgccccagctggctgaaggcctctgactctrtataatctcttttttttttgagacagagtctccctcagtcacccaggctggagtgcagcagtgcaatcttggctcactgcaacctccgcctcctgggtttgagcgattctcctgcctcagcctcctgagtagcygggattacaggtatgcaccaccatgcctggctaatttttgtatttttagtggagatggggttttaccatgttggccaggctggtcttgaacccctgacctcaggtgatcaacccgcctcagcctcccaaagtgctgggattacagatatgagtccggccattctatacagtcttgaagcagtgctgccccaaaagctgygtgaactcaacatctcctgacctcagtttctctgtttataaaatgtgttgaggttgggcaagagaggaaactgggcacgcaggagcacttccatccaagcgaggggctgacgggctaccctgtggacttgtggcctctgaccagtaccaaggcatcagactagggtggaaactgagggagcccagtaactcctgtatcctgtggacccagcgttctttggcttctgggcattttgggacagtggagtttgaggttactgaccttaaaacctcctgcggagccacatggaaaatgactgaagcaaggagcatgctgtgtaacaaaggagtaaaggaacttgagggattattttagtttctggaaagtctaaagggagacttaagggaggactccaacggggtctttaaatccaaaaagtatggaaagtgtttcttatccgacccaaggtaaaaagaaaaggaaatggaatcgctttgctgctgggggtatttaggtaactcataggaagagcttagacccaaggaagaggcagcagaggataattgggtgtgggagaaaaacctgagagagcaggagctgtctaatagtcctaacagtatccatcacctgttaagcatccagacctgctttgtgctgtgctgctgaactctgtcactctcttgtcattctaagaatatttatcgagcacttactgtgtttcaggcactgtgctaggctctggagctacagtgatgagcagaaacaggtatatttttggctactgggtgactccaaaataaattttttttttttttttttgagaaggagttttcgctgttgttgcccaggctggagtgcagaggcgtgatctcaactgactgcaacttccacttcccaggttcaagcaattctcctgcctcagcctcccaagtagctgggattacacacctgactaattttgtgtttttactggagtcagggtttcaccatgttggtcaagctggtctcaaactcctgacctcaggcgatctgcccaccttggcttcccaaagtgctgggattacagccgtgagccatcgcgcccagcgactccaaaataaattaagcgtgtaaaggtatcattaccaattgtgataaatacttttaaggtcaagttcaaagtgccatgagaatgtaaaataggcactctgatagggtctggtgttgttaacaggagattcacctcttgatgttgagtttcttattcctattttactgaggaggaaatgggctcagagaagttaagttacttgcccaaggttgcacagcaatgattggtcagagttgggattcaaatgtacccaagtctgtctgaccctagaggcttttctctcaaccacttgactctcagagcatcctggactgcgcacaacttacagaatagatattcaccctgtattatctgatcttcatggacaccagtgagacatgggttattgtacccattgtatggatgaggagacaggctaagggaggttaattaatttgactaggttcatacaagtcagcctgtggcagggcaggaatttaaacccaggttgttggattcaaaccctgcgggtcttccaagttgtcccctgactccctccaggacccttgttttatagacacagcttgcaggggtgaagcaaactgtgcagacccccagctgcagagtgacagagcagtgaccacataatgacccctctctttccatctcactgcctttcctcccttatctagttgatcatgggaccgtcgctcccctccctgggatggttagggtctggagcctggtactgatgctcttcacagagacacctgcgtctctctgggccatggcaggctggggcttggttccctcaagaccagacagggcagggaaagcagctgctcttctcaagcaggcctgtgcttggggagggggagagggaggtaaaagaggtacccagggaccctctcccccaaaggtgagacccagagktgctctccattgggggcggggtggcattgtgcctgggctgttgccttttcatggacaagtgggcccagaggataccaactaagggccagtgcccagcacctgccgttgagccagacacctgtgaggatggaagggcccttgtctgggcagggttatctggtgggcacccagccctagtgaacagactgacacctctaagctggcttggctggtcaccaggagccattgtctttgtgctggaggccagggtaggccactgagaggcccaggagacaggctccctaatataagggtgatccatggtgcctggctggagggaccgtggaggctaagtgtgtgtagaagctcaaagggaggaggtgtcctagtgcagcgctgtccaacataaatataatgggaactacatgtgtaatatttgctagtagctgtattaaaaagtataaaaagaaataggtgaaatgaattttaatgatgtattttatctaaccaacttatccaaaaagaatttcaacttgtaatcagtaaccattactaatgagctattttacattctattccatgtactaagccttcaaaacctggggtgggtttgatgcccacagcacatttctgttgggactggctgcattataagtgcttagtagccgcatggggcaagtggctgcaatcttgggccgtgcagtcctagggttaattaggacagatgatggcctcctctgcctccaccatcagctccagggatggatggtcgttcaccatccccaactggggagaccttggacttttgtgtcctgttcatctgaccatgctcctggaggctgtggctgctgctgggatttctgggctgcagcaggaaggctttgaggtgggagctggaggcccctgaagttgggacagaatgaaggagagacccttaggacccaagtccggagtgaggagggacccggtggccggcctgcgcccgcagtgggtgtgagtgaggtggcgctgagccgacggatcagaggcccacaggcccgcattgtgcgcctgtcacacttcctttggctttattgcttttgtccaacaccctattgtctggcttccttttgtcccccattcagtgctgctgccttttattttccagccagcctggttgttttcatttcttttgtctgaagttcctgagaggaaggttttattttcagcggtttgattaattcacagcttgagcccagggtttgtttgttatgtaattgctgccttcggcttcaggataaaaccccctccccaactgcacccactcccacttctcrcccccctgctctcggcctggctctgagcccctcccggtgcccggatgggctgagccgcctgctttctggacgctctccaagcccctgggctgtaggaggggaccccagggtgagctggcctggggtctcttctcttctctgcatctaggtgggatggggcctttgtacttatggtcatggaggcccctctctgcagtgccctgtcttgggacccagcctctggggaaccctacactttgaaagtgggtgagcaggagagtctggtctgatcagcaaggtggaatcaaatcaaatacacatgcactcatgcactgcttgcctaccaatgtctctgtcaacgaccgaacacatataggacagtggtcctgcaagattctactactgtatttttgctgtagcttttctatatttggatgtttggatacacaaatacttaaccattgcattacaattacctacggtattcagtacaataacatgctgtacaggtttgtagcctaggagaaataggctataccatacagcctggtgtgtagtaggctgtaccatctaggtttgtgtaaatatactttatgaggtttgaataacaaagaaattgcctggtgatgcatttctcagaacatgtttatgctattaattgatgtaggactgtatatagtcatcccgctgtatctgagacggttggttccaggacctccaaagatactaaaatgtgctgatgttcaagtccctgatatagaatggcatagtatttgcatataacctatgcacatcctcccgtataccttgttttttatttattgttattattattatcattattattatttttttttgagacggagtttcgctcttgttgcccaggctggagtgcaatggcaccatctcggctcaccacaacctccaccgcccgggttcaagagattctcctgcctcagcctcctgagtagctgggactacaggcatgcaccaccacacccggctaattttgtatttttagtagagatggggtttctccatgttggtcaggctggtctcgaactcccggcttcaggtgctccacccgcctcggcctcccaaagtgctggaattacaggcatgagccgccgcgtctggccagttgttatcatttctgagatagggccttgctctgtcaccttgacagagtggagtgcagtggcttaatcttggcagcttcaaactgctggcctcaagtgaatcctccagcctcagcctcctgagtagcgaggactataggcgcatgccaccatgcccagctaatttttgtattcttttgtagagacagggtcttgctatgttgctcatgctaatgggcaacatagcaagaccctgtctctacaaaaaaaatacaatactcctggcctcaagcaatcctcctgccttagcctytcaaagtgttgagattacaggcatgarcccctgtgcctctagattacttataatacctaatataatgttaatcatatataaatagtttttgcactatattgtctagggaataatgacaagtctacttgttcagtacagatgaaatttcttttttaaatatttttgatctgaggttggttgaatccatggatgtggaacctacaaatacagagggctgattgtatatattttattcaattataatgcttatttaaaatactctacatgtactctattatatacaatgcgtgtttcataatacataacaaacattttacagagttgatgcaatctatccaaatgcatccatacagagctgatgcagtatttaaataccatactgcacctgggaggtttaaggaatttttttactgtagggatatttttactatatctgattttagccttacatacttcccctaaacatctaatccccatgcaaaaaaaaaaaaatcaaaaaatgtatttaacagtgcttttctaactagtgcatatcaaaatcacctggaggtcttgttaaacctgatccctggcctaactcccagagattctgatttgtgggagggacttatgactttgcctctcaaacaagcccccaaggcatgctgaagctgctggtccttatactgcattccaactagtagtggtttaacaaacaccagatcatgtgatgttatttggaaatgtgataaacaaggaaacaacaaaacaccagatcggtgcttactggtgccacaaactattctaagtaccatataaatatcaactcctagtcctcacggccatcctatagtgtagagactcttaccatgctcattttacagatgaggaaacttgaagtacagagcagctaagcaacttgccctaggtcacttggctagtcagtagctgaggcaggacccatgcatagctggaacctgctgtgttcccactagaacccagagcgcatctctgtgactttggaggataggcatctgctgctccgcccaagcctggcatgacccctggaaaccactccctgagatgctgcgattgctcagctcctcagatgtcccaggcagtgatgtgacaggaaaggaacagcaggtgcagagtctcaagagggtctgccaggtataccagctgcttaaactaggaactgcaaactcagatgcctatggtggccagactctgagagattctagctagataccggaaaatatttttcgtaaagccaatcatctcagtctgttattccccccacccccgccctttatttttttaaagagatgggagtctcattaggttgtccagactggcctcaaacacctgacctcaagtgatgtgccttcctcagcctcttgagtaactgggattacaggcatgaaccaccatacccggctatttccccccgtgtgatagatgcatgaagcaagaaatcatttacttttrccttatctccactgtaagaagaagactatatgtcttatatatagaagaatatatgtcttatatagttaatacttggtttcctttttgaggagtagtaggagtgtagaggctaaagtagactggcctgtccataagaaatacccattactcaattccagccaatttttaccacaamaacaattgagctagaagttcaaatctagatttttatgtgttatctcttgatttttaagtattggtaactaattataaaaatgcatttgtaggctgggcgtggtggcttacgcctgtaattccagcactttgggaggctgaggcgggcagatcacctgaggtcagaagttggagaccagcttggccaacatggcaaaaccccatatctactaaaaatacaaatattagttgggggtggtggcgtgtgcctgtaattccagctactcgggaggctgaggcaggagaatcacttgaacctgggaggcggaggttgcagtgagccgagatygtgcccttgcactccagcctaggtgacagagtgagactctgtctcaaaaaaaaaaaaaatgcatttgtatacatacaaacatgcacagacacatgcacacatgcgtgmacacacacacacacacacacacacacacacwctttctctctctcgctgtcgctctccaactctgttgggctcagaaacagccagtcagtatctggcctcgttagttgggccgtcagtccactagtcccgtagtcccaagcattacacaggcagctgctgcgcaagggtaggcccactcttctctagaactttttgtttaaaaagcaaaaaacaaaacaaaaaagcatgagggatacaagaggctttgctgatttttctgtgggttcayaagtaagcttgccctttctgtgagtgtgcccatgtgacaggcaccaggaggcacttgggtggggtcaggggagcaaacagtagggtcactgcctctgggcagaagtttaygactggggactcacctcagctcactctgtccctcccccaggatgtccatgaggagccccatctctgcccagctggccctggatggcgttggcaccatggtgaactgcaccatcaagtcagaggagaagaaagagccttgccacgaggccccccagggctcagccactgccgctgaacctcagcctggagacccagcccgggcctcccaggatagtgctgacccccaagctccagcccaggggaatttcaggggctcctgggtcagtgtccccgccctgcctccatcctcacacccatgcgctgtacctgggctctctgctyggctgggcaggcccactcccctagatggcagcagatacaggcagaagtggtgatcctaggggtaagacgccatgtagggaagcagggaggcactgccaagttcagtctgaggctggaagcggggtcacctatcagagcaggacctagactcatgcctgtacttactcgcttgatagtgacagttcacctatgtgtgacccagtccttgcttctgaggactagatggggagatgggacacacatgctaaagtttggctttaaagtaatctaccagatttttcagatgatttgggaaaatcaacctgattacacaagcaagaattaggtcactgttaaagatgatacggttcttgacccttaaaaaaacaagagaattgagctgcatgattcataaggattcttgcagctcctaaaaattctgatttcacatatgagatgtaaaaaggtgatatataattaaaatccaaataagtgaaaatgaggagagttatgggctctaagaaagaatccagcctggaggaaggaggtggggggtgggggcactggtgatcaaggaaggcttcctggagaagtagagcctcaagctaggccttaaaggatggggaggactttgaygagaagaggagtgaggcaggcagtggggagtgtgagtaacttttgccagcccctacctgctcccctatgcagcccagctggtgtagtgggtatgttcaagggagtgataactaatagctgacttttggcccctgattgtaatggcaaatctcattcacatgcattaactcccttgatcccagcaacaatcctgtgacagaggaggtattaatatttccattttcaaaagagggaagtcaggttcagagcatttcagggacttgtgtgggatcaagcatcgtgtgagtcactgagcctggactgaaacccaggtcttttgttttgaaatcttctgttcttttcctaaacaaagcttgggcaggtggaggccaaagggacctagtgagtggagaagtaggacttggatagggctgggatccctcagggtacacatctttggggtgcccagccctccctgcagcctgtccccttctcttgggggttatggtgacaattcagtatgtcttgcaggactgtagctctccagagggtaatgggtccccagaacccaagagaccaggagtgtcggaggctgcctctggaagccaggagaagctggacttcaaccgaaatttgaaagaaggtaggatgtctgccctagttagaagcagaggcctgaggcagggaggtgttaagacggttattcctcacccctttgctgtcttccagtggtgccagccatagagaagctgttgtccagtgactggaaggagaggtttctaggaaggaactctatggaagccaaagatgtcaaaggtgaaggcctgttgggggtgggggagatgtttgaaccccatctctcttctcctggtctggccacgcagcctggctctgtagggcagttcttggtacatacctatcctgtgccatctggctcctgcctggccttaggggtcatcaccatccctcgcctggaggccccaagcattaggtctcactcatcccatgcaggagaggcctggtaggaatcaaatcccatgactctgaatctgggctctcaccaggcacccttgtgacttcaggcatgtcattgccacttcccgagtctaaccgcaaaatgagcagaaagttccctttcactctaattaattctaggtcagttggacctcactaagtgagtgaaaagtagttactaatgggctgctgcttgggttccttagagtgatttttttttttttttaagatacagtctccctgkgtcgcccaggctggagtgcagtggcacaatcttggctcactgcagcctcaacctcctgcatgatcctcctatctcagcctcctgagtagctgggaacacaggcacctgccaccaagccaggctaatttttatattttttttgtagagatgacgtcttactatgttgcccaggctggtctcgaacccctggrcctaaacagtcctcccaccttggcatctcaaattgctaggattgcaggcatgagccacccactgcacccagccagaatgatcatttttgcattgtcattgatcacacccacagagggaactttaaaaccgtacagatgcccaggctccacccccacctattgaatgggaaccccagggtatggtaggggcctgggcctctatacttctcaaaggatccatgagtgattccgatgttgtttttttttttttttttaaaaaaaaaaaaaaaaaaaaaggtctatggccaggcactcaggaataaactgctgcatcagacaggagctaaactggaggtcagggggacactaacatttattggttgaggaccatgtgccagatcctggactaagagctttgcatatattagcgcttcttctyctttttttttttttttttttttttttggagagagacagctcgctctgttgcccaggctggagcgtagtggtgtgatttcggctcactgcaaagttcacctcctgggttcaagcgattctcctgtctcagtctcccaagtagttgggattacaggtatgcgccaccatacccggctaatttttgcatttttgtagagatggggttttaccatgttgttcaggctggtctcgaactcctgacctcaagtgatccacctgtctcggcctcccaaagtgctgggattacaggcgtgagccaccacacctggcctctattagctcatttatccctcatagtaaccctctgaggtgattattattatgcccacttaccaagattttgaaaaccctaaagtgcagagaaattggtaacttgcctaacagctcacagacaggatgggttgaaatgggaatttgaccccagacctgtcttgcttcaaagcctgagtgtgtcccactggatccctccgatgggatggttgtccaccctgaccctgtgtggcgctgagcactcgaggacattgaagaggcctggggctctggggctgacatgtcccactgtcagcattttcagggggcctggaattcatggctaataggggagaacttctaggctagtagttgccaggtagcaacatgaagagcccccttcaaggcaagcatcttgtgtcatcatctctgtggctcagcccctaatggtcctgggacatagcaattgctcaataagtttctgatggatgggtggatagatggatggatgtatagatgaacaagtaaaaagtctcartggggtctgtttcactgtggagcagggacccaagagagcctagcagagaaggagctccagcttctggtcatgattcaccagctgtccaccctgcgggaccagctcctgacagcccactcggagcagaagaacatggctgccatgctgtttgagaagcagcagcagcagatggagcttgcccggcagcagcaggagcaggtaggtcctgttcggtgggtgtagctttctttccaggaaaaggagtgtgtcaggacctagagaaggctgccttagggacaggcctcaccagtgcaagctggggcctgggggcaggctgggcagggtctgtggccaggggctgtaggattcccacctggactgattcatgagcccttgtacagggttaggggtgggagggtatgaaagggactctgcaggaagagcagcttgcagcttcctgcccagcctcctggtcctggagggagggatgagcttcctgcaaaaggagaaccaattctgagggctgactgctttgctccctactgccaccccactccayggcttgccccactgtagaaagcagggtgtggttagggctgggcagactgggcaccagggctaatgtccgtgaccccctctgcctactctttccctctcccagattgcaaagcagcagcagcagctgattcagcagcagcataagatcaacctccttcagcagcagatccaggtaaccggaggggagacccggagaggcacaggaggcagttgagggagttgacaccggcctggagggtgctggggacaggggatgtgcaccaagttaaagagccagagcagaatcactcaggcctgacctgaggagggttatttctattctagcccccaacctgtcttccttccctgattaaagggaggagcccggcatgtcttcctccccagctgagacctgagggcaggtagacaggggcccacagagttggcctagggtcaaagggatcctttggaaaactgtccctgctttatcccctgtgcctcttgtccatgggtccattctctgtgccatgggctgaccatagctgggtagctctttgggtccytggggactcacacagggtttctttgccttcagcaggttaacatgccttatgtcatgatcccagccttccccscaagccaccaacctctgcctgtcacccctgactcccagctggccttacccattcagcccattccctgcaaaccaggtgagtgtgagaagggaggttccaccactgcggccagcctgtcctgaggtcagggaaagcgccctggagccactctcatccattaatttgctatgtggactttctgggcctcagttttggatctgtctggtagaagaatcatcctctttttctgaatcttgctgaatttctctgaacttcactgggagaatgaaaaaccataaagccctttccagatgtaaaatgatgtagcaatccaggtctagtctctccaactctagtacatttactgtgtcagagtattaatatctggaatattgccaggtgtggtggctcacgcatgtaatcccagcactttgggaggccgaagtgggtggatcacttgaggtcaggaattcgaggccagcctggccaacatggtgaaaccccatctttactaaaaatacaaaaattagctgggtgtggtggtgcatgcctgtagtcccagctactcagaagactgaggcaggagaatcgcttgaacctgggaggtggaggttgcagtgagctgagatcatgccactgcactccagcctaggtgacagagcgagactccatttcaaaaaaaaaaaaaaaatctggaatattaactgggttttacaaatctcccaaattcttttttgtttgtttgtgttttgtgttttgagacagagtcttacttgttctgtcacctgggctctggagtgcagtggtgtaatctcagctcactgctgcagcctccacctcccatgttcaagcgattctcctgcctcagcctcctgagtagctggaattgcaggtgcacaccaccatacctggctaatttttgtatttttagtagagacgaaatttcgccgcgttgcccaggctggtctcctgaccgcaagtgatcctcccgcctcagcctcccaaaatgctgggattacaggcgtgagccaacatctcccaaattctaacagccacgattcctaccttcacactcttgtccctgcctacaccatgtcactctggccttctaccccatcactgaaattcagcagaatggccatgtgtcagacaagggtgtgggacctgacggtacagggcagttggggagggagcatggagtctgggatttattttgtaggctgtggggtgcatgtgaacatttgagaagtgagtgtgtcgttctggctttgargggtggggagtggaggggagactggccagaagcaggacctgctaggtgattctagcagcaggggatgatacctgaactagggcagtgacagagagttatggggacagggcagagatgctgcccataattaccccaggagtgtggacagctttaaaggcaacacgtgctagatcatcctccctgttccacaggcgagaaagagagagagaagaggaaattccctgaggcctataggccatgggcttgggtagactgctcagccccactggctctctgctcctgcctggtttgtgccgggcactgtagggtggtgtgaaggggaaacacaaaggactgagaaagccaggccccatcttcatccattcaggggctgtagaaagacaccatggaccgtgtggctcataaacaacagatgttattcctcacatacagttctgggggctgtgaattccaagatcataaagccagcatatttggtgtctggtgagggctgactttctggttcacagatggcgtctctcactgtgtcctcaggtggtgaaaggggtaaacgggctccctcaggcctctaatctcattcctgagggctccaccctcatgacccaggcacctcccaaaggtcccacctcctaagtctatcacattgggaattagatttcaacataggaattggggtgggggaggcacattcagaccatagcattctgccccagactctccccagttcattttcttgtcatatgcaaaatatattcattccatcccaataggctcccaaatcttaacttgttccagcatcagttcaaaagtttcaagtccagagcctcatctaatctcacctaggccaggcacagtggtcatgtctgtgatcccagcactttgggaggctaaggcaggaggattgcttgaggccaggagttcaagaccagcctgggcaacaaagtgagaccctgtctctacaaaaaaaaaaaaaaagcctggcatggtggcctgtgcctgtggtcccagctacttgggaggctgaggcaggaggattgcgtgagcccaggaggacaaggctgtagtgagctgtgtctgtaccactgcacaccctcctgggagacaaagcgagacatacagagtgaggccctgtcgcaaaacagacaaaaataataataaatctcacctaaatcagttataggtaagactcaaggtataattcattctgaagcaaattccccttcagaactgaggaatgaatttctgaggtctgtaagctgtccagtttatggcactttgtttcaacagcctgagtagactaagacaggcccaatgtggaagtttccagttagctgggggaatggggagtggagaaggttgaaggtggaggacagggcaattccaaaccattgcaactccccatgagtgtggaggagagctgtggaggcaaggggacagtgatctggtcggggataggacccccaactgctttctgggcaggtaaggcagtaaataagctgtgggagcccgggactggcatggctgcctcccactttgtttgctccagaaattaagcaagcaaggtcccttgcaaaagctgactgtaaacagtggccctccccagctcacaagccttacatggtgctctgtacccacagcatgggctccgtactcctgacctcggccttcatgggccaatcgccaaccctgcccccatggcctgcctcattccccacagctcaccctcacacaccccaccactccatctctacttgcccaaatcctgcccatcctgcaggcactagcgcacacctcgggtcccacagggagcctgctctagttaccccagctggagcagagtttgctggtgctctgtctgtgtggccctcatcaccacctgccatgcacttcatgatttctacatgtggcctatctctccacctggatgctgggcctgggagtgaggtagggtaggcaggagtgccatgtcgagaagaaggaaaggctgtggagtctagaggccctgggttcaaatcctgatgctgccatttcatagctctgtggacaacccatttttcttcttatttttatttttttagttttgaaaattttaaattctttttttttttttttgaaacagagtctcgctctgtcccccaggttggagtgcagtggtgcaatctcgactcactgcaacctccgcctcctgggttcaagcgattctcctgcctcagcctcctgaatatctgggattacaggcgcgtgccaccgcacccggctaatttttgtatttttagtggagatggggtttcaccatgttggtcatgctggtcagggtggtctcgaactcctgaccttgtgatccacccaccttgtcctcccaaagtgctgggattacaggcgtaagccaccacgcctggcttcaattcttaataatagagatgggggtcttgctatgttgaccagattggtcttgaactcttggcctcaagcagtctttctgcctcagcctcccaaagtgctaggcatgagccaccacacccagccccatttgacttctaaggttttcatttctttttctgtaaaatgggatgatgatgtattcagccccwgttatatatcacataccatgtattattgtcagatgatacatatgagacgttctacacaacaggcagccgcttttgtgccctgtgcccagtaggtacaaaataaaagtagctgttggatgaataggtgttttaccctctctcattgtgccattggatgggactctagaatctgggaaactctatttagagtgggttgggaagggcgggaacccagtgaagatgccagtcagtgtgcaggggcagtgtggagtgaggggataggagcctccaagcagtgctttggggctgggkaggscagtggttggaaccaagctggtccagtgccgagccawtgcccatcttgtggtgctgggacctcgtcaagcarggtgtctgctgttctgtgctcatccaggacttttctccttgcygccttttccatagtggagtatccgctgcagctgctgcacagcccccctgccccagtggtgaagaggcctggggccatggccacccaccaccccctgcaggtaccgccctctacccactggcctggggctccctctcgagcttatgacggcyggctgccgtgttagggaactgcggggtgtggactggtgagccctggcatcctgtgttcttgttcacccgctccttctgcrtccacttttctgtctgtctccttgtgtgttctgggtatgstcacctcacttcctctctgtcctgctgtgggagtgtcctttggtgtctgtcatcctctgacctgctgggtctccctcaggagccctcccagcccctgaacctcacagccaagcccaaggcccccgagctgcccaacacctccagctccccaagcctgaagatgagcagctgtgtgccccgcccccccagccatggaggccccacgcgggacctgcagtccagccccccgagcctgcctctgggtaagcctcctgctgcctgcacttgtccctcagccctcttaggggagagccggcggcatgatgcgaccttgagcaggtcccttctcctccctgggttccagattttatcaaatgaggggttagacttgctcttagcagaagatccccttcttcctctccctcatcatatctgtctgggcattccaagcatcagggattcaggccagagtcacatagttccagggggtactgttgtcatttctagtctattgacatgcacaataactagccagtgtaagtggcatatccctgaggacatgcaatgcagccgccctgtggaagaacaggagggaacactaactcaggtgcctcatgggagtggcatggcgggaagctgatggagtttgggctcatgctgggctgatgccctcagcttctctcgcttctcttccctctcttctgccctctcccacaggcttccttggtgaaggggacgctgtcaccaaagccatccaggatgctcggcagctgctgcacagccacagtggggccttggatggctcccccaacacccccttccgtaaggtatggtcccccactcccttgagcctaggggcagcaayagatggtggccaggagtggaagacacagtctsaggccaccaagagaggagcatggggaggagtggggtgatgcagaggaggctgatgtcaggttgcccctgtcaacctaggacctcatcagcctggactcatccccagccaaggagcggctggaggacggctgtgtgcacccactggaggaagccatgctgagctgcgacatggatggtgagggctcaggcgcrgggctgatgcrcaggagggcccaactctgtattccaccagggccagggctgtgtctgcctctgatctcttccctcccttggtctgttgggtcctttccaggtgtgtgtgcctctgctgtcccattatgtgtctgtcggctctgtctctgagtctgctttcctaagttttgtgactgctgagtttctgctctctcttgaggccataccgctgtgattttcntgtgtgtctgtctctggttccctggctgggcctctgcggataatttgctgtttcttctgccccatctgctcctgccttgctcctcctcggctggctgctgtgggagcctcctcagtgcctcctgctggtcaagtaggggacgtctctctgctggccctggggcactctcctgaccccagacaggctgcttggctgacttcactcctgtctcscaggctcccgccacttccccgagtcccgaaacagcagccacatcaagaggcccatgaacgccttcatggtgtgggccaaggatgwgcggaggaagatcctgcaagccttcccagacatgcacaactccagcatcagcaagatccttggtaagggccagtggctggggccatggttcagtgtgacctggttgcaggagccagctgggtctattcagggcttgcttggtgatattccatacwgtgttggactccagtggaatctgacgacaggggtgcaggagttgctggggatgtgagggcagctgggtcctggggtcttatatcactgaagtgttcggtagcacctgtcctcaagaactcaaggagtgtgcstgtgtgtgtgtttacattctttagtactcctgatctaaacctaacctgttccactgtttgtccagacccttgctctggcagaaaacaggagaractagtgttcctgggctgtcactagaaagatttttttaaattatatgtcctgattggtggccacggagggatgttgggcagggcaratggagctcgaggggccagttgttttcaagactgaggctcctccagtgtcagcgcaggactctgtcaactgagacatcaggtattttgtcctgagcagggagcctgtctgggttgttgaaggtctgaggtggctgctcttttgtttatgcaawtcaggcaggccagaggctcaaggaagttgctggattgttaggaacatgggtgggtactgagtcttaagctggcagttggatatccctatacaggccaacttcattcatttgcccaatatccaaggagcacccgtatcgggccaggcccttgctaagtgcttgcacatatattatcttatggacccacctggggatcaaggtcttctcaggtcctgcatggggctgggggtggtcagcagagcccagcactgactgcctgcccctggggggttgggtcaggatctcgctggaagtccatgaccaaccaggagaagcagccctactatgaggaacaggcgcggctgagccggcagcacctggagaagtatcctgactrcaagtacaagccgcggcccaagcgcacctgcatcgtggagggcaagcggctgcgcgtgggagagtacaaggscctgatgaggacccggcgtcaggatgcccgccagagctacgtgatcccgtgagcaggcccccccgcaggcagccaggagactgtgtgtacatgtgtagctctcatgagtggctgggtgtcagtgtgtggcctgcctttgtgtgtgaccccaggggtgctgtgtgtatgcgtacgtgtgtgtgttatctgtgtatagctgagcctgcacgtgcgacccgactgtgtatggctatgtatgtgactgtggtgagcactcagtggctgaggatgtaggaatgtgactggaggactggccacgtggacctggagaaagtgcctgtagatcccacggccgataaactcaatagaaattcagaggtgctagaaatcaaagtattcatcacacagaaaggttcctgacttgactaaagcaagcaccctagtctattcctttaaacaggacatctcccagggcatttaaaatatmcaatttctgcctggtatagtgacacacgcctgtaatgccaacactttgggaggctgaggcaggaggatcccttgagctcaggagtttgagaccagcctgggcaacatagtgaaacctcatctttaaataaaattagccaggtgtggtggttcacacctgtagtcccagctactcaggaggctgaggcaggctcaggaggatcacttgagcctgggaggctgacgctgcagtcagctgtgattgtaccactgttctccagcatgggtgacagagcatgaccctgtctctaaatataagtaaacaaaacataaaatatacaagttctaaaaactggattcacacatgatcctccaagaatattatctgttgaacacatctatggccctaggtctgcaggtcatctgcagggtcgtaggtgccagtgaatttggccatcagaaagcaggctgggggcagggtatataagtcacagccaagagtgtgtggagtgggagtgcaygctctgaggaggcctggaggggagatgggtttggggttgaatcaagtgtgcatccatcacygttccccttctctgccccacagcycgcaggctggccaggtgcagatgagctcctcagatgtcctgtaccctcgggcagcaggcatgccgctggcacagccactggtggagcactatgtccctcgtagcctggaccccaacatgcctgtgatcgtcaacacctgcagcctcagagaggagggtgagggcacagatgacaggcactcggtggctgatggcgagatgtaccggtacagcgaggacgaggactcggagggygaagagaagagcgatggggagttggtggtgctcacagactgatcccggctgggtgggccyggccccttctcctctggggaagaccttgtcccaactcgatgggcacagccagccaacctaagactatgttggtacttggacttgttcgtgccccagagatgggcaaagctgtgcacttgcagatacattcatgaggggagaggcgccctcccttcctgaggagctgttggcctgggtgggcaggaactgcagtatggccatgggctgagcaggctgagcacctcagcctttagggcttatggccaggggacactgtatgactctcctctcctgcaggtgtctatccacctggrgtatggcatctaccgacctgtctccctggggtcacatgctttgtttccattcttgtcctggctggaccagccactgtgggaccaacacccctcccacactcccccagactgctmgtctatcaccaggatcgctttgtactttgtgcaaaagggtctggctgtcccttgctgttttcatctctgccaagcctattgtgcctctggctgctgtatgtgtgcgcgtgcacgtgtgtgtgtttcatctgttcattcactgcacaagatatttattgagtgcccactacgtgccaggcactgttgctgagttcctgtgggtgtgtctctcgatgccactcctgcttctctgggggcctctttctgtgcttctctttgtccccaaattgctacctctttgtcagtctgggtgtctcaggttctgtgtgtccttgtgtgcatttctgtctctctctgtcctcgtctctctgcaaggccctctatttctctctttcttggtgtctgtcctttgccccctgtgccctctggattctctgggtctatgtaggcccctggtctgccctgggctcatcagccttcctgacctcctcctgccctccccttcactccctccctggctctgccagtcggttcccacggagccatttttagctctgatcagcatgggaatgtgcctcggcctccaaggggctttgtcctggtgcccccgcccctggtcccaacctgatcccacgagggagttgggacaggaggattgatggkgctccccttcctgccagcgtcagaggccctggagaggggctgtccatggcagctggtctttattcctccctcatgagcacagggtcgggggggtccccattcttggaagaggttgagaagactcctgggcttcagcctctcccacccagccctgcccctcacctgcctgccctcccctcccccactctatactagggactggatctcagcctctgatcagtttcacaaagtttgttccctaaggaaatcaaatcccattgtcacctaactctgaagatctaaatagcccttggatcagtaygggaaccccaaatcccacagggccagatgtggagtctgtgtctgcccccgtcttctctccatcctcaaagcccccacttctctccaggctgtttctttttttatgactgtaaacatagatagtgctttattttgttaataataagataatgatgagtaacttaaccagcasatttctcctgtttacactcgggggatttttttgttttctgatgacataataaagacagatcrtttcagaatctggcccttgtgcaggggaggagggaggctggcctaagtccagaattcccaaatatgccaccagcctgggcaccactgtcccctggtggcagcctgcaggagcttcaggcctggggcctcagaggaattggcttaatgcaagggaatcccaggccaagcttgtgagtgacacatkycctccacagagcccacgctgaatgcccctaccttgacgaggtgaggccacccggatcctaagaaagaaggcagtagtaagagcactgtaataggagtcatgaagctcggggtctctctagaactggccacatggctggggttggggagtgggagccaggtctctcctttggggcctcattgtcctcatctgacaacaagattaaaccttatacctggttcttaccattcagagaagtagccctttgagactctaatgaaagctgtggatccttttcttagaaaagggcccacaaaggtttaccctgaagcccatctgaggcccctacgatgctaattaatgaagcagggtctctaatgataatgcttcagggctctctatccatgacacatgctttgagtgaacacttcagacctagttatcccattaggagaagtaataggcctgcaagggctggatgacagactgaaacacctcaaaaatgcatattaaccaggctctagagagacacatcttgtagtgaaaaattaatcccatcagtatagagtggggacagcaaaaccgaatggcagtagttcttgtggaagagttggacttgggctgcattaatagaggcttgtgttcacaacaggggaggtgatggtccagtgtaccccacacagacctagtcccaggggtagcgtgcccttcctcgccccctcactagggaagtctcacaatggaggggccctgaagcaggcaccccacatggaggagcacaggagggatcctggtgcacattgtccttagaggaatagtcagaagggtcaggtgtgtttcctctagaaaagaagacagagttggacagaaaggacaagattgctttctccaaaactgccaggtgggcaaagtgtagtattgcacaaagttcatgaggcagaacttgagctcctggatgaggttcaagactgtcttgacataaagaacaccttttccacaaaaaagagtgaacttcccaactcaagtcctcaagctcttgagtactggtggagggatttctagattggagagggtagtggtgagagagggtaggtgtggtggttgattctagggccacaaagttgggagggtgtggaatggagactgcccaagaattaagggcccagccatttggtatggggagcgtcctgaacgctggctggctgttttttccccagcccgggttctcagagcctcctctccttcgccctccccacgccacgtctggaaaagatgcaggcagaggtgggaggaggagctggcggcggcgcctgccccctggtggtcacgatggagagctgcccattgcacctcccactcccctcagccctctgccctccggccctccgctctccgccctcccctctccgcccgcccctctcggcccccggcctcctccactccactggtgggtccaaaccatgtcctgccagtctcaagactctcccagcctggctcattcccacctgtcggtcctgagttcctcttccctcccgcaagtcctcttgtcttgcctgccttattccctctgctgagacacagttgcgggtcctggagccccacccctgtctcatgagaggcaggatggggccaggtggttggagaggccaggagcagagtgctgtggtcattaccaggaaagctgggctacaagttcgtcccctccgtgcgtctccggcagagaccgaggggcagagcccgttgggaaggtgaatgtgcccaggagtcctttaactagagctctttgctaagagtcctggaaggggcccgagggggtggaacccggatcacactgggaggctcccaggcttggtgctcagccaggaggacaggagtgctggttagcctggggtggcagtgaaaggagccaaggtggaactcccagactttgaggaacagggttgtgttccctgccaccacaccggctcactcccctggaggactgggggaaggagaatgctttctcagaggcggcagtgggatgatgtctgctgttaattccttcccatacagatggtggtcaggaccttaggggcacaggacaatacccgggggggggggggggggctctgtcccagccattccctactcaccactgcaacacttatctccagcgcaacagcatcaagacccaggaggctggaaacaaagctggcttcacagtgttaattctgccctcaattccagaggtggctcagagaggaagaaggagcggggacactgctatttagtccagacaggtagtgtctatgatgaccacctgaccccacaggtgaccccagggggcccctacctgcccagccctggcaccatccctacgcctgggcacctctttcgctcgtgtccccccactgtcaccccccgaggctgctgcccatggagggcctggctatgctggatcaccatgaccttgaaagctccagctgcaggtgccagctccagtggttgccatggcaccagggtgctttttgcaggcaaaagccaaacaaccagagtccacctggcaggctgctgctgctgttgcctctgctgcccctaagggcactgggcacttactggcaggggggcagtcctggagcagctgctgcccagtgcacagcctgggaagtatagccggagtgactgggctgccaagaggggtgcccccttctcatctttgagtttctgctcttccttctggccttctgaaaaagtgacggattggttccagaaatcactcctgcctgttctcaggcagagcagccccttccccaccccactgacagctgggagccagacatgaccgaggaaggtgtcctgagcacttctatttagaatgtcactggttcatctcctgggtcaaccaaagtccttgtaatccacagcctagttccccctaagcagtgctttaccgggtttaactggtaggttctactaagagagtcaaaggcacagaagctgagtgagagaaatagggggccctgcccagagccttcggagctaggtgcacaggaggatgtgtgcaggcggctaccttgacttcagcatgaagcccaggtggaggggggatatcaggaggggttacagcacccctcagcccccacgcaggggtcagttcctcaccattgtcactcaagacacagcagtccggaaatgagcattttaatgcagaaagaaaaccatgataatttacaaatgaatcactttctgggccagagccaggaaggccccaggagctgtgagggtagaaagggaggtggaggctgttgagtgtccgggcaaccagtttagtcagcacctttctgatgggatcctgcccaggctctcccacgataggccctggggggccctggcccccaccccatcctcttggctccctctagtcattccagataggaagacctcgggtcagcttcaggacataaagtagagctggagagacatccctggaaggagggcctgagggccagggagggaacaaggcaggagactgctggttctggttttggccacctcacccttggccacgtcccctccggctaagccacagcacaaagcagagccaggctctggaggcccagggcctcaccactccctctcctgtccccccagcagggggacaaaacagaagcacaggagagcacgttggggagcatgtttcctcgggctgaggtttgattggatctggtttggagaaggtgagggatctcagaggaggtggctgctggggaagatgtcatgctcaattcttggcccccacccatcaccaagataggtacatccatgtgtcagagttggtgtgatgctggtttggagctcagcacctcccacatggggcatgcagggggagacggactggaggctcagggcactggaggtagaaaggagccctccccgcctccttccccaggccaggaaggggtaaacacacatataaggcagccccaattccagcagggcctgaggctgggaatgatgtgtttcccaggggtggttatggttcaggacctggctgcaggcacttcctcccaagcctggtggggtgaaggggacccccggaagggggtcctatcagcccctccagacaggagaatgaggtcttcagtggcaaccactggggtctggcggcagggacagagccttctccctggacacccatgtgtcccctctcccaccctgtccaagggtgtggatcccagagtgcagaattgagctctggagaacaggtctggccagacagatgggtaggggagggatggggtggctggtcactttggcatctccaaggctgacgcttgaggcttcaccttgaagtactggttgaatcggatcactgcgtacctgtggggaagacagaaggaagctgggtgtgaggaagaaagccaggtgggccctgctgggggtgctgacatcatgagaaaagtttttcagtggctctaggcctatctaagtctgagcagatcaaccccaacccagactgattagtattattatttcttttgcttctttttaaaatttttaatatttatttattttgagacagggtctggatctgtcacccaggctggagtgcaatggcatgatcttggctcactgcaacctctgcctcccgggctctgatgatcctcccactcagcctccagaatagctgggattataggtgcacgccaccacacctggctaatatttgtattttttgtagagacagggtttcaccatgttgcccaggctaatcttgaactcctgagctcaagcaatccgcctgccatggcctcccaaagtactgggattacaggcatgagccaccgtgcccagcctattttttttttaacttcaactacattttttttcttcttagatcagactagagaaacccttccacaaacatgcttgtttggagttttgtttttaccgttctatattgttaagtatattcacattgctgtgcaaatgaatatctacaactttttccttttggacaaccgaaactagacctattaagcaatactccccattgctccctctccccaccccctggcaacaattctacttggtttctatggatttgactactttagttatctcttaaagaaccatatttgtctttttgtgactggcttatttagcgtaatgtcctcaagattcatccacgttgtagcaagtgacatttccttcgtttttaaggccaatattctattgcatgtatagactatattttattcattcattcatctgttgacagacagctgggttgcttccatctcttggctactatgccaagaataatgttgccatgaacataggtatataaatatttctttgagagtttgctttcaattattttggctacccaccgagaaatgagattgttggatcatacggtagttacatttttattttttgaggaaccaccctactgttttccatagtagctcaccattttacattcctaccaatggtgcagaaaggttccaattcctgcatatccttaccaacaattattattttctgttttttaacagcagccatcctaatgggtgtgaagcgacatctcaccatgctttgcttttttttttaattaaattttatttttttatcatttcattttattttattttatttatttttttttttgagacggagtctcgctctgtcgcccaggctggagtgcagtggcgggatctcggctcactgcaagctccgcctcccgggttcacgccattctcctgcctcagcctcctgagtagctgggactacaggcgcccgccaccacgcccggctaattttttgtatttttagtagagacggggtttcaccgtgttagccaggatggtcttgatcttctgacctcgtgatccacccgcctcagcctcccaaagtgctgggattacaggcgtgagccaccgcgcccggcctcaccgtgctcttcatttgcatttctctaatagttgtgaacactttgaaaccagggtagtgattccctttcagctgaaggtgggtgaggaggagaagggcaaggccctggaccagaatggaaggagaaatgattcctggccttaggtacataggagcctcacaggacagggactccctgaatcatcgatacacaagcagcggctagctactgaaggagtagctggggctgtcgcccaaccagaaggcagcatggtaaacccttaaccactgcatggcttcagcaagtcacttctgctctctggacctctgtcctctctgctgtaa

SEQ ID NO: 96170 - DNA, 82752 bp, Homo sapiens
cagaaagagtaaaagagactgaaaagagagtaactttttaattttgtggtttagtattatcgttgcctatttggtactctacttaagttatcctataggtaggcagagtgcaaagtacactacctgggcagtttatggtgtcttagaaagttagaacctgaagggcacagtgagctcaacttccttcttgcatagatgagggaagtagggtcccaagggggaggtgaggacaaaataacttaaattttttagtgcagtaaaatacatataacatataatttcctattagtaacacataatacattcataatgttgtgcaaccatcaccattaccaagtcccagaacatttttatcactccaaaaataaattctgtacctattaagtcattcctcatttctccctttcccccgctgtggcaaccactcatttgctttctgtttttatagatttaatctggatatttcacataaatgggatcctacaacatgtaggcttttgtgtttggcttcttctttcaagatttgtttatgttgtggcatacatcagtacttctttctgttttatggctaaataatattccattgtatggatatacctcatttaaaaaacccctttatcagttgatggacatttgaattgtttctaccttttggctactatgaatacagatgctatgaacttttgtgtgtaagtttttgagtaacctgtttgcagttcctttggggatatacctaggagtggaattgctgggtcaaatgcttattctatgtttaactgattgaagaactgccaaaatgtttttttgtagtggatttgccattttacatccccatcagcagtgtgcaaggattctaatttctccacatcattgtcaagacttgttctcattaaaaaaaaattacacccaccgtagtgaggaggataaattaactttaatgcagcacaaactccctctctcatccatcatccctccacccccaaccagattgagctttccaaaatgcccacctggatcacatcacctgcaaaactggaaattttcctccctatttcttaggatgaagacaaaaatacacccaaaactctcaagatctgcctaccttcccagcctccttatgactctctctctctccttcaatcagtaccatccacactggcctttcagaaagcaccctccggcaaaagccactgcctgaattgtttcctctgactgcaatgctcccttcccaccccacctctaaagctcagctcaatccaggcataatggtgcacacctatagtagcagctacttgggaggctgaggcaggagaactgcttgagcccaggagttcaaggccagcctgggcaacatagtgggacccccatctctaaaacaataaaaataaaaaagctcagctcaagctccattccctcaggaaagtcacccctgaacatctcctccctccccacctccaactaggcctgggacttggtgatcagccctcagagcactgtgcatctctcctttgtaatacttactcttgtctgcaattatacatttattcacgccattaattgattatgtgggggagctccactttcccccgcttatgaggcagagagagacaatgagggcttggaagttgtttgaacctaaaacaattgtctcctctcctctccgtttggtccaatgcaggctcactctaatttctccttactctgcattccttaactgaaagaccaactgtttctccccacaagcttcatcaagcaagcagggttttttgctttcctttttttttggacagggtctggctctgtcagccaggctggaatgcagtggcacaatcatggctcactacagcccccaactcctgggctcaagcaattatctggactcagcctcccaagtagctgggactacaggtgcgcaccactatgccaggctaatttttaaattttttatagagacagagtctccctacattgcctaggctaatctcaaactcctggactcaagcaatcctcccaccttggcctcctgaagtgttaggattataggcgtgagccaccacacccagcctgcattctttttaaataaaaaaattacttataggacaataaaaagtgtgcacttcattgaaattaaatatgcctgcttttcagaagacactattaaagaaatgaaaagacaggagaaacgaaaagactgggagaaaatatttgcaaagcatatatacgttaaaagaattacacataatgtaaataaataacttacatctcaataagaagagcaaaattgccaataaaaatgagcaaaagatttaaacagacacatcaccaaagatgtacagcgggcaaataagcacataaaaagatgttcaacattattaggctttagggaaatacaaattaaagccacaagagagcactacaaaccaattagaatgactaaaaatgaaacagaataatatactaggtgttactaaggatgtggagcagccagaaatctcatgcattgtttggagaaacatgaaatagcacagcaactttggaaaacagtttggcagggttttttttgttttgttttgtttttaagatggagtctggctctgttgcccaggctggagtgcagtgacatgatctgggctcactgcaacttccacctcccaggttcaagtgattctcctgccccagcctcccaagtagctgggattacaggcacctgccaccatgcctggctaatttttttgtatttttagtagagacggggtttcaccatgttggccaggttggtctagaactcctgacgtcaggtgatccgcctgccttggcctcccaaagtgctgagattacaggcatgagccactgcacctggcagtttggcagcttttataaaattaaacatacacttaccatacaacccagcaatctgactcctaggtattcattcaagagaaaggaagacctgtatgcaaatgtttatggcatctttatttacaatctaatgtccataaactggtgaattaataaacaaattgtagtatatccatacactggaataccactcactgataaaaatgaatgaattactgacacatacaacaacatggatgaatctcaaaggcattattttaagtggaagaaagccagacatagaaggatacatagggtatgatttcatttataagacatttgggaaaggtaaaactataggggagattagtggttgtcagggctgatgaaggaagaggagtttaacagcacaggggcctgagagagatttttggggtgatgaaaatgttctgtattttgattgtggtgttggttatatgattgcatacatttgtcaaaacctatcatacacttaaaatcttacacttaaaatagtgaaattcattttatatagtgaattttattttatataaatcttacccccccaaaaaaactgacttaaaagacttacttgaaaatcaacaacaaacacaaataagttgatttaaaaaatgagcaaaggacttgaataaatgtttttccaaagaaaatatgtaaatgtccaataagcacatgaaaagatgctccacatcactaatgattagggaaatgcaaatcagaatctctgtgaggtatcatctcacacccattagagtgcttactataaaacaaacaccagagtgcggtggctcacgcctgtaatcccagcactttgggaggcctaggcgggtggatcacgaggtcaggagatcgagaccatcctggctaacacagtgaaaccccgtctctactaaaaaacaaaaaattagccaagcgtggtggtgggaacctgtagtcccagctactcgggaggctgaggcaggagaatgttgtgaacccaggaggcagaggttgcagtgagccgagatcacactactgcactccagcctgggcgacagagcgagactccatctcaaaaacaaacaaacaaacaaagaaacaaaaaaaccaaacaccagaaaaataacaaagttggtgaagaggtggtgaaaattggaacccctgtgcactgttggtgggaatgtaaaatgtgcagccactgtggaaaacagtattggagttcctcaaaaaaatccatttctaggcatatatccaaaagaattgaaagcagtgtctggaagagatatttatatgcccatcctcatagcagcattattcacaatagccaaaaggtagaaagcagcccaaatggccatcaatgtatggcctcaagtaatcctcctgttttagtctcctgagtagctaggaatataggtgcatatcaccaaacctggctaatttttaaaattttttttgtagagatggggtcttgctatgttgtccaggctggtctcaagttcctgggctcaagtgatcctcccattcagcctcctaaactgttgggattgcaggcatgcaccaccatgcccggccacagatgtaatttgaattttatctccctaactagttctgaaactctctaggaaagagactcaggtgtagacgtacctctatggcatgggtgagttcagtaaatctacttctgtagtgtcagttggactttctgtctcttggttgtctcctcctggagaggggaagggccagtgatacagagaatctcagcattgtaaaggactgtggtctcttaccacttttagagtctgacacctgctgagatgcatattagcttcctaaagctgctgtaacaaagcattacaaaatagtggcataaagcaacaaacatattgattctcttgcagttctggaggtcagaagtctacagtcagttttactgggctaaagtcaaggtgtcagcagtgggattctttcccgaggctcctggggagaagctgtttccttgacctttcaagctttcagagtctgcccacatcctttggctcacggcctcctttccccatcttcaaagtctcccatcttcaaagtcagcagtgtggcatcttaaaatgtccgtccctttgttctcctgcttctgttgtcacattgtcttctgtctgtttccttttgtgttcctcttataagaccccttgtgatatcaggcccaccaggataatccaggctaatccccccatctcacgatccttaacttgattagatctgcaaagtcccctttgccataacgggtaacattcacaggttccagggattaggatgtgaacatattttgggcggccggccgagggggggcattcttcagcctaccacaaagactacaaagtccacgaggagaagcgacacgtctgcttgatcactacttaccaccaatggcttgcacattgcctggcacttggtccatagaccatataaaattagtcagactcatgaaaagtgtgcaccccttttccagaaaaatattacattgtttatagcattttagagagctcccagattccctgaagccagcgcacggaccccaggttaaagcattcctaacctagaattctagaatatctgactgcatctatgaaggaataagggaagtgccgcagggccgcaccagctgaattgccaagcagcctcgtttctttgcactcctgtcgcttaggcgcgttggccagcgggtggcgcgcgggtccacctcaacgccgagcttgccccacgtcaagcacctgctcaggggaaaggggcgtggagcgggctcggtcactgcagtgtctaaagagctgcttcccagtctctgcacgtaaggaggaaggatgccccgctccaggcggcgaggaaaggccccaggaggcttcgtcttctttgctgcgctctgctggagacgccgcggcgccggcccgctgagcccgcaggagagacccgcgcacctgggcgcccccgccgcaggaggatcggagctcctggcaacggcagaaaacacagaaacccgaaggcaaatatttacgggcctgcagaggaagaaactgaaacctctacgcgtgatttaaaaggcatgataacaactgctgtttggtttctggaaccgggctcgtccagcttcttacaacaccgtcctttagcccgtaggcccggctcccccgccgctgggggcagggtgtggacgttaaccacctgggaagtgacgggtcgatgacaagcttactttctctggagccatcctgggttctagggacccttaaggcagagggcaggtagaagttacacctggaagcagcaccatcagagattgggaaagagaggaagctgcttttccaactcggtgtttagcaaagtggaccctgttaagacagtaggcgccgttgaggggggagtaaaacctagcccttacccggcaatgtaagctggatcacccatgcccctggaattacgatggggctaacgtctccaaaaacccatcgtaaagtggatagatcgtaaatcgagccctcctgagtcactgaccatctgtgcaatgcttctcaatatctggtccatggaccaactgtatcatttctttaaaacgcagattactgggtcttatttctatctgctaaatccgttagacggggctggaggtgactgtgagtcggtatttttaatcagctcactgagtgattcttctcctctctgagtttgagaatcacagctccagctcttggtactaaaagctgtcggttcaaataaaagagccagcctcagagcacacacctcttttccaagatgactctctctagtctcacaagtcagagggtgcaaattaggtcacgtgagtgtgaataatcaatattttctgtctaggttggatatactggcttacacctgtaatcccagtgctttgggaggccaaggcaggaggatcacttgaggccagtagtttgagatatgcctaggcaacatagtggggctctgtctctacaaattttaaagattagaagatcatggtggcatgcacctgtagtcccagctacttgggaggccgaggtgagaggatcccttgagccaggagttcgaggctgcagtgaactatgactgtgtcactgcataccagcctgggtgagcattgtctcttaaaagaaaatctgtctattagtcctcacctgtgaaactcaggccctcttaaaaaggctccctagatatttctgggggccctgtgggttcctttcttcccaccaccttcttaataactgctttcagcaagttgcattaaagagtagtcactgctgctgatgcttctggtgcttctgtgagctctccttctccttcagggctatgctatgtcccagccctcccaaagttgcaaagcctcaagggctagacggaactctcttcccttcaggtcccacagtgccttgttccaagcagaatgctcctcttcgcaatgcaggatcaggctttgtcaccaggtcccagaggcagcactgcttggcctctcagtgatccagagtcctttgaggaaagagtttcttccaagattatttccagtccttttccagaccctttggtgtgctggtaaatagctctacaaaaaagaaaagaaaaaggagccctgatgtgtagtgtttgtcaatttctgtggtgtacrtattcccatcagcatatttcaagctgttggtacaatgtcactgaacacaaagttgaacagagatgcttataaactgctctgagccggtacaagtcagctttagcatgctactacttggggcctggccagagaccagatattaagacatcattcattcattcaataagtatttaaggagtgcctgctgtgtgccagttattattccctgatacaggaatccagaagtaaccaaagtaattaaagtacttgctaaggtggatttcatattccaatggaggagataacccataaagaaataaataatagatcagttcattacatgtgataattaaaaggtaaaaccaggtaaagagctgcagagtgacagatgatctgttttagaatgggtaatcagggcctcttttagggggtcacttattgagtcctgaagggtgtgaaacctgtaaatatctggaatgagcacaggcagaggaaacagcaagagcaaaggccctaagaagggactgtccctggtgtgttcattaaggggacccatgtggctgaagtggagtgagggagggggtagtgtcrgaagaggaggtgggagagcaatcagagaggggcagaccattgcaaagtgtggattttattgtgatgggaaatcactggagggttccagcagaggcatagtctcatttacttttcttttcttttttttttttttgagatagagttttgctcttttgcctaggctggagtgatgtggcctgatcctcactgtaacctctgccccccaggttcaagcaattctcctgcctcagcctcccaagtagctgggattgtagacactcgccaccatgcctggctaattttttttttttttttgtatttttagtagggatggggtatcgccatgttggccaggttggcctcaaactcctgacctcaggtgatccacccacctcggcctctcaaagtgctaggattacaggcgtgagctaccacgtccggcctcatttacttttcaaagagatcattctggtagctggggaggagctgcaaattgacagttttctgaggtggaagcacagaggttagttaggaggcaactgyagttgttcaggctggagaagatgcagtggtggtggcagtggaggtggtgcaaaatagatggattctgggcagcttctgatgcttgatgtggggtttaagggtcagacagaagtcaagaatgctctaggattttttattttgtgcaatcaggggaacattggtccatttcctgagatgggggagcagccattgtgggaaagaaacaaaaggtcagtttggaacatgttaagtttgagatgcctatgaaaagcctgagctggtgacataatctgggagtcaccattgtggataaacttaaagtcatgggagtggaggaggtaaccagggagtgaagagaaaggcctaaggactgagtcctagaaacctcaacatttagagattgggaagaggagaagtttctccactgagaaggagtggtcagcgaggttggaagcagtatgaaagaagtgctcaaaaataaaaagcagtgtatcagtcacaccaaatgttgctgagaggtgcaggaaggtgaggccttggctctggcagcatcaaggcccttaatgaccttgacaagcagggttctcaaggagaagtaaggatgaaagccatcttcagtggatggcagcaagaacgcggggagggaaagtggagtcagggagtataaacgtggagtgctttaattaggggaaataccagagtagtttggtaactggaagccaacatgggtcaacagaggaagaaaaggagagatcagtgatgctagaaaaaaaaatcttgtctctctgcccccagagacccacctgcaaaattccacttcttgcagaatcctgtgacccatgcatgccattttatgcaaacagatgattgggaggacctgggagtcactaatgcagcagacacaatcaaacttcaaatcctaatttcggttcggctggcacccttgccacattcccacggctaagacggtgatgaagatcgttgttcatcactgtatcttaagygtgtctggctgagaagaggccccaatggcacgcggtgagcgggtgttgaaggaatacctgtctctgttaccttagtaatgagagtgagagaccgtggtgccagaacacatggggtttaaggcttgtaatggggtgaatcctaacagaaggcatctggtgctctctgacatctctctgcaggagttttccgggtggggatgggggatggtggagaggaaagccttgtccagggtattctcttggacagatcacagccctggactagctggcccttggggctttctgaagcagcagagggatctggttgggatagggaagtcctgctcactctgtcctgtggggaagccaccagcctctgcctttggaaccccttcatgagaaacctttgggctcatcctgggtcaggttgaaggggaaggaaggtggttactttcaaccctgaattctgcagcaggtgcgtcctcatcaatccctgcactacataagattttgaggagtggccttcagcaggattaactgaacrtcatccacatcagattgagtcagagccacgtcctgcatgtgtgtgcacgcacgttcagagcatcttagtaactgccttcggatagggactgatgaaacatttaggtagtgagtgactggataatattttgtgatattcattcatatttctgcccccacccatcctttccctggattcaatcaggtagcaggcttcgtgcctccctccttcaagtgaggtgttgsggagggagggaagcaggagaaacttgcaattttcctggcttttgttttctaaaagctagagaccagaaagaggatagaggtaggtgggagcttggaggagcaggaggatgagaggtgcttccttccaggtacaaaggaggattgtccaggctgggggtgcacagaacaaggttggttggctgcatgactcaaatcctggctctgccacctagaarccatgttatcttggactaattaccttgacttttctaagcctaaaaatgagacagtaataatgtctacctcattgatgtgttgttctaacattgtggttttagtcccagtgttctgggttgttgatattaagttttggaggtccccgagacacaaagttgcctacctaaattggatgggaaaaaagtcaaacaagaaagcacatctcttcctggctttatgccctctgactcctttgcaagtcaagaccagaagataccagacctcaaatatttcccatcatttcattagctctgtcaagacagaatggacttttctagggcacctgttaggtgtccagtcatttattattgttactttcatcaccattatggggattggctgggctcagctagttgattctcacttaggagttatttacatgtctgacagttgaggctgactgttggccgggaccttagccggtaggaacatctccatgtggcttgaactttctcatagaatgatggatgggttccaagggtgagcattccgagaaagaaagacaggtggaaacagaatcaccttatgtaactttggaagtcccacaggtcacttctgctgcattacatgcaaggcatgggtgattaggcttcacctcttaatgacaggagtgccaaagaatctgcagaaatattttaaaaccaccagacctttctaagtatgcatcactggggattacaggcgtgagtcaccgtgcccagccccaaattagcacttttaaaaaagtgacatctaggctgggtgcggtagctcacgtctgtaatcccagcactttgggaggccgaggcgggcggatcacaaggtcaggagatcgagaccatcctggctaacgtggtgaaaccccatctctactaaaaaatagaaaaaataagctgggcgtggtggtgggtgcctgtagtcccagctattcgggaggctgaggcaggagaatggtgtgaacctggaaggcggagcctgcagtgagccgagatcgcgtcactgcactccaggctgggtgacagagtgagattccatcttaaaacaagcaaacaaacaaaaagtgacatctaataatacaaaatgggaactattagagtacattttgtaaatatgggtaaccttcatgaaacttttgtttcttacgtgtctatccatcagaggttttcaattgggggctattttaccccccgggaggcatttggctggagacaattttgattgtcacagctgatggtgggagatgctgctagcatctagtaggtagaggtcagggatgctgctagacattcaacaatttgcaaaaagtgcccacccctgcccaacaagtaattctccaaatcaaaatttcaatagtgccgggattcagaaatcttgatctatgtctgtatctatatctgcatatctgtatttctctatgtatactgggtggtaatgtaaaatgtatttcatcctgtgggttgcagttggaaagtttgagagcccctggcctagaagtctcttcatgagtccagctcctggaccttgttttgcccccaacatttgctcattagccccagttagtatctgcccttgctcagatgatttggatttatgatttgttttcttctgkttttttttattgtgaggtctcccaaaatagtacttatctcaggagagttgaagcatctcataatctaccctcgagagagagtcctctaatacctcttacccctggttcagagaggtttgcgctttcctgatggctaattctaagtctccattttccccgtttcctcacactagataatgctaatcactaatactgttggctattagttgagcatttcctatatgcccagtacttctcaattccatgcattggctcatttatttctcatagcaactttgtgaagaagattctattattctgccagtcttaccaatcaggaaacggaggctgagagaggttaaatcacctgtctgggaccacatagctggcaagtagcagaaccaggatttcagtgcagttctttctgacctcaagcccaagtcctaatgaccaggctgtactactactcatctgagctatgttttgggcatcataatctggggttggaacacatctgtcacatagaaagatctagtaagagaaaacatttctcatttggggccaggcagtgtggagtcttgttcgggctctccctcacamtagctatgtgacctaagaaagaaatcttttagagtgtcattttcctcctctttcgggtggagattattgtacctgttcagcctgtcacatgaaaaccgtaatggggcaactctatggacatggaaactcttgggtcagttctgtgaccaccgatccagccacctttcacagatctcaccttgaaactccctgcttgaatcctcattgctggccagttgtcagggccccctaaccaccctcctagcctggagtccctccttccacctttctcttttgctgcccagtggaccccatgaaacacgactttccctcttctatggcaaatcttaggctctccacacacgatggtccgcttacattggtggggctccttctgctgccttgatctgcctctggcttcctttcccagccccatcttctcctcttcctcatcatgctttgtctcctctgctctccttcttgccctctctacttggccacatgttttttttttcttttgacggagtcttgctctgttgcccaggctggagtacagtggcacgatcttggctcactgcaactttcttctcccaggttcaagtgactctcctgcctcagcctccagagtagctgagtttacaggcaggtgccaccacgcctagctgatttttgtatttttagtagagatggggtttcaccatgttggccagtctggtctcgaactcctgacctccggtgatccgccctccacggcctccaaagtgttgggattacaggtgtgagccaccatgcccagccagccacatcttttagacccatctcagatgccacttcctccatgaagtctttctgattctgtgcaaatggacatgaacccttggattcccaaagccctttattggtatgcctacaatggtgcttaataacttccatctactgaacaagtaccatgtgccaggtactgtactaaacatgctacatcccaagtgtaactgatcttcatgacaaccttttaagataggtattattctcattttccagaataagaaaactgaccctctcagaggataggagacatgcccaagaagacacaactaataaatgggaaaatcaggattgtcacccagttctagctgattctatggttctaatacttaactcgtgtgttacacaaacgtctttctaccttgtatgtaaggtttttctaaattaatttttttttgtagagatagggtcttactgtgttgcccaggctggtctcaaagtactggcctcaagcaatcctcttgcctcggcctcccaaagtgctgagattacagttgtgagccactacgtctggccattttgaatgactgtacaagctcccctttcagaatgaaattttcatgagagcaaagacagggtttgctcaagtccttggctccaagctttgtgtaggtgtttaagaatagcttgtagaatgaatgaatgaaaaaacaaatgagtgmatgaagtactgtacgggtgtccgtgcttgattgggtttcaggtgctgtttggtgaggacatagcatgcttctgacagtagtggctgacacaatatttgagagcattcactaggttttagcgttttcctctgctcccaagcagttttgtaaatctcttgtgaagatgctgtttctctgaataaggccatgagcaagggccaaagctgtttgtcttactaatcccaaygaagttgtctccaaagatagcttatctgaggactgtgcaacgaggaggggagaacaaaagctggagtgacagatccacagagcttagctattgtctctggcttagtacagataatagacagagccctagagagggccagggacttaggggctgagccagaatcagacggcaggccttcagactccatccccacttaggagcacaagggagagcactaactatggaaacaccagggttgccaggcaatgagtcccagatgacattcatcagatgccacttcttacaggaagccctccctgaccagaactgctccatyaatttagaggtaggaccccctgccatgtgcttcccatagcactctattctgctattatagcattttcacagtcatggcagggtagtacacatttattcactcaagaatatttagtgaacacctgcaatgtgtcaggtactacatgaagtgctgagaatacacaacagtgagcaaaacagacaaatatccccactctcatggaatatacatttctagtgtgtgtgtggggaaacagacaatacacatataaataaatttaaaaaatatatgtcaggtggtgataagtactatggagaaaaattaagtgggaaagggcaatagggagtgctggacagtgttggcagtagggaagtcacttttaacctggacagtcagagaaatcggatgatcaccgagaaggtgacatttgagcaaagaggagaaggaggtgatggaggaagccacatggaaagaaggggctctaggcagaggggacaacaagtgcaaagtccctgagctgggagttgtgaggctccccctgctcctatcatttgaagagtagcaaactgggatggtaggaaagaagatcagagagggaataagggcaggtcatacctgtgtgccccctcctcaccccaacacccacacttcagtgaattagcttggacacttaacctctgactccagccaagtcggctggaagtcagccactcattgcccaagggaatggctgtcaacgggaagctaaagaaaaaagtgtcaaattcttggctcttaactttcaaaaggcaggtccaggtatatgctgggaaaaccgtggaaggatgctaattcttccaaatccaaccaatcttggggggcaacctccttgcaagagcctggagcacttcaccatcacccccatccctccaatgggagatggagcctgacactggggtctcacmaagtgaggactccagtgggccaccctctacctttgatgtacttgaagggattgcttgctgacctgctgcctctcacccaggctgagttccctgagcctgggtcttggtctccttccgtgttgtgttcacatgtctaacacggggcaagattcatcactcttgtatgttctctctggcttcttctatatattgaggaagccatatttgttgaaaagtttataacctgggttccatgtgtcctttgggagatttagcggggtgggaataataggtgaagtctgagcttgctatgttcatttttctttagcttttattacattcttaaaggaactgctgattcaggaaaagttgagaactgctggaatggaggatatacaaggtcccccatagttaataaaaatagtgtctactctgtgccaagctctttcatattttgtctcatttattattcatcccaaccttgtgaagtaggtgctaactgcatccccaatttacagacaaagtggttggcctcaagagggtaagtgcttgacttgggtaggagagctgggccttgaatccaggtgcatgctcagggccactgtcctggtcccctcctccatctcttctgacacaggatgtgctaatcctaacacatgtatgcttcccttacccattttggttttgtcacctggaatgttccataacttttattaaatgtttaaatgttatttttagtttggactgatgacctttttaagtaacgcgtcttcatgctgtaggacaatttttttttttttttttgagacagtgagataactcgttctgggagttatcttggctcactgcaatctctgattcccaggttcaggcgattacctgccttagcctcccgagtagctgggattacaggtgcatgccaccacgcctggctaattttcatatatttagtagagacagggtttcacatgtaggccaggctgttctccaactgctggcctcaaatgatccacccacctcaaatgatccacccagcctcccgaagtgctgggattacaggtgtgagccaccgcacccagccaacaaaattcttttactccgtgataaatttatgtctttcttcttcacggtggaccctaagtcctaaaacctggaatctgaccaaaaaaacctgaattgttttgtctctataaccagattttccaaatttcatacatccaagtaaataattgaagaatgactacctctgttaatagctactgttcatgggatgctcaccaagtgcctggcatggtgtcaactgttttagcctcatgatctcatttgatcccccaatgtccctatgaagtaattagtattattatctctattttatagttaaggaaatggaggtttagacccatgatgtaacttgcccaatgtcacacagctactaactggcagaggtggaatttgagtccaggtctggaaaattaactagtattccacttgccaagccactggcctcttgactggggttggcagatttattcctgtgcatgcttcagtggtgacaatgacccagcagtctgggtggctggagaggaaatagtagggctgctttgctgctagttgggagatcagaacagagaggacctgtctgcctgaggggctcttgatgaactctgggtcctcctagagcctggctacaaggaagtgacttggaaaggccagcaaaatgtagactctggctagggccagatctggaccctagcaccctctagggkatgtaagccactacttggccagtcttccttctggaaagaaacaggaggctgctaccgcctctctatgctgcctgggtgacctccaaacaccagtaatgaatgagatcatcagaactgagcagctcaggaaatgcctttggtgccttgtggcttcaaatatccaaggtccaaattataacttgcatctgcccagtgatttgcatttcggtgtttatactacaatgatctcgttgaatcctttgtgtgtcctggtgggctgtgakgatcatgtccatttgctagaccagaagaggcaagatgaactgcccaaggtcatgcagagccaagacttgaaccaaggccctactgactccaaattccatttgcttacactagaccagtgatttttaaacatcattctgtggaaccccagggtgattggggcaggccagagcaagtgtctcaggaagaggaggaggctgaggaggctctgtcttctctccactccactatgggctgatcttatatcagatttctgcgtaagatttgttagaagatttgtgatcctaacacaatgttttcagaacttccccaaatgatcccttgttctccgggaatggagttggggcttttcttttcctagggcccccttttctctattcaggcaagaagaggactgctctctgttggaggatgtacttaactacaggatggtagcagaggggaatgtaaaaggtactggacaaagcacaggggaatgtaaaaggtactggacaaagaggcagaagacctgggttctacagctttggtgtgacccagtcaaattatttacctcagtctccccatgtgtaaaattgagggagttggcctagaaaattactaaaatccagttcagagcatataaaccatggatagtgagatcttacacaagggtacggcatctaaaattgaatgaaaatgtaattttccttggtatgtgcgtttttatggaaacagtttatagccttcatcaaagtcttaagggggtttgttatacagaatctctggcttcctaggatttttttttttttttttgatggagtcttgctcttgtcacccaggctggagtgcaatggtgtgatttcggcccactgcaacctccgccccctgggttcaagcgattctcctgcctcagcctcccgaatagctgggattacaggtgcccaccatcacacccagctaattttttgtatttttagtagagacgaggtttcaccctgttggccaggctggtcttgaactcctgacctcaggtgatccacccgtctcggcctcccaaagtgctgggatacaggcgtgagccactgcacccagctggttttctttttctttttcattttttgacagaactgctgggcaatcttgtttctccttttggggatatcaagttgtaagaatgtcatgaggaaggcatttgcaataaggaaactagggtaatacacaaagataagcagaactaaaagatggaagctacaggaaggagtaagagactgtgagtaacttgacaatctcgtttgtgcccctggatccagccatacctgacacccctatacttttcaactacatcaatcactggctctttcccctttaagtattttctctctcaatcacctacagaatgaatgatcgatgtgctaatattattggaagaggttcttgccatttgcaaaattatgaagctcaacttagaaaagcaaagtagaaagaaaaaaagggatgggatgggggaagagcgttcctcctaggcttttctgcatctctgaagaaaaatgtttcagattttgctcagtgtcctttattctcttttcaaactaggggctttcagaggcagcaaagaccttagagtcaactccaccattacacagatggggaaccaagatccagagagggaagtaagtctctgctcttcatacaataaatcagtagtaggactgagactagaacccaagttatcgactccaaagaatgctccacctttctgtgtgaccttcctcagtgcttttttccaggcagggtcacaagtcagcagagcttgggagggttcttgtgaccctgtatgttgctgggccccaaggatccatatcttatccagaaacgtctgcagtttggatgtcttttcgagttctgtgggcacaggcaaacaatcagtggagtgctggcctgggratgcaaaggtgaggggaagggaaccagcccctctctctgcctgagcttcatcatctctcaggaaacaggcccatttaggggactggccggggaaccccagctggggttgggtctagggatcaggaccaagccagacattgctcagtgttggtcacagcaggaaggagccgcaggaggattcagattctgctaagggtcaaaagcaggcaagcaggattcattaggcaagtccagggcgtcacgttcagccacagggccagactggtgcagccctgtaggtcagtaaccgcaaaggcgtaaatgggacctaggggagccagcactaattgtcctcaagacgtggtgagagcggctcttctggggtggagactggagggcaggggaatggaragcgaaggaccctaagacctaggaccgggtcaaatccgaagcggaaggaagaggaaacgcaaggctctgcctgccgctcgtccacaaaccactcaaagccgaacaggagaaatgacctttaatgtcgactttgtttccaaccccaccaaagtgccatccttcagtgaagtacaaggaggggcttgagaggtacgaagtcacgacacacacaacgcccccggttgcctcctgggcgcacagtcgccgcgccctcacagggcggccccacgcacacacacaagcggaacacacgcacaccgcacagtcacactcacgtgcacccacggttaaatacaagtagagagggactcgtttatatatacacagagggagagagagaggtaaatcccggcggcgtcgggtcccccaggctctcagcatgctcggcccggctttccgcgtggtacctggcacccatgcccctgccagaaaagcagctgcccctctccccggccctccccccggttccccttggggcgcgcgtctacccggcgtggacgctcccctcccccctccgccccgccctcccctcccccccacgatgttttcctccccagggaaagaaagctgcgcacgggggccctaaaactgcccgggcgccaggggcatgttgcttttgaagcccggctgcccgttggccacgtcggccgcggcctcgcagcctcccgttgctggcgccgccgtcggtcccggggctctcgggctcggtcaggagcttgaaggtgaagagcgggcccgagtcgtggcggccgcggcggccggggggctcaggcgcgggcaggctcaggagggcgccgggcgccttccactcggggaaggcgcacagctcgactggcggtggcgcgccgcggcccaggtagcccgggctcggcgaggccgagggcagggtccgctggctgccgctcaggcagctgccgctgtcgtccagcgagtccttgcgcgactgcgagcgctccagcgagccgccgcgcgtccacggccggtaggtgtaggcgcagccgcccaggcgacggcggcggcggcgtcggcggcggccgcggccgcggcactggcacccgaggatgcgcacgaaagcgcgcttgaactccttgctggagcatgggtagatgatggggttgaggcagctgttgaagtagcccagccagaacaccaccttgaacacggcgtcggggggcttcagggtggagaacaaggagcctgcagtggggaggggggtgggcacgggcagaaagacagcaatttgtgagtagtcaagctctcgccccaatatgcttctcctcaacattgtcaacctgcagcgttcctgccgccaggcctttccccgagccggttcctctgcccggaatacttccctttgcatttcaaaatcaatgaatcctacattcatttttagggccagcctcaataacttcgcctttgtccatgaaacctttcttgatctagttaaacagcatctaagctcctatagtttcctctggcagcacttgccaccttcaatctaagtgataacaataatcgcccacaattgcacatctcttttgggtcaggcactgtgctaggtgctttcccgatattagtttatccttcacaaaacgtcatgaagtagatgccgacttgtttccgtggaaaacagaaggtgtattaaagacctaaatgtgaaaggtaacgttttaaaggtaaaagagaacaacataaaagactatttttttgatctaggggtgaagaaaaacaatacttcaaaaggacgaatcatgaggcaagaatctgagaagatatttacaatgaccaaaacagtcaagggattgatatttagaatatgtgaggaactcttacaaatcagcaagaaaaagtgttcccagtagaaacatgggcaatggaaagtagcaggaaatttacaaaataggaaacgcaagggctaatgaacatatgaaaagataatcaaaatattaggcaatcaaataaaaaccgcaaagaggctgagtgcagtggctcatgcctgtaatcccagcactttgggagaccaaggcaggaggatcacttgagcccaagggattgagaccagccggggcagtacagggggaccccatctctacaaaagaaagcattaaccaggcgtgttggtgcgtgcctgtagtcctagctacttgggaggttgaggcaggaggatcccttgagcccaagagttcaaggctgcagtgaactatgatcgtggcactgcactccagcctgggtgtcagagcaagtccctgtctctccaaaaacaacaacgaaaacgaaaaccacaaagggacatacctgataggctggcaaaaattaggaagctgcatagttccaagttcacacaggggtgtggggtgtggggacacgaggagctttgttcatggctggtgggggcacaggctgtacacacatcctggagatgactctgctagcacttggtctaagtatacatacaccttgtgacccagccattttgctccaggacacagatctcaatgaattttcacacaagtccataagggttcatatatgagggggctcatggcaatattgtttgtagtgacaggaggtgggagacaacctggatgtccctccctgggaaaagtagaatggggtagatgcattcttagatattatgcagcatttagaggcccagggtgacatgtctgcatgaccacgtggaaagatctgaaatacatggttctttgtgaaaaaagtaggaaatagaatgagatttatgacataataccatttaagtagctcaccaaacaaccacatgcattttggaaaaacacattcaaattaacaaaaacatgttaaagacagaatgcctaggggtggaggcagagggaaatgggaatgggaataaaaggaaataaatcaatataataagagagaggcctggcatagactcatgatgatgagacattatgaataagaaacatgattaactcacccctctgaatgtgagatcccaaaacattttatggcaatattaaattaaaaacaatttccattttaaatataagtcagctgaaacttggagaggttaaatgacttgccccaggtcacacagcatgcttgtaatatatctgggatttagactaaattctatttgaataaaaatgtgttttttttttwaaaaaatgcaattaataatactctgtgtaaagatgagaaaatataaaaatgcaaaaagagaaactattttaaaagcacatataaaactctgcagtgccaaaataccatattttggtgtgtatactttcagatttttcctcttgtatatacaaatttaaatatcttaaaaaatggaatactttctagaacattttgtatcttctaaccatgtctctgtccctgccacttggcttgtggcatattttgtattcctgacttctcagactgagcttcccaagggcctggtctttgggatcatcactgaatctatttgtgaaaagaagagccaacactcttagagcatatctgaatgggagggatcttagcaactgccaagtccaactagtttgcaggtggagacaccaagacctagagagtagctggaaatctctgaggtggttggcacagatgccacaaggattcccatctttgattttggattgctcttgaatttcttctctgtagcatttcactttcttgattatttgagatttggcctgtttcaaacctcaaataatcaagaagaagaaatacaggagcctgactcctaattctctgcccagtaactcagtagtggctgctggggggcaatggctgggctcctggtgcaggagtaagtcagccaggagttcaacttagaaagagggttatccatacctggatgtaagtgccaagtgtaagtactgacctctttttaggttgggggaaatgaggcagtgggctactttctaggtttggtcgaggtgagacaagggagggcactattttgtgacccgatttgtgacaagactcacaccattagatttgggtctcaccattggagctactcttttggattaagactctgtacagaaggccccagctgaaatgcaactatggtgtatgagcacctagtattccctgatgtggggagttgtctctgttcacagggatgggcttatttctgtcactgagtctgaagaacataggaaactggccttgacaaaatgggaaactggagaataaattttggagagggccagacatggtggttcaagtctgtaatcccagcgttttgggatgccaaggcaggaggataacttgagaccaggattttgagaccagccggggcaacatagtgagattcctgtctctacaaaaaagaaaatttggggaagaagtagagtgagggaggtaaagtttcgaagccttgtgcattacacagggatgagtgtgtatacaggcagcacattactttgcatgaggacacacagggcccaggatggaggctggagccatggcccgaggtgggatcctgtaatcccagcactttggaaggcgaaggtgggcagatcgcttgagaccaggagttcgagaccatcctggccaacatggcaaaaccatggacaggatctagagcaggaaagcatgtttgttgaggaaaaaattataactttgtttggtgccaaccccattgaaggtggttgtgaaataggcgataaatggattaatggggatgcaacctgagaaactggctcttttaaaggttacaaaaatatcaataatgctaatagctaagattcatcatagccagcatttatcttgtgtgtgtgctctgcaggtcctgtgctaactcttcacaccactagcttatttaataattataatcggaaggtaccagtgaggaaggtactattgttggtcccatttttttggatcaagagaccagtatatgatagtcatagttatttaacttgctatatgtccattcatttgttcgttcattcatccgttccacaaacactaagctcctgctaagtgctaggcatgaggacaagctgtgggaatgcagagatgagtttggggtgtggtgttgcaccatggcagctaagaggccattcaacagaacacatgtagcattaggaagggggcataaattttactttccccctatgtctgcgcggcatacgttttttggttgttcttcacgttcatcacactggaagcaccatgtcagggacaatgatgggctagatttttgcctctgttttcttacaatgtaccctccaaggaccatggccttgagaagtgttcagccaaaggtgagggggtgatgccaacttttctcatgggcatttactgccacattttgggtttgggctcattacactgtttattcctctgagaagaagaagccaagggccattctttgcccttggctgattaggcagtgtggtcaagtggctggaacccagaacttgggatgacacagacccgtattgaaacctctcttgagttattggctgttcagctttagaagagttaattagccatctcagcctcaattttcccatctgtaaaatggggacaatatctatgtcatagagttactgtgaacacatgaaaatatccatgtaaaatacttgacacagagtctgacatcttgaaaataataaatagtgaccattttctaaatatactttatatcctgacccattctcttccaggaactcagctctgattagccccactcaactcagatggacttatttattctgtaccccatagaattcatacaagcagatcatattttgttattttattgtttgctttttcatgttaagccatcccaggtctggctgaatcctagttcatcacccagattgtaaattccttctggaaaggagctatatcttcatttcttttcttttcccctccagatttgtatattttttttatttcaaaagtaatacatgctgaatttaaaaaatacgtattacaaaaaatctgttaagtctagagtgaaaatactccacttaagcagaagggatcagagttaacagttttatttggaatccttccagatttaaaaaaatggggtcatactgcacatacctttccccaaattgctctctttgcttacagtatgtaaaagatatttccttgtcaaagtacgtggtgctatttcacttctctccccaccccacaagggctgcattacatcctactgtctggatagatggtagttttatttaatgccttctctataggtgatttccaatttttggctattacggactgcagtgatgaaaagccacatgcattcactttttcatgcacatttgggtgtttctgtgcaataaattcacatgaggaatcactgggtcatttccacatttaagccctgacagccaaattgccttttgaactggttgtactaatttacccacctatcaactgtgcctgaatctgacattttccctacaactccccacctctgggctctttcagcctttttaatcctcacttgtttggtaggtgaacactgatcttgccctcttgttccatttgcatttcattttattttgtcctcctttgcaccctgaacaagtcctcagtgacttctgacagggagtccccttttttattggaatgggactccctggaatagaatcctggctctggccatgtgaccttgggccagtttcatactgtccctaagccttagttcctcatcagtaagatgggctaataatagtactgacctctctgattgttgtgaggattaagcaaggtaaaaacatgtagagtccttatgagcactctggatcccaggtgtctgtcactcagtcaactctgcatgaatagtaattaactaaataataattattgtccctgtaaatccctgattgggctggaaatctaattttaggaaacatatttggggtctattttactacatgtatcattttgggtgaactgctttccagttttgtgcctgttttctttctttaattgagtggtgtgagctgggtctttttcagccttaaaattcagagttctggctgggtatggtggctcacacctgtaatccagcactttgggaggccaaggagggcggattacctgaggtcaggagtttgagaccagcctcgccaacatggtaaaaccctgtctttactaaacatacacaaattagccaaaatgctcgcttgaacccaggaggtggaagttgcagtgagctgagatcgctccattgctctacagcctggtctgtgtcaaaaaaawaaawaaataaataaataaattcagatccctcatgaagtcagagaccaaagccttgcccatccctgctggggcgtgcctgcttccctagactttcaccacagcggggcagtgtgggtcagggactggaccgccaggctgccacagatgccacaaatttttcgrccccctccttcctccttcttcctctgccagcacagtagctgctgggattaggggggtcccgtttgctgcactggcctgccttggtggaaaccaagaagctgtcgttaagtaacaagatgctaagcctgttaggcatgtaagaggatgtgtgrcagggatcgtttcccctgggcagccaaacagacctgtcactggagaagagtgtggtgggtgaagctgctgggtgaggggagtaaatacaacaggaagtgtgggttyctggaaggcctggacactctgtgctggaagtcagggctgcgctgggctctttaacaatgccactaaccccctgtgcatgttcccgagcctggccctgagcctgcctccgcttcccttgctcatggaatgttcctgatgctccttgccctgcctcttggaatcatggctcgccaggcctgggaagcctccttccttaatggagggccagtgagggtgaggggagtgactcactcaaggtcactcaactggtgaatggcagagtggccaccacgacctgttcaagttgccattcatttgcttcagcaaatatttattgaggcagtggagtttagtggttaaggacctgctcagacatcacaggtaggtagatctgggttcaaaccctagccctggcattctcagctgggcgaccttggagaagatccttaagtttggtgaggcttggtttcctggaaaattgggagggtaataattattttctgtacggatgaggtgagctcaggcttggtaagtacctggcacattgaaagcactcaataagtatagctatgatgactgctttgagcgctgctactgttacaactgccagcaccgctgttaccaccagtaccactgctaccaagatgaagaaggtggtgaagaggatgaggtctatgtgctgtgtgggcattgagacttaccctactgctctttccaataccagctgaattatggtctccacgtggttcctgaacctgctaaaattgtgggcaacattcctatattttcttggttagggtccatagctgtygtcatggtctcaargggatcagtaaccctcaaagggttgagactcccccatcccaggtctaaagcttgctaagcattcatcattctgccacctggaccaccatttacttagcgcttttctttgcgtcaattagtttttggtatctcaattcttttgaaggaagctttctatcactattttaaaacttgcatcatttactataaataaaacatcatggtggagaaaataagatgaaaacaaaacaatgtttgtacctcctggatagctccagactgtggtgtgaatgaggcctgctccctctttctcgaaaagggagattagcagtggttgagaggtgctgaagacattttggccctaaactgmgaggcactgctctctgaggaacctaaaggattgaaagagaagtgaacagggaaccactttgtctctggagagcccaggccctggcacacgtagtaggtgctgaaatagatatttgctcagtgatggactgactgaatatgtgactcacggtttcttgtgctatctctagatgtcatttcaatcttgcacaccacccaaatccatagtgaatttctcctgctatgtaggtgcagccctgggaaaccacatgtgggaarcatttctattattttattcttttttttccggggtggggtggtgaggggaggagggataaatcgaggaacagatgttgccgtgagcccacccacatcacttagtctttgagtgcccaagggcgatttagagggactgagaagtgcaaggrtcaaaggctcacattgagcaggatatacacagggaaaaacatttcttggctggacatggccccagcaggtcatccttaagctgacattcaacaaatctgaacagtgaacaatgaacagtggaggtctcaacactccgtgaacctgagggccactcatcaaaacctcagggcatgtctgtagaatagcagctaccatttaacaagctctgactctgtgccaggcgatgggctaagtgcttaaccactgttgggccagttactccttcaacagccactgttcccaaggcagtccatcatgactgtgctctagaaggcaccattcatactgtcctttacaacaattcttgatgactgtgtccaacctgcatggctggcctggggggccatgattcttacacacaggggaacagaaactcaaatttgatataggtaagttgcccgaggccacagagctagtaggtaatagagttagaatttaaatataggcagctgtgacagaggctcttaatcaccacaatgcagctcacaggaaaacaaaatatacatacttatgtgtgtggatatatatatatatatatatactttttttgtttattcactgtcaagtctcaacataatgctcatgtatagaaaggtctgggagggtgtgtactggaatgtcaactgtgcttatctttgagtgtggggaaattatgggtgaattttccttctctgtgctttttggtgttttccaaaatgttctccatgaacacaaattccttctgtaactggggaaaatccaatgaatgttatctaaaagctaaaaggccaggtgcaatggctcatggctataatcctaggactttggaaggctgaagcaggaggatcgcacgagtccaggagtttgagaacaacctgggcaacatagacgttgtttcaaaaaaaaaaaaaaaaagaaaagaaaagaaaaagaaagaaagaaagaaaagaaaaaraaataaaagctaaaaaccaaacaagccaaaaagtaaaaaaaaaaaaaaaaaaaaaaaatagccaggtgtggtggcccccacacctgtggaccagctactcgggaggctgaggtgggaggattgcttgagctcaggaggttgaggctgaagtgagctatgatcgcatcactgcattccaggctgggcaatagagcgagaccttgtctcaaaaaaaaaaaaaaaaaaagctgaaaaacaagccaaaagatgctgtgcgtattgggtccttgttatgtgccgccaacttttttagctcctgtttcatttaatcctgacaacagctccctgagcrgggtgggattatccctattttacagatgaagaaatgggtagacggcagcaccagtgcgaggtccctcacaggtgagagacaggtttaaaatgaaatgagatgatttgagagatttgaaatgaaaatgaaacctgatgatttgagaggtttgaaatgaaatcagacggatggcagcaccactcagacagatggcagcaccagtctgaggtccctgagaaagacagtttttaaatgaaatcttttgttattaagcccccagcagccccctcgttagttcctgatgtgcctgtggtcccctgtccctatctccttactgtggggcataaatggaggaatctttttattctttacatattcttttttctttgagacagggtctcactctgttgcccaggctggagcacagtggtgcaatctcggctcactgcaacttctacctcccaggttcaagtgattctcctgcttcagcttcccgagtagctgggactatagtgcatgtcatcacgcatggctaatttytgtattttttgatagagacaggatttcatcatgttgaccagactggtcttgaactcctaacctcgcctcggcctcccaaagcgctgactttacatattcttaaatccattggccttcactcaatattggctgaagaaatgaggcaatgagcaggctcagagactgcagtgtggcgtggggacctaaagcatcatttatctggtctacaaaatgccagccatgggctgggtggtttctaacatccctctgggccctgacattctgggactctgggattataaatttgatttgatttatttcacagtcagtgtcaaacaagccaatgacctcaggggagtcagtgggtggagaaactgttttgatcctcttgtaaatggagtggaactcctttgcagtgtggctcttattaggggcatttggctacaccgtcaggcaaaccacatctcctcagctgaaacaatttggtccagtaaaaactggaaaaatttacaataatatgctgcttctgtcagcaccagctttgtaaaagaaggtttccttggatttggaaattcccttcaaggtttttccatttttatttgccacttaaccctggaatgagatcataaacttgtccagtgaatacaatatctttgggccaatagagccatgttaagttttaaaacaaatgctgaaaacaataataaccacagccaccttttgcaacaactccattccaaaaccagttattaaggtaccacatttacaaacattctctattgtaattctccaacagccctgctactatgtatttcattttgcagaggaggaaattaaggcttaagaggttaacaaggtcacatgcctagtatgtggtggactctaattaaaatccaattttgaagtgtgggtttttactcgtttaataataaggaaaaggagcatttattcatttccttaaacactagggaatttctcccttaactgggaatgctgaattgtcaaagcactttttctgaaactaaaatgtggcatttgtccctttgaaccttggattacaattgcttaggtctatattctcatctcctctgattagactgtgaatgactagaaaagagggttcatgtctgactcttctctctgtgcccaaggcctacctagcacagtgcctgacacgtgaaaggcactcagccagcaggtgttgcatgaataatagtgataaaaataataaaaccaaaatgcattagcctctggctatgcaaaatgaggttcatggataagcagcacctgagtgctggttagaaatgcagaatctctgatccagtgcatcagaatctgctttttttttttttttttttaagagctggggtctttctgtattgcccaggctggatctgaacttgctatgttgcccaggccagactggccttgattgctgggttcaagtgatcctcctgcttcagcctcctgagtagttggaactacaggcaggtgtccccatgttcagttcaaaatctactttttaacaagatcctgaggtgagaagtattgccttagcccgcattacaattttacttttaagaactatttttgtgtgtatcttgggattcatgggtgagcacaggctgggctgagagccacctcactatggggttgacccccttggccccaatcctccagtgactcctctagtttgtaggataaagttcaaactgcttaggttagaatataagacctattcaacgtggctgcaatggactgattctctgcaagagcattgacttttctggcccctttccctttattcacgctgtccacactggtctgagatacccttttctctccatcctttccaggcctggctcaaattctttcttctcataaccactttcctctgaagtgtgaaagcagaaggcaggaatgaacagcctgagaagacccgctaagatccagatgacttacacacccgacctattaatgttttcatcttcacaataggcaygagggtgcctcgtgtaacgccttgggttccgtaactcccaatttacaaatgtggaaatggaagctgtgagtgtatggaactcacccaatatgacacagatattaagtggtagagttatgatcgaaacgctaatcttcctggcctcaaattagtttccataatacgcaatattatttctaaactctgagaatacttctggggtggggaaggccagaactaggtacttaggtttttttgtaatggtttttttttttttacatttttaaaatttttattacaattaatattattttgcttctacaaatgacaactcctagaagtaatgatatcttcacatatattttatctggctattaaaatgcaagtatctagaagccaggaattttgtgtcacttttaacttgacaatactggttaagcagataattcagtgccatgtaatttcaggggctcacagccctgctgaatctcatccacggatgtccaggaagtacacagtccccagattaaaagtctctgctcttctctctacagatttccatcataacagttgaacttatttaagggtttgtctttcttgttcatgagctccttaaggctagggtcaatcttatttgtcttggtttctctagcacccaacacagagcctgttacagtgaatgtgtaaaaatacttgttgagcacataacgtccttttcatgtgcctaactcagtatcgggttcataataggtgctgaataaatggttgttgcctgtatttgattcctttcccttctttacttacctaaatgacattcatgtgccaacacccagctcggttttcatctcctcccaaaacccttcctgactgctccagacttcttcttttttatttaccatcaaagagagtccatagtacacgggttaatataaaatgccattgttagggggtgtgcctcttaactctttgggaactgtaaaagctccttaaagatgaggtctgtgtcttgcccttctagcacaggcctgggcatgcagtcagtgcccattgattaccactgattaactgattgacccattccaacttccagtaggggagctaccttttggcttaagcccagagttgaaagcagatgggatgaaatggtttctgcagcactaagcttccatctttgatgccagactgaatttgttccatgctttgacctcattggaaatagtaatttccctgcagaacacttttagaaactgagcattggtgggacttaccatgaagaagctataaaactttataaagggtcataaaagaagacatctataagtgaagatacatagattgcttttgtataggaagtctctatccaagataacttcacttttccccaaattaatctgaaaattcaaaacagtctaattaaaatcccaacaggtttttgttgttgttgtttttgttgtgtggagagctaaataatccaaaaccaaatttatggaagaatatggaatttggaagaataaccatgagaaaaatatccagatcaatggaaataaagaggaatggtaagagtgggtatgaggaaaatgggtaaactcagctctgtaaatattaaaacctgtcatagaatcatagtaattaaaaaaaatcctagggcaggaagtgcagaaaaaggcagaagaaagatcaatgaaattatgtagtttataaagagaaccaaatatccatgagaattttacatgccatttcaatgcttgtgggaaaaaacagactgtaagtggtgggaaaaaacagactgtaagttggggcaacaggatagctatttaagaaagaaataaggctggatctttactttatttcttacattaaaataaacttagacagatccaatatcttaaatatagaaaaattgttaaagtattagaagaggatataggtacatatttttataagtataaaataagaaagaccattttaagcacagctaaaagtccaggatctgtaaataaatgtattgatgaatttgtctagacatttttataaggctgcaaatttcaaaaacaaaagaagaattgggagaaatatgtgtaattcaaatgacagtaaaagaatgatatttcttttcttttcttttttcttttctttttttttttttttttttttttgagatggggttttgctcttgttgcccaggctggggtgcaatggtgtgatcttggctcactgcaaccttcacctcccgggttcaagtgattctctggccttaagttgctgggaatccaggcacctgccaccatgcccagctaattttttgtatttgtagtagagacgaggtttcatcatgttgaccaggcttgtctcgaactcctcacctcaggtgatccacctgcactggcctcccaaagtgctgggattataggcatgatcctggccaaggaatgatatttctaacacacaaagctctctttcaaataaataagagaaaactcaatagaaaactaaatcatatgaataaacaaataagaagagtaagtataattgacacccaatgaattaatgaaaaatataatttttttttttttttttttgagacagagtctctcactctattgcccagattggagcgcagttgcatgatctcagctcactgcagcctccacctcctgggctcaagtgatcctcccacctcagcttacagagttgctgaactaaaggtgcgcacaatggcacccagctaatttttgtatttttttggtagagacagagtttcaccatgttgccccagctggtctcaaactcctgggctcaagtgatctgcccacttcagtctttcaaagtgctgggattatgggagtgagccaccatgcctggcctgaaatttctttacaaaataaataatgtaaattaaaaagcagcaaaataaggctggggacagtggctcaaacctgtaattccagcactttgggaggccaaagcgggcggatcacttgaggtcaggagttcgagtccagcctggccaacatggtgaaaccccatctctactaaaaatacaaaattacctgggcgtggtggtgcatgcctgtaatcccaactacctgagaggctgaagcaggagaattgcttgaacgctggaggtggaggtggcagtgagccgagattgcaccattgcactccagcctgggtgacagagcaagaccctgtctcaggaaaaaaaaagcaaaatattaaaatattttaggtatatttttgtggaagatattttaaaaagtgcttatgctcaatttggcaagtgtgtgggaaaacagacattgtcatatattctgggcggagatgtaaattttgggtggaaaactggcattacctaataaaattaaaatgagcatggcttttgatctaagtatttgacattcagaaatttagcctacgtaagtattcttgaaagacagcaaagatgacagtataaaaaattgcagtaatgctttccacaaataggaaataattaaaatttttaacaataggggattgtgaaatcatgtagcatttacataatgaaaaaccatacatttattaaaatggtaagctgtcaacaatgggatgatgtccataacaaaattaagtagcaaaaaagcaaatttcagggaagaatgcttagaatgctttggatttctattaaaaaaacctctgtgtgtgtgttttggtatagttacagccaacaaaaaaataaaatttggaaatctgggtgagtatacaccaaactgttcatagctgttatctctggaatgtgtttatgtgaacattttcactttgtatttaaaattctttttgcaatgracatttttgttgtttgtttactttgaaacgggtctcctcctgtcatccaggctggtgtgcagtgatgtgatcatagcttgctgcagcctcaaactcctgggctcaagagattctcctgcctcagtcttctgagtagctgggactactcagtgtcaccaggcctggccaattgaaaacttttttgtagagatgggatctcccctaagttgcccaggctggtctcaaaaccttgggctcaagtgatcctcctgcctcagcctcccaaaatgctgggattacacgcaggagccattatgcctggcctcaaatatttctttggtaatcagagagagagagagagacaaagagaaagattgagggagagacaaaggtcaaaaatatagggatgggaaaagagctagaagagggctagtagctggtagaccttcaagctgggtcatggcctttctgggctccagcttctccatgtacaaaacaagggggtcgcattagctaccagggccccctccttctctgactcttagccttgtgttcagcttttagaggtagaatggaaattagggaaaaaggtgcagatatttctccagccagagtttctttgagcctaggacaaacaggccacacagcactgaatccttccttcctaagcagtagatgaacctgctggctggcagagaggcacaggtgtcttaggatgaaaggctctacaagagaacagggacaatttccagccttggggaatcagatggtaaaacattgagattgggccacttagaccattaggctccatgcagtccctttcatctctcctctcagcagctgttcgctgatttccctgccctcttctttctgactcatccctttgttctgtcctttcgctggtgtgcatcaaaacttttcctgcatccaaactgatatgacaggttaaggttatgtctggacccctggatggctctgtgtcacctctcgcttgtttggctcagtctggcacacattcctccctgaggaggccacatatgggactcataccttccttgacacccgcagccctcaggacttctccaatacagagtgaatgacgctggtacaccatctccagggtgtcttgtcttctcaccagagccctttcttgtctttcggtatcctgaaggctaagcacattgcctggcatcataaatattgtataatgaaatgattagtctttgctgctgaatgcatgccattctccaggttccagcaagatgaacccttatcttgcttctcagtctaggtctaccggcatgccataaatgaccccgaaattccagccctcaaagtctccttacagcggggaaaccttccaggtagcagtacaacttgaagatgtcctgtaggacacccagctgggtgggcttactgtggccatacaagaatgttttctgagaatctcaatgataaaagtctgaatgtgttcggtgttattgcctgtgctggctacatatggtagcttggatgccaggtggaggaggccttcctactccttgaaagttaggtgagattgtctcctgtatccctttcccataaccctggaagttcaaaatcctcccttggagtcccccgattcctgttgtagggcagggacactaccttccttgtggcctctcctgactcatgggctccatttcccttggtggcctcctctatttgcaccacacagaggcagtgattccataagagaaaaatcactcataccaagcgcaatggartgattgtcctcctaaaatccatttgttgaagtcctatcctgccakgtgatggtatcaggaggtggggcctttgggaggtaattaggtcacgagggtggagccctcatgaatgggattcatacccttataaaagagatcccagagagcttcctccccatctttatcccatgtaaggccacaacaggaaggcatctgtctgcaacttggaagacagccctcaccagaacctgaccataccagcaccctgatctcggacttccagcctccagaactgtgaggaataaatttctgttgttgataagccacctggtctaaggtaccttgttacagcagccggagctgattcagacaccaagcatggaggagaactattgatgcggatctcgctgaccccctccttgtccattcccatctctgttcctctccatttccctcccagtttgctycaggagttccaaattcatataaatgtcttttgtcacttttcttatgtctcttttcaggcgagcatttctgtcctgtctcctggcagctttggtgtcagccttgttgagaggcagccggggagagagagttgggaatggtgatggtagaaaatggctttcattttctttcttttttttttcaccagctcttttcacatagataaatgctccattctcaatttggcataggttttggattatcgccctcagcaggaggtccccgagctttgctccccttcacagcaagtctgtattgaacatctcttagatgcctgcatctgagcaaggagattaacactgattcaggaagcaaggagatttcactaattattcagtcctcacaagcctctgagatgggtataattattagcccattttatagatgaaacaatgccagctcagcctgattaaggaatttgctcaagattacacagtggtagagacaggcttcaatttgaggcccgacccagagctactggcccttccacaccccagtgctgattgccacagactggagacttgtgactcccttggaacactcagtgtgggggtgtctagaagaagatggggaggtgctggttacacgcagggatggagagatgtgtggtggggatagtttggaaaggaggcattatttgacattgccactatctttttttttattttttatttttctgagacagagtcttattctgttgcccaggctagagtgcggtggcacgatcggctcactgcaaactctgcctcccaggttcaagtgattctcctgcctcagtctgctgagtagctgggattacaggtgtgtgctatcactcccagctaattttgtatttttagtagagatggggttttgccatcttggccaggctagtctcgaatttccgacctcaggtgatccacctgccttggcctcccaaagtgctgggattacagatgtgagccaccacatccagctcttgacattgtcactttcaaagaamgttcctataaaagtgattccatattcacatgttttgaggacataggagctggaagggcaggaaatagcatcccccctgtgtaactgcaacagggcaagtgtgtttcagaaagcctataatgtaagaaggttattcagctcttgagaggggaggcctggcttcttacgcagtgtcctgattacagagaaggtggagaatgtgtgctgattctcacaataattagaaatggactctgtctttatgacaaaattcaaagaaaaatacagaagatagtggggatctgaattttataacaataacaatgacaataagagtagttatcatgtacagagagcttataggtggcaagcactgtaataacccctaacatgcacctctcattcatacccaacacaattctaggtgggagatgcaattaactgcccccattttacagatgttgaaatcgacacttataagagaagtaatttactcagtcatggagctatctcagtacaacccatgagctcctgctctcccatgtgctgctgttttaacctggtgaggcaggccactaggaagccaaggacagtagtttcccccatatccacagtttcgccatccatgctttcagttacctgaggtcaactgcagtccaaaaatattatattacatacaataagatgttttgagagagcgagtgagaccacgttcagatagcttttattacagtatattattacactcattctattttattattattattcttaacctcatactgtgcctaatttataaattaagctttattgtagatatgtatgcgttggaaaaacatagtgtatatagggttaggtactatctacggttttaggcatccactggggttcttgaaacatatcccccaagaataagaagggcctcctgtaccaaaaggcaatttaagaaagtatagcagattacacaggggactgaaaagtgtaggggataagcgtttgactgtgaatacactagttttcagatgactcattttcccagccaaatccaggagaaactgtaataatttagaattgaaaagtcatccttttgccatctccaggccttgtgaaagtcagttctgggcctccaagaaggtggagggagaagagatgcctaactcacaaatccttccatgatctgtggacgagcaatgccagcaacaaaagtgagaggacagagcaaagagtgagttttcaaaggatggaaaatataagcagggatgaaaagatagaactaagccagacaataaaagggcacaacagcccttgttcccctcaccactctgctccgtatttctgactaggatgaggtggttttgtgcacagtgagaccccaaaggtggctatgggtgggtagccaggccagggcagctcaggttccggcccgaggagcagactgcattctttgcccctgtctcacagtggtctcgtctatccatccagaccgtgctaaattctccactaggggctctctgctcctcccgttcgacagacagctgcatcttctcgtgcattgccagctgcatccccaagacaccgtggtgaaggtgaaggctggagtcaacggatttggatgtattgggcacctgctcaccagggcagcttttaactctagtaaagtggatattgttgccattaatgacccttcattgacctcaactacatggtttacatgttcgagtatgattccacccatggcaaattccatggcactgtcaaggctgagaaagggaagcttgtcatcaatggaaatcccatcaccatcttccaggagcaagatccctccaaaatcaaatggggcgatgctggcgctgaatatgttgtgaagtccaccagcgtctttcaccatggagaaggctggggctgacttgcagggaggagctamaagggtcatcatctctgccccctctgctgatgcccccatgttcgtgatgggcatgaaccacaagaagtatgacaacagactcaatatcgtcagctatgcctcctgcaccaccaactgcttagtgcccctgggcgaggtcatccatgacaactttggtattgtggaaagattccagaatacagtccacgccatcactgccacccagaagattgtggatggcctctctgggaaactgtggtgcgacggctgcggggctctccagaacatcacccctgcctctactggcactgccaaggctgtgggtaggggtcatctctaagctgaacaagaagctcactgacatgggcttctgtgtccacatcaccaacgtgtcagtcatggacctcacctgccgtctcgaaaaacctgccaaatatgatgacattaagaaggtggkgragtgagcattggagtgtccccccaagggcatctggggcgacactgagcaccaggttgtctcctctgacttcaacagagacacccactcctccacctttgatgctggggccggcattgccctcaaagaccattttgtcaagctcatttcctggtatgacaacgaatttggctacagcaacagggtggtggacctcatggcccacatagcctccaaggagtaacacccctggaccaccagccccagtgagagcatgagaggaagcgagaagccctcactgatggggagtccctgccacacacagtcccccatgacaytgagactctcccctcctcacagtttccatacagaccccctgaagagggaggggcctagggagccccaccttgtcatgtactatcaataaagtcccctgtgctcagccaaaaaaagaaaaaaattctccactagggtcacccaaaagggcagatcacttaagcttgctaattcctctgtccgcctccttccttgcaagctggaaccagatgtttcacccctaatcctgaaatgtcactgagcctcaatggattattacagaaaacttccctgatggatcattacaaaaaactgccccattcctcccagggagcacgtgctctggtcaaggagggctcacagaaagatctgcctggcacaacagcattcagagcagatggacaggcgaggccctggacctcactctctcttccctgcttgccctgatccactgcttgtgacaggaggggagtgggtagggttggtggaggtttgacttatctgggatgaggctttgcaagccataaaggaacaggatgcaagaggacataatgaaaaacgccagcgtgtgaagaagtgcatttggcaagagaatccaacacttattcttctgaggctgctgaagtgcacaaatggaggcaggctggtgccggccggtccatctgctctgagatcttgctgatcttagtggaggacagcatgacctcaggagagtcttgacctagtacctcctactacatggcaaatacactgttatagtgcctgggcatttcattccagtgtctcctgatctggtttcttatgcttcaggattgtttaaaagaacaatctggcaagaccagcatttgaagaatgagtgtattagtcctgcttttagttttagttttcatgttgttgatgcatcaatcctctggcaagcccagaagttcttaatggtgtttgtgagccactgaaaaatargaggttatttgatgtgcatatgtacattttctgcgtagctgtttcatagcttccctcagattttcaaaagcgcccatgtaccaaaaaaaggataagagccattgatttagagaaaatcactgttttgatcaggaaccatgttgcatgcatgctctaaaagcgtgaatgagctatcagaagattgggcttcatttttccctaatgaacaatacaaattgagtagtaccccatgttgatgatgatgtgaatgaatgggcattcatacattgagggtaggagtataaattggaatatgctttctggagggtaattgagtaaggtgattcaaaagccttacagttttatgtatttagtttccctgaaattacaattttaagaatttgtcttagtggttaagtgtgctagctctgcagtcaggctgacttgaattaaattttaacatcactacttattatctatgtcactgtgggtaagttacttaacctctctctaggactcagttccctcatctataaaatggagataatattatttatccatagggttcttggaagggttaaatgagataatacatgtaaaacacttagtacagtatctgagacaaaataaatactcaataaatgttattattatttagatataaggattttattggcacattatttatcataactaaaaattggaaacaaccccaaatattcaacataagtgactggcttaatgacacatacaattcaaccagtaaaaattaactaagtgaatatgattagaaacgtgttcataatacgtcaagagacaaagaacaggttacaaaatagtacatttgatatgccatagaaaaatggctgaataaatatgttttcaacatttcagtggttatgtttaaggggtggctttttaytatctttttttgtttttctgattcttttaaattttctacaatgaaaacacgcatataacttcttgtaataaaacgttaactaacccagtaaaagttactttttgaaaacatgatgactgatttctgttgaaaaacgctttgtggctttgaatcatcatttttgtgaaggttcctttcttcatgttgaaatgagagttatattttctttccttgttgagataccaggaaactcaaatgaaagggtgagcataaagtgctttgaagggcagtgcatagcatgtgtgaaaaggtccagcttcttaacctgcggagctttcacaaaataatctgtgctgtaatgcaggaggactccagaagccctgttgtctggacttagagaacatgcctccagccctgggtcaaagtcctgttatgattaactccagggaactggtatggattgaggatgaaggtacagagactttcagctatgaaaatcggtctgcagtcaggattccaagtttaatctctgtgaaaccgatgggccagtgtggccatgcttactaattagacagcagcaatgtaattgatcaaatcaattcccttcatgacgcaaagccaaagaatccagggacagctggagcttggaagagcttgcagaaagccagagaatgtgaatccctctcccagagatgttaacgtgggtaagctaaatttttgtgctaattgctggctcctttctcaataacggataatatggtgatgcaatgtagctcccgtgtccctcacgtggccagactctaggctggagagatttaaattgtgctcattcatttctttcctggatttacagcaagcattcaacgtcttcaagcttaaagagcctttgctttctggaaagaagcaaagtcatagccaggtcccccatttcatttatgaatagctttagcgttaatttgaaagccagtgtattgaaaaaaagaatgtaaaagggaaaccattaaaagaaatgaggcttattgcaacaaccaagtattgaggccaatacttcaatctatttcatgcagatcaaatgaaaaaaaatgctatagaggctgcattggttgagtgaaataagcatgggatttggtggcagacagagctagttgcaagctcagctctgccacttatgagccctgagaacttgggtcaattattttacctttctgagccatggttttcttttcttttcttttttttttaagatggagtttcgctctgttgcccaggctagagtgcggtggtgcgatcttgtatcattgcaacctctgcctctcaggttcaagcaattctccctgcctcagcctctggactagctgggattacaggcatccacaccacacctcgctaatttttctattatttagtagagatagggtttcgccatgctggccaggctggtcttgaactcctgacctcaggtgatctgcccacctcggcctcccaaagtgctgggattacagatgtgagccaccgcacccagctaactatggttctcttatttgtacaatggaaacaattatgccatcctcaaagggttgtgaagattaaataagataacgtactgaaacacctagctcactgctagggacatcataagtgctcagtmaatattagttctccaccagtgtcttgtcttctggacaaagccctgaaatcatgtctttgttctatgctgcaaactcatgtgtcgtggtcctacactctgtgccattggattccagatgattctagacaaggtaacctgcaggctttccagaatctatgccatgtttatgtatgagctctgattcttaagagagggaacaatagaatctaagcatattcaatattatactataattttaattgttttcataatatacatcacagaatacaaaattcaaatcatcgtggctggtggtatcagaaatctctgattgcagaaggcatgcaacttttggtttagaaaaagaggtcatgagataagcaagactgagaatatggatttacagcacgtcattctggcaaaacatgtgacagacacacacttggaatgccagagatggactggaaggagaaatggggaggctttgcgggtactggtaatcttttctttcttattttggtgctgcttaccgggatgtgttcattttgtgaatattgacacggccatcccttctgattggtgctcttttctgtatgcatgtcatacttcaataaaaagtttatttaaagagaaataagtgtcacacagtttgtatgcattcagcatgaggtgggataaatcctggagaagcctcatgtcaatttaccagggaattctctgtaaatcccggatcaggctttttcctggatggtctagatttttataggtaagaacagaatgcaatcgaaagttaccatcatctcttctggaccacggcctcagcctcacaactgacttccctgtctctacccttaagcctctacaatccatcctccacttacccaatgaagtctttaaaaacagaaatcgggctgggcgcggtggctcacgcctgtaatcccagcactttgggaggccgaggtgggcggatcaggaggtcagaagatcaagaccatcctggctaacatggtgaaaccccatctctactaaaaatacaaaaaattagccaggcatggtggcgggcgcctgtagtcccagctacttgggaggctgaggcaggagaatggcgtcaacccgggaggcggagcttgcagtgagccgagatcgcgccactgcactccagcctgggcaacagagcaagactccgtctcaaaaaaaaaaaaacaaacaaacaaaaaaacccaccagaaatcggattacattatttccctttccaaaacccccccatgattttcaatagcatttagagaaaatgctaacctttctatcatgacctacaaggcctcacaggatatacatgcttccttcctgtctgacatcatctgccacctctctcctcctscttctgtgcagtccagcactctggctgccattttccatgtcactcatgtcaaatgcattcctatctcagggtctttgcatttactgtccttgctgcctggaatgctttcccccagattcctgcagggctggctccttctagtcactcaagtttcagcccatgatctcaacgagcagctttctctcttttttctttccttatttttatttatttattaattttttagacagagtcttactctgttgcccaggctggagtgcaatggcgcaatctgggctcactgcaacctccacctcccgggttgaagcaattgtcccacctcagccttcgtgccactgtgcctggttaatttttgtatttttggtggagacagggtttcaccacgttggccagactgctctcaaattcctgacctcaagtgatcgtcttgacctcccaaagtgcagggattataggcgtgagccaccgcacccggccctcttttttcttaaaattaattattttctttttcgatcagcttcctcaggttgagcttatgctttttcttgatcatcaccaccctgctcctctctagcacaccactccatatttcctctatagtacctgcaattatctgatatcacatgcttatttatatgtacgatttgtccatgcccacccctcaggactgtaagcttcatggaggcagtggctttgcctgtttttttcactcttgtatctgcagtgccttgaagagtactcgagacagggaagstacttaatagatatctggctgtgtgatctttacaagcctctcactgtctgaatttcaatttccatatctgtaaatttaggctaataacaagcttctcccccaaccccccatctcccccagggttgttgtaaagattgaaggaggtaacatatatgaggcacttagcacagtgcctggcacatggtaaatggtggctgtgttccctgggtgctaattgtaaggcattgttagtttctctcattcattcatcatgagcaagcaatcatcttttattagtggccctttgacaaaatggtaacacagcctgtcgagagaccaggtttcacagcatcattctgatgtttctttggctaagtgttagcctttctctgtgtgatgtacaataattaactgattaacagagatcttgtgctacttcagatcattctttaaaaggcactgcagatggaatttgtatctagaataatgagtagcctgcaggacactgcaccatggtcagacaggtaataaatgaaagcacaggagcacgacactctggccaggagccagtggccagcgagaaagctgatagccacggctctccactgtgacaaatggggccatttgttcctggggcatcctgagtaaattggtatctttagaagagttttgttaaaaaacaaaaaaaactctgcatgaaaggttcagaaggaaacagggcctgccactttaagaatctgagttcgtaaaggtgaaaatggtctctgtaagatgtgatacaaataaatgagcaaatcttgggtaaggtacctcattgaatggtaaagaggtattggttttaaaggaagagagaaccaagaagaataaaactggggagtgagaatgtgtgtgtgtgtgtgtttgtgtgtgtgtgtgtgtgtgtgtgtgwgagagagacagagagagagagagaatgagagccaattgtggtagtcagtcagtcacccaggtaacaatatactgattggaaggaaatcatcacaaaattttaattacaaaatgagaaaatgtttcatcgtgttcctttaaaattttatcttttcttcctatgatctgaggaagaaaagattgggaaaaaatcaaatgaaaagcaaatctctttctctccccaacccctgaaatcccctaagtaggtcacacacagtattctcaatcatctcagtggaggctcagcctacagcaagcataaaagaatttcgaggctttacctagatagatctggttagggagagatgctgacgggttacacagggtggaagtcattagactaacgatctttaatcaggttggagctgtggagttagggacattcatgtgtggcattctttcatcagggtcttaaactagaggaactggccccgtgggtttactttcagccctagagagttcagagctaagcaaagtttaagaggtaagtttgtttctctgggagaatatgagagctcgatttacaaacagaaaaagtacctcattatagttaggtagtttataatattgaaacttgttctgtattatatttctctttatcctccactgaaatgatctaatttatttatttttatttttcatttttcattgtttttttttttctgagacagagtcttgctctgtcacccaggcgggagtacagtggcgcaatctcgcctcactgcaacctccgcctcttgagttcaagtgattctcctgcctcagcctcccgagtagctgagaatacaagtgcacgccaccatgcccggctaatttttgtatttttagtagagacggggtttcaccatgttggccagactggtctcgaactcctgacctcaggtgatcctcccaccttggcctcccaaagatgatctaatttatgtttttattttaataaagaaagcattacaaattattaattacacatgtaataaatgaatactttttcttttaaaaattaagaacaattttttttgactaccatccctaatttcgtatccctactttatggggaactattttcatctttttggtgtattaccttccagtttttttctatgtatttccatacacatactcatagaaaatagaatatttgggatttaaaaaatgtaacatttcatactatatgcaatgctctgaaacttgtttctccccccaacaatttgtcttttttgtgtgtttgtagagatgagggtctcactgtgttgcccaggctgctctggaactcctgggctcaagtgttcctcccgccttagcctcccagagtggtgggattacaggtgtggccagccaacaatttatcttaaagatctttcttaattagtatccagatctaattcattccttctaactgctgtatcacagtccactgtatgaatgtgtgagagtttatttccttacctgcttacggatagacttttaggttgtttcccaattagaacagtactttttttacaaaaagtcatattgagctatataattcccataccataaatttacccttttaagtgtacaatttagcggtttttagtaattcacaaagttgtacaccaaccccactatctaattacaggacaatttcatcaccccctaaaaaaacccagtacccggccggccatggcggctcacgcctgtaatcccagcactttgggaggccgaggcgggcggatcacgaggtcaggagatcaagaccatcctggctaacaccgtgaaaccccatctctactaaaaatacaaaaaattagctgggcgtggtggcgggcacctgtagtcccaactactcgggaggctgaggcagtagaatgatgtcaacctgggagttggagcttgcagtgagccaagatcgcgccactgcactctagcctgggtgacagagcgagactctgtctcaaaaaaaaaraaaaaaaaaaagaaacccagtacccattagcagtcatctcatttccccttctcctcagtctctgcgaacactcatctactttctctctctgtgcatttgcctattttggacattttgttttaatagaattatatgacaaaatgtgaacttttgtgtttggcttctttcccttagcgtatcggtttcaaggttcatctgtgtggtagcatgtgtccatactttgttctcttttctttggccaaataacattccattgtatggatataccacattttgcatatctgttcttcagcagatggacatttgagttatttccttctttcggccattatgaataatgctgctgtgaacatctgtgtgcaagtttttgtgtgaggacatgtttccaattctytcctgtgtatactaggagtcggactgctgggtcattaggcaaccctttgtttaacttttgaggaactaccaaactgtttttcaaagtggctgtgcccttctacrttgccataaatgtgagtttttagaacaagaacaaggaagaacatgttcgtgggccaaatggatgtgtttattcttgagacatctcagccatatttggaacaagctgaaaaacacctcagcactgtccagcagaactttctgtgatgatgaaaaygttctaaatctgtgcrgtccaatatggcagtcactagccacacgtagctgtttaacacttgcaaggtgactcctgtggccaaggaactgcatttttaattttaattaatttaaatatgattacactcatgtgtccagtggctactgtatctgatagcacagtacttattctctcctgtgtgtaaagactgacagtaccsaagaggtccccataaagttatcggagaagtgatccaccttctaggatgcaccttgcaactccaagttagctcttgtcacagacaacacagagaagaaattcagagattgtgatgcrttaaatcagaattgtaccacattgaaattcaggtaactcccaacttttgcagagttatgcttggaaagctggcatttcatgtatctccttttagctcaccagtttaaagaactgtctttgtattgttttgtttctttgtacaagagcaattcatgctcactacagagaagcaggaaaagaaaataaaaactaccacagataattgctgctaaaatcttgagggggagtgtgtgtgtatgtgtaagtgtgtgtatatgcatgtgtgtgtatgcatttgtgtgtgtgtatatatactgttaaagaaaatgttatttaatgatccttcttaaagcacagtaaagaagactttatttagaaccattgagacaggtataggaactactgcaatgggctgtgcagtgggggagacaaactgggctcaactatgaatatagaataagcaagagggaatttatggccaaggagcagggttgggggcagtggatggaaaattactaagagaaaacatcaggagtaagggtgattctggctaaaccgaactaacagggttcttgctgaaggcaggccagggtaatcacatgtcacttggaggggggatactggaggataagaggcctgatcagatattgagagtgattagatattgaggttgattagatatcgatgtgggtggttctttctgaactgactcaccayggttcttcctaaaactgggttttacaaagaagtgcacagataagtctagaagaagattcaggagctagactaaagtttggtcaagcaaagtctttgccagtacacacagaattcaactatatttcagctttggtagaagagcagaagtgacattggaatcratctttttccaccctcacagttcctcttcacagctctgatcagatttcattcacttactgagttgtccctgtgccaggcccatgctaggtgagacccagtctccygggagagatggacatcaagaagcccagtgtgacaaggctctgatgggcatggagtgaggacagagatcgcacaagagagacagtagccactgcctggggaatcgtggaagatggcaaaggagacattaaatttgagctggaggaactcacagtgcacaggagagaaggaagggtgttacaggcagagggaattgcactggcaaaggcttggggcatgatagagccaggtgtgttcagggaagggagactgctcctgtgtggctggaggagcaacagcaggggccacgtgtgattgcctgccttactggctrttaattctcttatcaccccaacgaggtaagtaaaatgtcatctctgtcttacaggcagaaaaaatgagagctgagagaacttaagtaacttgcctgaggttgcacagctagtgagggacagggctgagattctgatctgtttgagcacaaagccctatcttgggagatggggtaggttagattccaattgtgaagagtcttttctgtcacactcagaagttcagaagtcaccctggggtaattcagcagggtaccagcttgagcagatctgtgctctaggaagatctttgcaaagacaatttgtaagcaggtcagcaatttaccttgggctgaactatcctcagtgcattgtgtgcgcgcgcgcgcgcacacacacacacacacacacacacacacacacacacacacacactctctctctctctctctctctctctccttcaaagaaaggagcctctgagaatccagcactctttgtttccctcttccttctcaaatgaaaaccagtagctctgagttctatgtttattccagatcacagtggaagaagactggaggggctggggacactgccccttgctgagggaccttggactaatcgcttctcacatggcttcagttttcttatctgtaaaatgaaattcttggcatttccacctttacatgccctttccatctttaaaattgtctgattcctaagagtggtgggacctattaagggatttcactctggccacatactgtgacttttggaaagctaagatagtttcggactggctgcccccaaatttagatagagtctcttagcatttcctgcataaggccagagactggattttctaggcatcgctgaggacttaagagtcttctttggttttcaggctaggccaatggccgcaaataacctaattaggacctcgcaagcagcttgcccagtgaaagctaatttaattagggtcttattagttgttataactacttttcaatgaagctttattacattcaactatgcaaatcctaagcaattgtattaaatgctggcaaatgacccattagtctttgatttcacttctttttttgcattgttcacatctatcctgagattcagatgcctgtagttcatttttcctytttgaagccaggtgcagccttgaaggcatattttctgttctagtctcattacccattctctgggattccccatccacttacgctaatgatttgatattggagtgatatgtggggtggagaaaggctaggaaatctctccccagtggtcttccatattccctaacgtttccatcattaatcmctccatggttggaagactttgaggataagggcccctggttgaaatgcagatgtcattttggaggcaaatgcagaaaaccattattatgaattaacayctgaggattagctcatcatattagctaattggtcaatacaagatacttcaacagaatggattctggatggagttttgatagttgctggtgtgtagaggaggatgaaagaaaaccaagagttaattcrtttctgctgtgcaacagtcactgggctagatatgttcacatatattatctcatttaattcttttaacaaccttgatatgaatgtattattatcactgataataagaagagaagagtcagcttcaaaatcacacagctagtaagaggaaaagcctaggagagcactgaggtgtgggaagctttggcctccagtggggcagtgtcatgacctggggggttaacaacttcagaggattgcctgaggccaggcaaaccccaggaccagtgactatgggtcactaaagacaaacttgacagggctcacaacttggcctgagcagtgctgatctcttttgttctgtttcttttcatcctcaatgggcagtgtgatgtcatagtatgatgtcatcattaagagactaggatctgggccaggcatggtggctcacccctgtaatcccagcattttgggaggccgacgtgggaggatcacgaggtcaggagttcgagactagcttggccaacacggtgagaccccgtctctactaaaatgcaaaaaattagccgggcacgtggtgcgcgcctgtagtcccaggtactcgggaggctgaggcaggagaattgcttgaaactggcaggcagaagttgcagtgaaccgagctcgcaccattgcactccagcctgagcaacatggtgagactcctgagactctgtctcaaaaaaaaaaaacaaaaaaacaaaagagaggctaggatctggcatgaggccgactgagattcacatatcctggttccagcctttttgtgcaggtatgaccctgggcaagttgtttaaactccctaagctgtgtttttctcatcgggaaaggagataatagcaacttcctcataatctgctgggagttatggaatatgtgccaagcatctgacaccaggcaagtgccagcgagcagggattcctccacatctgagctggtgttggagtgcttcatggctatagtgggaaaacaggaaatacacatacagggaacttcaggtctgttcttattaggctggtggttcttaaacttaagtatgcatcagtagtacccagagggcttgggaaaacccagactgcttgggttgcacctccagtttctgattcagttgttctgcggtgggatctaggatttgtcatctataacaagtttctgggtgatgtcaatgctgctgcgctgaggaccccacttgaagacccgctggataaggccactcacagtggatgctctctgacaacacagtcagcagctccaggacagagtgttccaagtccacctgagcctggggtgagtcagagaagcagagctctggctgttttcctctttcccattttctaccctgcctctgtggcttcctgagtccttgagagccagtccttgtgaacaggggccaaaaatattctcttaattttgatgccttatttatttatttacagccacgccagttcctgggcctgcttaggttgaagggatttttttttttgtggtttgaataaactaatttttggctaaaagcactgatacaatttgtttttcacggagagcaaagagaagataggctccaagtaacaacttccaattaatctatcagtctgaaagtttacattattaataggcttatcattttgatttaacaaatggtatagacatcctcagacatgcagaaaaaacagtgcttgctgtccatcattcttttcatcaagaaggtgcaactcactggataccagtgagataatttatgtaaaattgtttaacacaatgtctttcaaagaacaaattataataatttatgttattgtgtttactgaacaaatgttcattgagcccttataaagtgacagaatgcttgatgtcaggttttctccacttcaacaatgattgacatgttgggttgggtaattctttgttgtgggagatctcctttgcattgtaggatgtttggcagcatacctggcctctcccagttaatgccagtagcacccccagtgtgacaataaaaaatgtctcctgacattgctaaacgtcccctggggaaaaattgctgttggttgagaactactgatttacatgaagagtcttatttcatctttgcaacacccaacaaaattagctgttatttgtttattttagagatgggagaaaagaggatcagagagttgagcaatttgctgaaagccacacaggtagtaaagaagcaggagtggagtttgaacccaggactgacaatccagagcctcagtctcgaccactatttttgcttcttaagagtatacatttaagaatgtatagaagaggctaggtgcggtggctcacgcctgtaatcccagcactgtgggaggctgaggcgagcggatcacttgagatcaggagttggagaccagcctggccaacatggcgaaaccctgtctctactaaaaatacaaaaattagctaggtgtggtggtgcatgcctgtaatcccagctgctagggaggccgaggcctgagaatggcttgaacccaggaggtggagattgcagtgagccgagattgcgccacggttctccagcctgggtgacagagcgagaccctatctcaaaagaaaaaaaaattgtatagaagaaagtccattcgatcacagacattgtggtaattgcctttgggaaggagagaggtgaatgagatgaggggtggggcgccttttatatatatttgtaacatttttatttcttaaaagaagatgtatagcaaattcagcaacatgttaaatttggatggaagactcatgggtgtcccaaattacttttgtactttttggaatgactgaaatatcacaaatctaaatattgaaacaattttaaaaagaaagaaacatgaccgtaaatgttaggtaaagtcatctgatatttttgaccatgtgaacatcatacctggcactctaaaaaaactttagctttttactcttttgcccttttttaacagacaattttcccgactattcagtgagaaggaacccatctcatttttgtttcctcaaaacacatagcccattcatcgaatttgtcatgatcataatattaacaggtacttaaatatctcctctgaagtggatgccagattagaggcttcgtgtatattaatagctgacgtttatgaaatatttactagtgttttgcacccagctgagtccctttcatccgtttcttgtttattcctcactacaattctttgaggttgatgattttggtgtcgttttacagatgagttaactgaggcttagcaagctgagcagcagagccagacagatatgtcagatttcagcgtccctgtttttttttttttttgagatggagtctggctctgtctcccagactggagtgcagtggtgcaatctcggcgcttactgcaacctccaccctccacctcctgggttcaggcgatggattctcctacctcagcctcctaagtggatgggattacaggtgcctgccaccataccaggctaatttttgtatttttagtacagacggggtttcaccatgttggccaggctggtctcaaactcctgacctcaagtgatccgcccgcctcggactcccaaagtgcttgctgggagtataggagtgagccaccacctggccttcaagtccctattccttctagtacagcaactcaagcaggagtcttgaagagctaacaagggtgtctcagagaagagaaggtgccagccgtcttcctcargacgagggggtgggaaggcggtgacagaggcaggtgacaggaagggctttcctggtcagattctgggaatcacttggtgagcccaggcttctggcttagtgccattcccaaccctgtggcaagtgggtcaaagttcacccagcccctgccttgtcctagttgctggttccaacacctctagatttagtacagtttaaagataacccagcttctccctctagatcagtagttcaagggtaggattaaattatgcctctgactgaccagggcccattggctccctctcaaaagggctccttccctggcagaatctgctcaagcagccagctccttgcttcttgagtggtgctcaattgagttttcaattcgtgagtctggcatcttccagggccaatccgaattttgcaamtaaaatgtggtgcatttgccatgccctgatctaaatatacgctgtctactgcattccctcaatccacacaggcccccacggtggggtaggggtgagcttggatgcctagaggaatccttccttattaactcatcctttgagtgcctccaactggattgttttcctggggatggcaacagtgttttcttttattttgttatggttttaaattgggacgtcagtcctggagcctcaaaccactgatgtgggctgccaggcccaccacgtgtgaaagatcaaatctgtttatacgctgtggctgactgcttttttttcttagctcctggataaaatacacacattctgaggctgttgtctcctctggctcctctgatggatgggtgttgcatcccaacagggcagctagctagccctgaactctggaaaactgacaccaaattagctgcaaggatttgaagctttcaagacatcttatcacctcaggaggaagtcaacgtagatgcctgaaacttcttgtgcctcaggcagtgagamgctatcagcataaaaactggcttcttcatcaatgttgaaacagactttgtggatgtgcaaattgctacacccttcccagagagtaatttgacaatatacatctgaggcctttcccgggagtctgccttttcatctaaccattcaaagtggactttatcccagtgaaatcctaaaaagcaagtgccctaaagatattaaggaaaagaatgtgtgtaacagagtatttatcacagctaaaaactgaaaacatattgcacatcaagagggaatggattattttaaacatatgaaaagatgcttaacctcattcacaaaaattccacctgttaagttggcaaagatccagaagtttgataacagctcttagtgaatgtgtgggcaccctcaaatgtcagttattgaaatgcaaattgatataatctctacataagacaatctggtaatatttataaacatgaaaacatttactcagaatggtccacttacaaaattttacagatatatttactcatgtggaaattggtgatgtataaaaatattgttttgtagtaacaaaaatttaaaataacctacaatgtctttccatggagatctatctgaaaaaaagaaatgctatggagctactaagaatgaagctactctatttggaaatggaatttccactgaaattgaaagaccttcaagatacattgtccagtgaaaaaagcaaaatgaggaatagtgtttaagttatttccattaaaaatatcatataaatatatttatatatgcatagaacatatctggaaggatatataagaaactgttaatagtggttgcctccatggaggggaattgggtgactggggccaaggaagtgagagagacagacttttcactccacatttgtaccttgtaaagtgataccttgtgtgtgtcttatctattggtgtaaatggcttgtttacataactggattggttaagtatattacgataccttctattatggaattcagtgcagcattaaaaagatgggaaaggctgagcggggtggctcatgcttgtaatcccagcactttgggaggctgaggcaggatgatcgcttgaagccagaagtttgagaccagcctgggcaacatgaggagaccccatctcgacagaaaaatttacaaattagctgggtgtggtggtgcacacctgtggtccctgctacttgggaggatgaagtaaggggaggatcgcttgggtccaagagttcaagactgcagtgagctatgattgtgccactgcactccagcctgggtgacagagtgatactccgtctttaaaaacaaaaaagaaaagaaaaaaaggaaaaacaaaaaaatgaaaagactcagtttcatcgatatgataagaagtcagtcaggatgacttgctgatcagtgaaaaaagcactgggtgatccaacttgtgttaatacaygcaacaacacacacagaaaattctgcaaagttgcataggcaaatactaaaacatggttatatcgatggtgctatggtctgaatgtttgtgtctcccaaaattaatatgttgaaacttaatccccagtgcagtgttgttggtaagtgggtcatgtgaaaggcaagtaggtcaccagggcagaactttgataaatgggatcagtgtacttataaaagaggcattcgagagcctgtttgccccttctgccatgtgaggacacatagaagtcaccatctatgggcaggtcctcaccagacactgaatgttcttgctccttgatcttggacttccgagcctccagaactgtgagcaataaattctgtcatttattataaattacctagtctaaggtatttggttacagcagcctgaatggactgaggcaggtgatatgattatggatgatttttcctttcttttttatattttgctgttacgtataaattaccttttgctaccaagaaagagaaaattcttctcattttgaaacgaataaaaaatcaacaacttgacagcatgattttgaactgggggaatgagcagggctgtaaccagcagaggaaagggctgaagtcatttcttcattttttttttttttttgagatagggtcttactctgttgcccaggcttgagtgcagtggtgtggttatggctcattgtacccttgacctcctgggctcaagggatcctccccactcagcctccctagtagctgggactacaggcctgtgctaccacatgaggctaatttttattttttatttgtagagatggggggtctccctatgttgcccagattggtctcgaactcctgggctcaagtgatcctcctgcttcagcctctcaaattgctgggattacaggcatgagtcactgctcccagcatgggccaaagcaatttctaagtgttccggggctggtaatcacagagcgggagatatattaaatatatataatatatayattattaaatatatataataaatattataaaatatatatattatatatatgttaaattagattgaaaatgactaagaacaacaatcttcttttttggccattgatagtttttcttccaaaattataaaaatgtttaatagtccccaccataattctactgaaacccaatttgtattctatcacattttcttaatttgatgttcttaatcacaaatagagtatttgcttattgcaccatgtgaaataatacagaggttataaaaaagctaataatctactcctcctcactccatcgtatcccttgaggtaactaaactaataaatagcttttaaaagttgggttagacattactctataacttgcttttttacttagatattatgagcaatcctcctaacagattagtagatgtatatctaacctattttttttgtttgtttgtttgtttttgagatggagcctcaccctgtcacccaggctggagtgcagtggtgtgatctcagctcactgcaacctccgcctcctgcgtacaagcgattctctggctaatttttatatttttagtagagaaggggttttgccatgttggaagtcttgtcttgaactcctgacctcaggtgatccacctgcctcagcctcccaaagtgttgggattacaggcatgagccaccgcgcccggcctaacctatttgttttaacaccactttacattttactgtagtttaaatttcttattacgcataatcaggttaaacctaaaataccaaatcttccttgccccagcaactacatttttaggaatttatcctgaatatgtgggcacagacatatatacaagagtattcatccaacattgtttgtagtaaaagaccaaaaataacctaaatgtcaatcaactgggaaattggtaagtaaaataggacactttgtaaaatggattattatgcagccatgaaaaccagcagtaactctatgcattctgacacagaactatgtctaagatatgctatgctgttgagtgaaaaatgaaactttcactgaagtgtttctaaaatgacaccacgaatcaaaataaacagagtgaaaacacacacattctgcatgcaaaaacactcaaacatacatatacgcatgtggatatgtatgcttacaaataaatagactattttggaaagcatacacaatctggtaacaatgtttacttcaggagaaaaartactgagagtgttgggtgtgaatgtggggtaggtaasagcagaataattttttcattttttttttctgattcaaataagaatctatgcatcattaaaaaataaactagttgatttttaaaaattgctacaagtaatcatgcaaaatagttacaaggcgtgatggcacggtccaagttccctgtggtcctaagtctaaaaacaggcattctttacaaaacattgtaaagaaaaaaagtatagaaaatctcatatcctgaagtacatctttgtaatgtcccgaggcagggtttttattctggagttagagggtccataaacttgggtgagaaaaaaamccctctttttaaaaaaaaaaaaaatacaaaaaccaaaaaaaacccaaactaaactttggctgaaagtttgcatttcctttgataggaaagtgggcaagcagccacactagagtcagcaggatttgtcaccaatagaaatcagatctgtgatataacattacatttgttgcagatatcttgaaatatttccacttgtcagtacttcaaaattatagtagttatttatttgacttgctgctagatcttgtttatttaatatgttaaaggactttttttactctataataaatttgttttttcaacattataactgtatttcaatataattggttttctttgaaatcctgtgtcttttatttgatgtgttgactgtgagaaggggcttcatcagattgccaaaggggtccgcgaaacaatggagccaaggaaccttggtgttaaggtaaatgctaaagggctggggacaaggaatcacaaatgggcgctgtggggagtgtccctagaagctgggagaagggaccctactgcttcctcttgatgccgggggctgattaatggcctgaatatatgaatcggagatgcaattttttgttgctgttccagttggtggatcctcctcctccccaaccagctgcctccctggatctccgcccggcccagtgctggtggtgtgagccctggggctgacgcctgcgaatgacagtgagcccggcttgcccttggtcccattttaacctccttttggggcacggccagggtgctaagctcagcctctaagcaatgcacattagcctggcaggaaactctgtcttgaagaatttcaaaaaattcttgtgcaaaaccaagccccaaattcatcccaacaggagagagaaagcttagcggggagcaagacactgtaggcagacacacttggaaaaagttaaatggggctctaggaggaatgggccacttacatgtgctagaacattctgtttctgaacactttaaactgaactgctcgttggtgcaacttttatagcacaattcctgtgctcgcaccagagaggggcacttgagtgttcaaagggtggtcagatgagctgcgggtgagtgtggccaggagtgtgctgtcaatagagtcgtaagagcagagcctgccaatgtggacagattctactgtatcctgagctgactcatggtgctgtcatgccaggaggggtgatgatgggtggggtgaagatggccctccccctgcactgattccagmcttacaagtccttaaaacacagctcactttccttttcctcccccaaatcttatttcagcccactcttctttctgtctcctctgcattctgaagacacccatcattcagatggcaccttttagcttgtgctgaaattgatccattccttcatttaatcatttattccctaagtatttagggctggccagccatagattcaaatcttagctcagccactcactcatgtcatcgcggcaagtaaaataaatgaacactttatttaaaaatttcaagcccacatttgcaaaactcctgcttcccacgaaatacacacatagtaagtcacatttttcctttttaaacggatgatggctttgctctctcatcatgaatctttccctggactgttgaggctgttagtgccagtttctctttcctccccatctgaggctctggtgtgaaactggtgtactattggacatctgcactataaacacccttattccaggttttaaaacagggagacatttttattgttcaaattgagacacttttgaaaataagaaagggttattataataagtataattatgctttgataataggcataaaaggagaccatctcagtgaaatgggacatatggtcaccctattagaaaacagtgatatattacccaacagaaagacccagtgtgtcttcagagcattcgcaaagctggggcacctgtatttttggtraaataatctgatattaaagaaatcaaagttacctccatggaaagaatcagaatattgttggccttccttacattttttttagggttctatgcatacgtgtgtgtgtgtgtgtgtgtgtgtgtgtgtgtgtgtgtgtgtgyatgttttaatttataattttattattcccttttcaataccttaggcctttagaggtctctatctggctctgctataaagtcactggaatagtttcctcttttcctgcttctgcagggatcaactctgaccatatccctctcagaggtgagaggcaggtgaccatggctagagggtgagggaatgtaagggccaattggcaatgggacaatctcccccagaggcaggtggaacggcagccttttgataaagaatgaagaggccatccattttcaagatcctaccttgtgtccacacgggtcttgacctagccaatctcgcttcaccggcttcatgaccaggcccagattggcattttggttttagaataccagtctatgacagtctctttttaatgaacttgtggtagttttgaggaaggagacaagccacttaacccccctgagcccatttccttatttgtttacttattaatttaatttaatttaatatttttgagacagagttttgctctgtctgccaggctgaagtgcagtggtgcaatcttggctcactgtaacctccacctcccaggttcaagtgattctcctccctcagcctcccaagtagctgggattacaggtgcccgctaccacgcccggctaatttttgtgtttttagtagtgacagggtttcaccatgttggccagcctggtctcgaactcccgacctcaagtgatccgcccgcctcggcctcccaaagtgctgggattacaggtttgagccaccatggctggccccatttccttatttataaaatgggcagagcatgaatacctatctggtgggccgtgggaggttcaaatactagaagaagtctggtacacgctgtatgaatcctattggtcattgctatttttattgagtttactatgtacacatccctgggcacgaaggacaagaagacaatttgaacttggaccctgcaaaggtttgcagcctggcagtgctgcaaaagttgtgcacatccatatttatccccagagagaaacatgacaagcaccataaaccagggataaagggagtgattactgatggggaaaagggtgggatccaggaagacttcgcgagaaaggtgtcagcagaaccgcatgtttacagacgagcaggaactggatattcagagggtatgagaaacacactggtgggagagggaacaaatgcacaaaaaaaagaaaatgcaaagtgtatttgggaagtggcaaataattttacttcaattgagtgcactcttaattcttctgctaggctctgtactactcattcattcattcattcagcttgtgtgagcacccatgttcggcagagagttggtcactgcttagacgtccacagtaggtagaggagaaagagcagtcacgaggttgctggagagagccctgaggagagtagccttagggcttccctcttcatgggaccctacacgacctgagcaggggccctgcaatgcccccaccatggccacacaaagttttcagaagtaaggtttattaatgcaattggttattccccttatttaaatattattcctatttctccgtatgcaggtggtaatacaggggccatggacgtttttgggaaccagctaagagttgagttaagacagattttgtgtgggttctgttgaatatacgtatgtggtttacagtcttttctttctgtatagctaggtcaccactagccacagtaactccaaagtgaaaaaacggcttctagaaatactctctcgcccacgatgccaactcacctgatcttgtggcatcaagaggcaggaccagaggcagattcatgatggaagagtgtccccatggtgctggcaccacacgtaggtgggtgggtggtggtgaatccgggtctgaaatgtatgcagccagaaactaaactgtaaaaaagtcctctaaattttatgtgtttctccaaatttgataaaaatctgaaaaccgtatgtgacattaccaataataagttgtgaagctgaaaaaagtcttctaaagcatcaataatacaagagaaattttgacttatcttcctagaggaacgacscaattatttttatcttctttatggtctcaccaggatatggtgcctcttggttgctgaatgacgggcagccacatgctttttctttcctccttctagaataaactctggcttccccagtttccttcctgcactttcttaaatctggctcagagccccacctctaggagagctccaatgatgaacccatctgactgcctgcattagagtccatgttctgtcattgatcagctgggtaacctgaggcaaatcactcaatctctctgagcttctgtttcctcatctgtaaaatgaggacaataccagtgcccacttcacaatcctgtggacaggtataaatgagggaatacagagaaagaacycctagccagcatggagagcacagtaagcctggcactcgatgagacctaataaatggtagctattagtattactattatcaaatgtggttaggaagcacagtgactgcagaaacattcggcagatatggcagaaagcaatttccagtgctgcccagcagacatcagttatttttactagccacacacacactcaggtaaaggcatttcctgcataacatatcttaatagatgcatccgtgatggcactgcagctacacacgcacctgctggcatttctgtgagccgttttgctccagcaggggtgggtgccaccacgactggccccgtcatcctgtcagacctgacaggcatagctcttcacacatcattcttcccctccctgcccctctgccccagatctccgaatctcacatcaaagctgaggctaactcattcacccagccctccttccttctttcttgccgtcacttctttccttcctccctcccrttttcctcacaaatatttgttgtgtctagccgccatggtgtcttctgtgattccaagactttaggagactcagtaaagtttgaaaaaaatttctgaaagggattgacatagggtactaacttttaattttgccaagtaggatatcaacacacacatacacacgcacagagacattcacacactattgccactaattaccatcgttccatcaaagaagtgctatttcagtgtccccaaatagaaaagacagtctttagaagaaaaagaatcatttacatgaaatacatttagtttttaaaagaacacagcattttcctaactttctgattcgtcataagccagtaaaatctctgggtgccagatctcagacaaatgttggagaagaagtgtactaacaataggaataatataatgaatgtttattgagtgccaaatgtggtgtttgatagactctaccatttactaactgtgtgatcttgggcaaggyactgaacctctctgaactctagttccctcactgtaaagacagggatgacgatgcttgctctgcaaagctttccaggggtttctaggcatggggaggacttgtgtggtgctggctgcataagagtcgcctgggaaacttgttaaaattaagattcttggcactacaaggagagaatctgatgcaagaggtctacaatggggtccaargatctattcttttaaaaacagccccctcctccagatgtttctgatgagcagctagatttgctgttgctcacagcccctggcttttgggttggacattctgtctacttgacttatgagagtgtctggcagattgttcctcgcatgatgtattcagaggaaaatcttgggaggtatcttgtttgctgtgttcaggctcccccttcccactctgttccccttctcaacaaatggtacctccatctacttagaaaccccagggttattctgaacacatttcctctcttgcggactctcttatgccgtcaccaaccmatccccaggtcttgaagctgtctgcttctccacctccactgcccctgcctagtctaggtcatcatcatctctcactgccactgcaaagcctcctacctgtctcgtctgaagtgtatgctccacacagtggctkcagtcacttttaaaagacacgattcagacagtatctttcatctgcttcgaaccctgctgtagtgaccaacacacttaagataaaaatctaaagtccttaatgtggcctaaaagcccttgcatggcccggcctctgcccacgcctctggccttgacacgcacctgcctcccttctaattctctgggctctgttagttctccactctctctggcctcaggactttcaagtgtgcccctcctcctgcccacacttttcttcctctatcagcccccttcactgaattagcttctccaaaccgttgagggttccacttaaatgtcactgcctcagggacctatgatgtactaacccctgttttagaattctagcagcatcacactccttttcttcaagtcacttgttgcagtttatgttcatgtttgtttgtgcatgtgtgtttttcaacatctctgtgttccctactagagccaaattctatgaaatataagtatttcgctcaccattatatcgtcagtataatgcctggacacagtacccactgaatagatacatatttattcagtgaatggatgaatgattaaagatgtgaacccacatcactagaagggcaaggtccctcccactttttcttttggttggggtggctgacaaaatgcccaatcctgagagacccttgtcatacacagtacaggagaacatcgagccctgagctagaacatggatgacctgccctgatatgtcataggttggttattttttcagaagtgagcaggcagtggaagaaaggcagattttgcaacagaagcatcattactagttcttgacagggtggttctgggtttcctggagtacatgtgctatgaaaacaggttgctatcagacagcaaaagggccagacatttccttggtgtgctggaacaggtatgggtctgttctgacggacttggattcaacttttggccctatcacttacttgatgtgtgaccttggaccagaagttttacctctctgagcttcagtatattcatccataaaaagggagcagttacttttgcctgttagagtagctgtgaggattaatgagataacgtctgtaggaggcctagcagaatgtctggtacatggtatgtatccaataacaaatacaatctcaccaggctgtaagccttcttcaatcaggggccatgtttgtttttggcttgataacccagtgtctggtacagtgcctggcatgtagtagatgctttaggaagtccttattagtgatttaatacatggtcaaatgggttttactttagtaggatttccctcttccaggaaggattcccgtgtgtaaaaacttcccccttgccaagtactcaaaccaattgatttatttgtgggcaactcaaatccctgtgttttgaaatctcagagctggaagattaatgtgtgtttgtcggggtggctctgtcttgagtcatctctgagaaccttgtgcttgtggaaggtagaaattcgtcagcccccatttgaatgaaagggctggaggatcaaatcaatggagagagggatttctattttgttccaatactatggagaacaaaactgtttctttgaaattgaccttcatttatttggaggggaaagcagttagttcaataatggcttcctggtgccttccagcattttaaaagacagaagaaagatttggagcaaggcaaggttccagtgttttctaaacaactcactaagcccagctactggttggctgcggagcacttcctgctaccggccctgcatcccccaatttcccccactgctgcaatgcacatcctcaatagctcagccacttcttgagaccctgacaaggccttccctaggtgggctggaagttagycttcattttaatgctgggcagctgaagattctctgacatcttgcaaatggctcatggagtaagaaatactgctatattctattccaattatttcctgtccctccctggcctgattccaggggccaaataaagaggtccttgtttggtggagtccattcctgctcctgagtaagtgagcactggtccctggtccaacttggtctgaggccacagggaaagggtggggaggacattggagaggatgtcccaggtggggagagctctggaggagacaagaggccctgctctgcaggcagcccaaccctgcttccagaaataaaaataagagatgaaggaaaacaaatggggcccctgaacaggatcctgtagggggcacagctattttccctctttcccaggagagatcccaacccttctctcccacggagaaaacaaacacagctatggaaatcttgtgccatcctggcacctgaaagtctatcaccaattggaagttgctcctacctgcacttctccctttgccaaacacagtcctcccccacatctgcttcctccccttatgagtgaaaaagttttcacggaaaatttagaatttggaaccttcttcagattccaaagaagttattgttctatatcatgctgcttttgcttgggtgttatttcaactcagagaaagtagaaactcacatctctattttgctggaatgctcttcctgaatcattaagaaaacagtaattaagtaccttctttgtttgaagctcttgagtactttttgaagcccatctcaaactcaagtcctagagtccacattccccacattatctgttaggttttcagggaagaaggatgttgatggggtcggctcagggacaaatcactggaagatctctgggagatcgtcgcatgatagtcggaaagttttcatcgcaaggagaagagaaacaagatagcatcaaggtgkcaagaacctctcactttttattgtgtggaagctcaggacctgagatgctagggggacaaagtctcagaaaggcacagacagaaaggagagagacgatgggggtaatgtgagtaagaagaaagtgagggtgggcttgatgacttgaagagcaagacccagagagaagccacatcatctcacactacgatgtggctgggaaaggtctgagattggcagcatttaaaaccctggcttccagggtgctgggcctgaaggaaactgagaaattttctggccagtgattctcaaagcctggtctgtggactacctcttcagaatcacctggtgggctgattatacctgcagattcctggtatccttctgacttactgaatcctatttgctgggggttcggcccaggcagctaccattgtttatgaagtttcacaagtgattctgatagttctcaaagtttgagatcccttaatctaattcaacctcctcgttctccaggtgtgaggcctgaagcctagagaagcaaagcagcaagcctagagccacagagctaattgatggcaaagctcaaatgggaactctgttgctcctgatcaccagagccgtgttcttcccatttgaatatgctggaagcctccttacctgtttggagctatttcccctgcccctaaaagccaaagcctgcacctttgatccattcctgcatcctgctgaggccttctccttcctgagcatgctctggtcacagcctctgcaggctggaggccaggggcaaaggaagaaagactcaattctcttccaagactttagtaacaggtgtgggattggcaaatgtgtagagaaggagaaaagacacagttataccgaaggggagattggggtttggtttgtactgctcatagctaactttcattgagcatctgctatacaccagatactgtgctaagtccttcctatacattaatgcaaactccatggagcaaatattaatcagccctgttttgtagacgaagaaactgaggctcatacaggagtggtcatttggccaaggtcatatggctaataagaggccaaatcacctccatcagctccatgtacaaccatgatctttgtaatgacccaatgcagtgtgaactgtcatccactgtaaaccgaacaagcctgcaaaagaaccctgagaccttgggaaagaaaagcaagcttccctgcaatggtatgtgatcacgcctggggagtagaactttttcaaaccctttctgcttaacactaaccattgaaaatatttctgaaaggcattagcctgcaggcctgctttagaaaagatgacatggagaaaaggttagacggcttttgaaaatctttttctttctttttaaatggaaactcgatatctgtttgcttcctttctgtttgcatttttctcttgaaagcagtgtgccttcagaatttatagctgtttgagggatttggttatatttgggtctgacctgagactccggtgtgattgcaggcatatgtggtccgcagtatagcagctgttacctctcctgatatcatggcacatgactgtgtcatgataaactccctccattcattttctgtrgtgtcccccagggataggagaaggaatcaaagcagatcagtgcctcagaggaaggacaagggatccccaggccatgtggacagcatgtgacagatgcccccctttaggtttacctgctaaccagaccttggcttcttccttagaaaacatcaggtagccttttgaacaattcagttagtaggaccaccaaacaaaaagaagacgaacatgttttcataagagggggaggacgcactgaattccatcttaccaggatttggtctctgtcagctgagatgagggacaactataatttgattctgggcattccataaatcactagagttagaaacatttttgggtaaaaactaaaaatgtgtgaccctctagtcatcttctctttcacatctcaagctttcaataacttaaaggctggttggggctgtgtggctgtaaaatgctcttattaacggataatgaacgtagtatatctgggtgatagctgtcagtgaagaggggagggagagaatgcagcctctgcaaagctcttgagaagcgtggcttctgctctagccctggaaatgctgaatgaatgctgcctttctgtgtacragctgcctccctgcttcccaaatgccgcgtctgcagtaactacaaactattttgtatgctgcattagtgacgctgccttagccgacacatcattactactgaaataacgccggtgtgatattcaagcccagtgaatatcctttttaattattaaaccgaggctgttgagtgagtcattcctcataccagattttccttccctggttctatttccagaagctagtgccttagcgtgttctactaacacctgagttggtttttagccagctccccaatctgcaaaccckttgcagaacaaacaatattattcaatctccgaacacgcacagactgcataagaaacaaaacccacaaaaaactttagagtaagctcatcagtaaacccaaggtccaaaaatgcccagtccccctgctgctagtccccaacttaccaagcggtagagcgatgaagaagggtagccagcacaagatgaacataccgaccacaatgcccaacgtcttagctgctttcttttccctggagaacttaaaaagtttgacagctatggaactcctggggttgtggcccttggccttggtactgctaagggtgtcctcgtgaaagttcttggaatggatcctcagggtcagctccttggagttggacatctccttcatgactcctgcctctaggttcttggtggttctcttggccactatatagacacggcagtacatgactagaatgaccgccagagggatgtagaaggagcccagagaggagaagagggcatagaagggttcttcggtgaccccgcactccttgtcatcgttgggtgccggctccttccayccaaggagaggcccratggagatgacggtggacaagacccagacactgagcagcgccaagatggccttcctccgggtgaccagcgtgggatactgcagagagtagcgcaccccgatgtagcgatcgatggagatggcgcacaggctcagaatggacgctgtgcagcacaggacatccacggctgcccagatgtcacagaagatccgccccagcacccagtagccgagcacctctagggccgctgagaagggcaggacggtgaagctcaacagcaggtcggccatggccaggttgacaatgaagtagttggtgggcgtccgcaggtgccggttgcaggccacagacaagatgactaggatgttgcccacgatggcaaaraggatgaaggcgcccagcaccaggcccacagagatggccctggtgatgtccagctggggcagtgtggagttgctcgaggtctggttggggccagtgaagttggcatttttcaactctccccagtgggcaggtgctgatgtgttgtggccggtgtccaggtcgggattcatcttagagtccgccctccatagccagggggatgattgggctcggaagggctgcggcgaaggctcctcagctgccctgaaactttgcttcccccgtggtcttcttcccagaggcgccctcctggcgaggagtcatctcccccgggcagcccagcccggcagcacgtctcctgcctgcaccgagtcgctcgctcgcctgtcagagggaggaggaggaggagaggggacgaggcggcagctccaagtttaatggtccacgtcaggcgcgcctggccgggctcgcgggggagcggcggggaggagggggcggcagggccgggggcgcccggcggtgcccagctcgctcgggtctgcggaccgcggcgcgtcctccgcccagcgagcgccgaagagggtctgctttcaatgagccgcttctgggctgactgcacggcggtgacatcaggcgggggagcccggcgccctgactccgcgcggcactagggggcaatgcgggtccagccaaggcgcccgcagccccgacgccgccaccccgcaagccgggaagccagccgcgtcccccgccgctcccagggcgcgccctctgcggggggcggggcgggggcaggggccgcgagggcgggacctgggcgtggagatcgcgggtcacccacccctaggcggcccgctggggttattttccccgctagtcactcttccgtgtcaaaggtgggttgggggctgcttacctttaatagggggctcccggagtgggccccggatttaacgggatatgcaacttgtccagcacctaaaagagggaaagagaattctaggattgggcaggtgggagggacttgagtcggatctgaggccagccctcatccttcatctggctcccctcgccccgtgcaaactctttggccccagtaaaatctggcttctcttcatcctttcattcgctcaggcattcactcatttattcagccgattcttacggagtctccactctctgccctggctctgggcgctgtgaacatagcaactgaacaaaatagacggactcctgccctataggagcgtagcttctcccgacagaagacagacagtatactaaataagcaaatgatgaggtgtgtaatgtgatgacaggtgttaggctgaaaataaagtaaggagggggaaatgcagtggggtgtttgtggggtggatttgaaatgttaagtgggtgcttgggatgtcactgaagtgatatttgaggaaacatgaagggaattgagggaggaagctagctggctatctgggagtgggggtgagggaggtcagagacctggggaagggacgtagaggatcttggttatttgttgagttttttcctttctgtctgatatccatgttggacattcagtcacagggacgcactcccaaaggtgggtgaatggtacttagaagagaaagtatgggccaagaaagaaagaaagaaaaagccaaagaactttatgttagttcacatttatccaacatttattttgtcctagacagtgtgctgagttctttttgcattttctcatgactctcatgagagaaagaatacactcttcaccatttctatttcatggatgagacaccaaattatggggaagtttagctgttcgcccaagttcacaaaggcatggaggagagctgctgggaactgaactcaactgtggggtctctcccaaagttgggtactcagctactgtgtcatacttttcccccggggcaaggtaggggatggaaccactgttatagatggagctgccttttgagtagttaattttggggcctgagccactggtgctgggcagggactcccatgaattgagcgcttactgatagccatgcatttactcagtttctttgagactttacaattctttgagagaagcataaccattgttcattgagagatgagaaacagtggttcagagagagtcagttgattcctgaggtcataggctagcaaatatatggcagagcaatgggcagtggcagctggagattgaaaagtaaagcctgataccttcttttactccagttcacaagcctgcatcttgggtttctcaccttctgctcttgatacttgttataacttgatattcacgggtggggaaaacagaagtcactcaggatgacttacatctaagcttctcaacctagaggtaagctcttaacctctttttatttttattttttgagaagggaggcaggtggttatcatacacgtatcgaaggttttaatttactcccagcaaagtgcacagactccacacatgtgcaaaatacacaatttcagggggtttccctcgggttaagaaatctgtggtagagacagtcctgaaaatggattattttctattataattaaattgccctaagctgtatttgaagatttgataataagagattcacaagtttatagtgatttagatcttcagaagctctcagaaccttggtttgcttatcttcctgtgttggaggtggtgcactagggaaagagacttggcaagatggtcaggagcagagctggttaggaaactctgtttccctggcctacaggacagtgctccttctgctcctgcagccactcatgacctacacagtggggtgtgagactggaagaacttggcagccctctgtcaggggtctttattaaaaggagaggctgtcattggtcctgggtggctcagactagtctgtctgcagataggacctggcttagatgatctttgagatcccgtagctccaggtggtcagcttctcttgctggataaagtggcccccgaaggcacctgctatcctttctctcatgcatcttccagggtaggggtgagagtgaggtatcatgaactcagttcccaccattcccaatgtatcattaagtctaagataatggggcttctcttgagctggtttacttataaggggagagggaggaggaagagaataccagtaacctggcacgtagctggcattagcacaaagacaggggtgtaggggagggtaagggtgggataaaataaagagcaagttccaaatccacattttgattgtggtggcccatttcccacttccctgggcattaatttcaccagctattgaacagccagcaacacaccattgaatttactgaggctgtgtctacataatcacagtaaccagctgcaatgtgaaaactcagcctatcagacatttttctgtggtggcaaaaggccaggatgaaaaaaaaagagcaaatctgagattcagagatggtttatcctcattgtgaaagaaaatagtttgttacctagatgagaacttatgtcttgattcaggtgtcaggatgtggaagaaattattgagccagattgacaagttcaaaatccttgcagatttcagacttgttgtcatttaccagtgtgtttcgtgaaggcaaaacaaagatctcactgtaaggggaacaggtattagccttaataacagccgtgtagcaggaccccacacagcaacctttgctaatggtgctttccttgctgctcctccccttcctttgctagagatgcctcttaacccctctggctgatttttgacccatggacttgaccatttgtttaggtgtcatgagaacacagacgatatttcattttctcggtactccctggggcaaagtcaagcacagagctctgactcactcgacgcttgtggaagaagaatcttttcattatccatcttattgcattagaaacctctgatgttgcagaactcccatttctgcgaaccctccaggggaagctgccactgaagttgacctgtagagaaactgaagctatgggagattcaaggatctgcttaagacatctatgggaggagatctgtcacctgtgatcatgcaatttttcatggtgctctctctagctttcaattcgaccaggcatatagagatgcatgtactctgtgtaagcaccatgctaagtaccgtgggtgaaccaaagatgaatgaaaccaagcaaacaataacctaacactgagctaggtgctgtgggagatgatgataatgctaaagcacctttcagagagtacctactatgtgccaggcactgtgttaggcaatctatgtgcatttactcaaattcacaacaatgcaacggaggaattctctccattttacaaatgaggaaactgacgttcagagaggttctgtgacatggccaaggccattcagtgagtaagtagcattggtattcaaagcattgttgtctggctccaaagcttgcatccttctctctgcaccagactgagattaaaaaaagaaaaaggcagcagaaggttcaatgttagcctgaaggaaataacagcagagaacagaatgtgaccaggctccttagtaaggcagaggtcagggaggggagggaaagggagagctgtctgggagtaaaggttccccagcggagcaccttaggttagtcttccttgccttccaggccagcacttgatctgctgagggagttgagagctaacttggattctaattgcacttctgtcatttaatgtttactatgaccctggtcaggagagtgaagtgatgaagagcctggatcagacacacctgggtttatgtcccagttccactaatttattagctgtgtgttcttgggcaagtcacttaaccactctgggcccagtttcctcacctgtgaaatgaagatcagaatagttcctagctctacagggctatggtgaggatgacatgtgaaaatgtgtgtaaagtgctcagcacagagtaatagtaatactatctgttaggagttagcacttactaggtgccaggcgttgggcccaaagtgccttctgtacattatctcatttaatcctaatgataacattatgaggtaggtactattattattgacatttgatagatgaggaatctgaggcccagagtggttaaacgatttgcctgaggccacaggactaacaagtggcacagctgaaatacacaacacccagtaaatgaggctaaacacaaaaaaggaattggaggagtgaggcatctgctttaggaggtacactagggtctgtggggactcgaagaagaatttttgccccacctgtaccctggtgggaggatgagatgcattctttcttctgggtggggtacactaactacagcaaagccttctcttctacctccaaaggcagcaggtcagaggctcccaagagtgaggaatttcagctccctctgggtaggactgttttctctctggtaattacaacttgtcactctctggtgagcatgcattcccccaacccagaactgccagtcatacagcactccctggtaaggcagagagagctcagtggcagccctttgcagcaggctggtaaagattaactggcaagtcacccaggggttgaaagtcacccaggggctgaatgcacatcacatgtttggggagagcctgggagctggggagtgaggcgggggctggggtgtgaaggcacagggtgccggacggagaatccgaaaggcctgctgtctctgaactagagagcagatccattctctcttatgccttcgtgctattctggtgggacagtgtaaacaggctgccaaaacccacccatgctgctacagaatcgagggtgaaggggagtgtgtgctgccttcttgaatggctctggctgacccttgctggccatgggcttgccactatcactttgcccaaaaatctatggtgcctccagaatttctctggaaaagatctttaagttgcagtcttgtttgaaggtgggcatgcagccgtttgccccatgaccttctcaagatagatgtcactgttcacatcacagatccagggcagggagctgatagagattttactggggcaaaagtcctcccaagcttccttggtattgctactgccaggatctatttcccaaccacacgtcctaaagtcatcaaaggcaaaaaacaaacaaacaaaaaaactgcaaaaaacaaaagacaaagcaaaacaaaaaaacagcaaaaaatacctatggcaataggttccttacagctgacatttcagggccttggtccctctgggctgcactgccacaagtcaggatcagagactacagaagtgtcagaactagaaaactctagagatcatctagttcagagtctgcaaactacaattaatcgatcaaatccagcctagtgcctatttttgcaaataaagttttactggaacacagcttgctgatttgtttgcgtgttgtctatggctgctttcaggttataatggcagagttgagtagctgcaacagagaccgtctgtccggtaaagcctaaaatatttactccctggacctttgcagaaaaaatttgttaacctttcatctagtctaatgctcttaatttgcatatgagaacacagaaggcccagaaagagggagaaatttgtctgaggtagagccagggtcactagccaggagatttgactccatgcccacaacttgcttttgccaccactttcatct

SEQ ID NO: 96171 - DNA, 14292 bp, Homo sapiens
agtgtgctatattcaggagacccatctcacatgcaaagacacacacaggctcaaaataaagggatgggggaatatttatgaagaaaaccaaaagcaaaaaaaaaaaaaaaaaaaaaaaaaaaagggagttgcaatcctaatctctgataaaacagaccttaagccaacaaagatcaaaagagacaaagaagggcattacataatgggaaagggattaatgaagcaagaagagcgatctctcctaaatatatatgcaccgaatacaggagcaaccagattcttaaagtaagttcttagagacctacaaggagacttagactcccacacaataatagtgggagactttaacaccccactgtcattatgaggcagatcaatgagacagaaaattaacaaggatattcaggacttgaactcagctctgaaccaatcagacctaatacacacctacagaaccctgcaggccaaatcaatagaatatacattcttctcagcacctcgttgcactttttttctaaaattgatcacataattggaagtaaaacactcctaagcaaatgcaaaataacagaaatcataacaaacagtctctcagaccacagtgcaatcaaactagaactcaaaattaagaacctcactcaaaacggcacaattacatgaaaagtgaacaacctgctcctgaatgactactgggcaaataatgaagacagaaataaagatattctttgaaaccaatgagaatgaagacacactgtacaagaatctctgggacacatttaaagcagtgtctagagggaaatttatagcactaaatgcctatgagagaaagcaggaaatatttaaaactgacacctttacatcaaaattaaaagaactagagaagcaccagcaaacaaattcaaaagctggcagaagacatgaaataacttagatcagagcagaactgaaggagacagagacatgaaaaacccttcaaaaaaatcagtgaatacaggggctggttttttgaaaagattaacaaaatagattgactgctaaccagactaataaagaagaaaagagagaagagtcaaatagatgcaataaaaaatgatataggggatatcaccactgatcccacagaaatgaaaactaccatcagagaatactataaacatttctatgcaaataaattagaaaatctagaagaaatggataaattcctggacacatacaccctctcaagtctaaaccaggaagaagtcgaatccctgaatagaccaaaaacaagttccgaaactgagacagtaattaatagcctaccaaccaaaaaaagtccaggacaagacggtttcatagccaatttctaccagtggtacaaaaaggagctggtaccaatccttctgaaactaattcaaacaatagaaaaagagggaatactccctaactcattttatgaggccagcaacatcctgataccaaaatctggcaaagacacaacaaaaaaaagaaaatttcaagccaatatccctgatgaacatcgatgtgaaaattctcaataaaagattggcaaaatgaattcagcagcacatcaaaaagcttatccaccacgatgaagttggcttcatacctgggatgaaaggctggttcaacatacgcaaatcaataaatataatccatcacataaacagaaccaatgacaaaaaccacatgattatctcaatagattcagaaaaggcctttgaaaaaattcaactccccttcatgctaaaaactcttgataaactaggtatcactggaatgtatctcaaaataataagagctatttatgacaaacccacagccaatctcatactgaatgggcaaaaactggtagcattcactttgaaaactggcacaagacaagaatgccctctctctccattccaattcaacatagtattggaagttctgggcagggcaatcaggcaagagaaagaaataaagtgcattcaaataggaagagaggaagtcaaactgtctctgtttgcagaagacatgattgtatatttagaaaaccccattgtctcagcccaaaatctccttaaactgataagcaacttcagcaaagtctcaggatacaaaatgatgtgcaaaaatcacaagcattcctatacaccaataacagacaaacagccagccaaatcacgaacgaactcccattcacaattgctacaaagagaataaaatacctaggaatccaacttacaagggatgtgaaggacctcttcaaagagaacgacaaaccactgttcaaggaaataagagaggacagaaacaaatggaaaaactttccatgctcttggataggaagaatcaatatcgtgaaaatggccatactgcccaaagtaatttatagattcaatgctatctgcatcaagctaccactgactttcttaacagaattggaaaaaactactttaaacttcatatggaaccaaaaaagaccctgcatagccaagacattcctaagcaaaaagaacaaagctggaggcatcacactacctgtgtgaatgtatttcaaactatactacagggctactgcaaccaaaacagcatggtactggtaccaaaacaaatatatagaccaatggaacagtacagcggcctcagaaataacaccacacatctacaaccatctgatgtttgacaaacttgacacaaataagcaatggggaaaagattccctgtttaataagtggtgttgggaaaactggctagccatatgcagaaaactgaaactggacaccttccttacaccttatacaaaaatcaactcaagattgattaaataattaaacgtaagacctaaaaccataaaagtcttagaagaaaacctgggcaataacactcaggatataggcatgggcaaagatttcatgtctaaaacaccaaaagtaatggcaacaaaagccagaattgacaaattagacctaattaaactaaagagcttctgcacagcaaaagaaactattaccagagtgaacagacaacctacagaatagtagaaaatttttgcaatctatccaattgacaaagggctaacagccagaatctacaaagaacataaacacatttacaagaaaagaaaaccatcaaaaagtgggcaaaggatatgaacagacacttctcaaaataagacattaatgcagccatcaaacatgaaaaaaatgttcatcatcactggtcattagagaaatgaaaattaaaaccacaatgagataccatctcactccagctagaatggtgatcatcaaaaagacaggaaacaacagatgctggggaggatgtggagaaacaggaatgcttttctgctgttggtgggaatgtaaattagttcaaccattgtggaagacagtgtggcgattcctcaagcatctagaactagaaataccatttgacccagcaatcccattactgggtatatacccaaaggattataaatcattctactataaagacacatgcacccgtgtgtttattgcagcactattcacaatagcaaagacttggaaccaacccaaatgtccatcaatgatagactggataaagaaaatgtggcacatacacaccatggaatactatgcagccataaaaaagaatgagttcccatcctttgcagggacatggatgaagctggaaactatcgttctcagcaaactatcacaagaacataaaaccagacactgcatgttctcactcataagtgcaagatgagcaatgaaagcacatggacacagggaggggaacatcacacaccagcacctgttgggggtgatgggctaggggagggatagaattaggaaaaatacctaattcaggtgaaaggatgatgggtgcagcaaaccaccatgtcacatgtatgcctatgtaatgtaacggcacgttctgcacatgcaccctagaacttaaagtaaaatttaaaaaataaaattaaaaaaataaataaaaatagaaaaaaaacctaaaactttctaatgaattccacaaggtcacaatattcaaaattaacataaaatcatttacatttctatatattagcaatgaacacatgaaaactgaaattaaaaacaccatacaacttatggactctcaaagaaagtaaatcacttagaatcaagacttgtttgctgaaaactccaaaatgttgattaaattgaagaagatttatacaattgaagagacatctgttttcatggatcaggaacctcaaatattataaattcatacatagttttaatttaagtcattaaaatcccagaaagattattttaattttaatttgtttaaaatttttgtgtgtacatagtaggtatgtatatatttatgtggtatatgagatatttttgatacaagcatacaatgcataataatcataatggaaaatggggtatctatccctttgagcagttacggtatgtgttacaaaaaatccaattatacattttcagttacagtaaattattttgactatagccacctttttatactatcaaatactatgtattatccattctttttttttgtactcattaaccatccccagctcccacacagtctccttagtacccttgcaagccacttgtaaccatccttctactctctatacccatgtgttcaattgttctgatttttaaattccaccaataaatgataacaagtgaggtttgtctttacatgactggcttatttcacttaaaataatgacatccagttccattcatgtttcatcctgctaggatgggcatttcttctctggctgggtctggtccaaatgcaccgtccaatgtgctgactctaactaaggccagcagagcttcgctctccactatgacagggaccaaccccattaaaaagtgagcaaaggccataaagaaacacttctcaaaaaaagacatacctgcggccaacaagcaatttcaacatcactgatcattagggaaatgcaaatcaaaaccacagtgagataccatctcccaccagtcagaatggctattattaaaaagtaaaaaagcaacacataccggtgaagttgtggagaaaaaggaacgtttttacatggttggtgggactgtaaattagttcaatcattgtggaagacagtgtggcaactttgaagacctagagaaagaatgccattggactcagcaatcccattactgggtataaacacaaaggaatataaatatttgtattgtaaagatgcatgcacgtgttagttccctgcaacactattcacaatagcaaagacattgaatcaacctaaaagcccatcaatgataggctggataaagaaaatgttgtacatatacactataaaatactatgcagccatcaaaaggaaaaaggtcatgtcctttgcagtgacatggatggagctggaggtcattatccttagcaaactaatgcaggaacagaaaaccaaataccatgtgttctcastgtaagtgggagctgaatgatgtgaatgcatggacacatggggaggaacaacacacactggttggaaggtgaggagggtggtagtagggagagcaaccggaagaagagttaaaggatgctgagcttaatacctgggtgatgggatgatctgtgcagcaaactacattggcacatgtttacctatataacaaacctgcacatcactttaaagtaaaagttgaaaattaaaaaagaaataaggtgaacaaagaaaacaaattaagaagaaaaagaaagggagagtcatgggacttgtcccggccaggtgaaaatcttcagatggttaagaaccagaataaagaaaatgaaaattgatggggttaaaacgaaggtcttaatgcaacactatcaaaggttggatggacaaaagggagccacttctggtcacccgacattaaaaggtccctaaccagttttctgtatttctcccagtttagagaaattttaaaaagctggaaggggcgcagcagctgtgcgtcccggggctattgacctctccacgtttgcagcctagccccagtcagtcagtgccggaggacctcagcagccatgtcaaagccccatagtgaagccaagactgctttcattcagacctagaagctgcatgcagccatggctgacacattcctggaacacacgtgccacctggacattgactcgccacccatagcagccaggaacactggaatcatctgtaccatcggcccagctccctgatcggtggagatgctgaaggagatgattaagtctggtatgaatgtggctggtctgaacttctctcatggaacttatgagtatcagtggagaccatcaagaacatgcgcacagccacagaaagttttgcttctgacccccatcctctaagagcccgttgccgaggttctggacactaaaggacctgagatccgaactggcctcttctgtggggtaactggtaatgggcgccaggagacggggctcctcagataactgcagtgctgctgcactgtagatgtgaacctgaagaagggagccactctcgaaatcttgctggataatgcctacatggaaaagtgtgatgagtacatcatgtggctggactacaagaacatctgcaaggtggtagaagtgggcagcaagatctacgtggatgatgggctttcttctctccaggtgccgacttactcgtgatggaggtagaaaatggtggctcctccggcagcaagaagggtgtaaaccttcccgggactgctgtggacctgcttgccatgccagagaaggacacccgggacctgaagtttggagttgagcagtatgtcgatatggtgtttgcctccttcatccgcaaggcatctgatgcccacgaagttaggaaggtccttggggagaagggaaagaacatcaaagtaatcagcaaaaatgagaatcatgaggggggttggaggtttgatgaaatcctgaagaccagcgacgggatcatggtggctcatgatggtataggcattgacattcctgcagagaaggtcttccttgctcagaagatgatgattgggtgctgcaaccgagctgggaggcctgtcatctgtgccactctgatgatggagagcataatcacgaagctccaccccacccagggtgagggcagtgatgtggccaatgcagtcctggacagagtggactgcatcatgctgtctggagaaacagtcaaaggggattatcctctggaggcagttcgcatgcagcacctgattgccggtgaagcagaggccaccttctaatacttgcagttatttgaggagccccgcctcctggcatgcattaccagttaccccacagaagtcaccgatgtgggcgtcgtggaagcctccttccagtgccgcagtggggccataatcgtcctcaccaagtctggcagttctggtgaccagataccgcccacgtacccccatcgttgctgtgacagggaatccccagacagttcgtcaggcccatctgtaccatagcgtctttcctgtgctgtgcaaggatgcagtcccggaggcctgggctgagaatgtggaccaccgggtgaacttggctatgaatgttggcaaggccggaggcttcttcaagaaggaagatgtggtcattgtgctgaccaggtggtgccctgcctgcagcttccccaacaccatgcgtgttgtttccatgccgtgatggacccagagcccctcctccagcctctgtccctcctggttcccccaacccatccattaggccagcaacacttttagagctcactgtgggctgtaatgtggcactggtgggctgggtcaccagggaagaagattaatgccttgctgaaacatggctggttttagaatctgctcttgggtgggacagcccagagcctggctgcccatcatgtggccttacccaagcaagggaagaaggaggaatgcaggactggaggtccctggagtctatggcaaaagggtgacagcttcctttcctttctgtgctctgttcagttcctttattaaatggatgcccagaggactcccaaccctgtcccagggtcaggaaacagccagcaagagttaggggccttagggcatgaggcagtggtttcagtttaagcagactctggccctggcccatacttgctttcccaaccttctggacctcccctatttgcacctgtccccaccctccactcagctttcctgcagcaaacactatacccttctccttccatttctccccactgctgcagccacctccaggcccgttgttatagagcctacctgtatgtcaataaacaacagctgaagcacacacacacacaaaggctggaaggcagagattacaattaaaaatctaatctgaaactgcctggtgcaagagtatggcagattaatcacgaaaaaaattgacaaaaggaccagggtcgtttgattcaacccttggctgggttttgcacaaagtcttttgcacaagaaagggtacaattaccttggggtgaggaaaagaagtttttcaaactataacataaaaatataagggtttattggattatgaaagttagtatctttgaacacactttatatgaaataattgcatctctttcaactgatggtattatggtaatgaacattgtagattattagggaatgtttcttctacctgctactgtaaaacagaaggcatttaaattcgcccttcaatcaacattatttggacatgccaagtgagaatctgtatgattgcccaagttcacacagtgcagagtagaagccaaagtgctggctggtaatgacaaattatttacttattccacttgagggacatttactgccttagctaaagctacccctatgacacctgaaatccccatgctgtatcaggtgatgtcagatatatattctaatggggaaggcagtgtccagaagaggtttataataaaatgaaaatggattatagaggatcatgctacctggagaatgcaaggaggagatactctcaagcagggatttttttcttccatagttcacttgtaactgcatgaaaaactgttggattctacagtgcctgataaatagctctcaactgaccaaccaagagctacttggttcacggatggcaattccaaggtaaatggacaccatcctctttagaaggctgttactttagaccaaagaaggtaaaaacaggcctgctctatgagctgaattgcatgctgtttttttaacagtgatggaaaaattaaacaatggtacaagcccctgtgttaagtttttactagcccacgggctgtgaccaatagcctgactatatgctcagatatcagggcaatgggagcctggcctgttaaaagaatgcccatatggagcttggctccatggagatttgaggggtgcattaaagtagaacaagtcaatggccatcagaactctcttccaggttcagaaagtgactgaaattgacaagcagatatccccatgtgttctgttgaggtggtcatctgggtccatcagataagtggatatggaggtattgtagcagtgcagagacatgctgaatctagacatgttccttttgcaccctctcaggcacaaaatcccagaaaaactcttccatttctcagcaagagagacagagactgctgattactaccgggcggatttctctggtgggaaggccctgaacataactggcaagtgagactgatgcttatagccctgaagggctgaaagtgggtcttgacaggaatagacaataactctggagtaggcttttgttgtccaatgaacaatgaaaatgctcagagtgccaaaaaaaaaaaaaaaaaacagagaacattgcatggatttggatggctgaccatcaattttttcagaccaaagagcacactgcacagtccacaaattccaacaacaggcagagagatatcctccttagagtaataatttgatggagaagtagaacaggcaattggtttcaattggttgtctaagacaggggaagataaaggaataaagagctggcttgcacgccttcattagtgtgtgctcacactcaacatgaatgggaatgtagtgcccctgttagacttttctgttttattttgttttgttttgtttctggttgatctgggggaagagataatggggaagatgcatgtataatcatgcagttctcaccaagggaggagtacattggtattaacactgtgtatttttttctttcttcccaaattatctcaaaaaatgatttttctcttccttacctgatgcagtgatcttaggaccaggactgcaagaacaagtgctgcaacagcagggatgatttctaaacagaaaactgtaactatatttttaaactttatgtcaaaattcctaaaagcacgatggtggttggttgtgtcttcaccacatctagcaaaattgaggctaacagtgagtgcagctatgttgcctggtggtaaaaatagctcactaattctgcaccctaccctgtctgaatgggagtgaactggatttgtattgctacctgcaatgtagacaagcacagtggtgattccagtgccacttccaaaagtgaaaaagtgtcagtgttaatgaagagaaggggaaatagtagctgagagtaaaaaatgaataaatgggttcttcactgaggaaaatttaatattacattaaaaactcaaaagagtctcagagtaagagataacattgtctcagcataattatcccagatgcctgaaagggtgaagttgtatacttaccaaggtcattcctgcttttggaacctgacaagattgagaggatgcctgcatacttaagtgacctcatcttgggagatattcatacactatgatggactggattaattgttattgattgattgtgatatatatatttgatgtaaaggttccatggtaaaaaaccaggaggtggccctttggtgttatagtatacattggtttttgtccatggttacggactcataactcccacagcccttgttaccatcttttattataatactgggtatgttagaactcaggggcagggccaggtgcagtggctcaggcctgtaatccccgcaatttgggtggccaaaatgggcagatgacttgaggtcagatgttcaagaccagcctggccaaaatagtgaaacctcatctctactaaaaatacaaaaattagcggggcctggtggcatgcacctgtaatcccagctacctgggtggctgagacagaagaattgcttgaacccgggaagcaaaggttgcagtgagctgagattgcaccactgcactccagcatgggtgacagagaaagacttcatctcagaaacaaaacaaagcaaataactcaggggcaggcctctgacctcctgcccttctttcactctaatgtttctctgcctttctgaatgtggatcttaagacccttccatgagaggatctcaccctataccctggaggaagaaatcctgttgtcatgaagcttccataaaaccccaagggggcagacagggttaagggagcttccagataggtgaacacgtggaggtccctggaggctgatgcacccagagaagacatgggaactctatgcctcttcccttatgcctcactctatgcatcttttcatctagtctagcaagtagtctagtcgagcaggtaggtcctcctcagtttactcccattcagacggggtaaggtgcagaattagtgatttatttttaccatcaggcaatatagctgcattcagtgttagcctcaatttttctagatgtggtaaaggcacaacccaccaccgtcatgcctttaggacgtttgacataaagcttaaaagttgtatcctttgcaatattatttataataaaccaataaacataggtaagtgtttccctgagttctgtgagctgctcctgcaaattaatcaaccccaaagaaggagtcatggggattctaatttgaagccatttggtcagaagctctggggacccagacttgcaactggtgtgtggagaggagcagtcttgggaattgaggcctctactgtgggatctgacactctcttcaggcaggtagtgatagaaatgaattagaggacaaccagctgatgtctgctggtgtggggaaaaaccccacacagttggtcacagaagccttcttctgtgtttattattgttgtggtgtgaaaatagaggaaaacatggtttgggagtgttctccctacacggaaggtaggaaagaaagtctttgatcactgataccaaccacacctcctcatccttcagcagtggctgcatggaacagagaagtaatctgtatgctgaagagagagagagcacagaaatagtgagagatcacattgaactcagcactgccctgtcacagggaaaagcaaaattgggctgaactcagctgacccttgcccatgtaggaaatattcaaaccagcactagccagatgggatcactcatctcagctgtcaccaccaaggactaaagggttttggggctctgagtaaacaggacaggcagtctaggacacaagactgccattcctaggtaagtcttagtgcagaactgggctcagagtcacatacttgggcagggtatgcagtctcctgagacacaagccagggcagctaacagagtgcttgaaccacccatcccaaccctaggcagcatacttcatggctgcaaaagagaccattactgtctgcatgaggatagtagaggggagagtgaagaggactttgtcttgcatcttagatatcagctcatccacagtaggatagggcattagtcagagtcatgaggcccttttcaggacctagcttctagatgacatttctggacacaccctgggaattaagggaatccactgccttgagggaagaatgcagtcctgtcaggacccatcacctgctgactaaagagccctcaggccttgaataaccagcactgatatccaggtagtacaccatgggccttggctgatactctgagatgtgctggcttcagtaggggctaagcacatttccagctgtggtggctatgaggaaaggctccttctgcttgataaaagaggagggaaatgtaaaagggacttcatctagcaccttaggtacaagcgcagtgacaggagggtagagcatcaagtgggctgttggagtccctgattccaagtcttgttccagagccaagcatttctggatttgccctgggccagatgagagccaatcactctgaaaagtgaatcccaggcaagatagcattcaccaaaagctagtgaaagagcccttcggccttaagtgagctttggtggtatagcctgacagtactcatgattctttggtgatggtggccatgggttgagacttccctgcctgtggaaagggagggaagagtgaggactgtgtcttgtggtttgagtgccagtttagctttggtaaaatagaacaccaggtagacttctaaggtatttgactccattccatagctcctaaagagcatatttagatccactaagggcctgggaaatcttgccatacttaggggaaggacatgagcttggcttcctttaccacctgctgattgtagaaccccaacgcattgagtgaagataggcagtatccatggagtggttacagtgggtctggagtaaaacccagggctctgctggcttcaggtctgacccagtgcaatcctagaggtgctggaaattgggctgcttatgtcacaccaccaccacctccaggtggctcaaaaaagagagaaaggctctgtttgtttgggagaaagtaagggaagaaagcagagtctctgcctgataatccagaaaattctttttgatcttatccaaaaccatcacagtggtacctctgtgattctacaagaaccacagcattactgggcttgtggtgaccccctaatgcagatatggcttagatcacaatacccaattccttttaaatatctgaaaagccctcccatgaagaacaggtacaataaagttcagactgcaaagactacagtaagtacataaaatcagaaattctggagttgaaaaatgatgcactgaagaatgcatcagagtctcctaatagcagaattgaccaatcagaagaaagaatgggtggtcctgaagacagactatttggaaatgcacagtcagaggagacaaaaaagaaaggagtataaaaaaataaagcatgcctacagaatttaaaagtagcctcaaaaggccaaatctaagagttttgggtcttaaagaggagctaaagaaaaaaatagaaatagaaagtttattca

SEQ ID NO: 96172 - DNA, 402822 bp, Homo sapiens
  misc_feature (1)...(402822): n = A,T,C or G
ctcctggcctcaagtgatctgcctgccttggcctcccaaagtgctgggatatcagatgtgagccactgggcccctcctaaaatgggatttctttcgcttccttgtaaaatggtggcaaaccctgcttataagtgcatgtgcatgtgtattctttttactgtcacagactcaaattgcatcgaactagtggagcttgttaaacccttactagttacacgagactaggcaattactgaaattctctgagcctaccatccctcacatataaagtgaggatgataataccgtagcagctgtctttacactggggtatgcctagccctgaaggtatgtcttagtccatttgggctgctataacaaaagtatcatagactgggagacttataaacaacagaagtttgtttcttacagttttgtaggctaagaagtcctgttacaggtagaaggttttcactttaagttgcccaggttcttggcattttgagcaaagaattggacaaaacgcacagcaaagcaaggaaaaaatgaggcaacaaaagcagagatttattgaaaatgaaagcacgctccacagtgtggaagtgggccgagcaagcttttcaagcgcccccatacagaatcttctggggtccaaataccccctagacgtttcccattagctatttggtgttcaccccatgtaaataaagtggtggcccccaatcagtctgattagttgtagaaagcaaccaatcagaggctgaagtgatgttacaaagttacactcctatgctttcggcagtcaatcagaggtactttcaattttccatctgcccctcagaaaaggtgggagtttgcaaagggagtagcttctggtccttttgttacttaggcgtggaaagttgggattttcctttcaatttagttataggaagtcagtgtgaaacggccttaggttccctgcctccagaccctattcccctgcctcagtgccacatcaaggcatttgcagattcagtgcctgctgaaggcctgcttcctgctttgtatactgctgtcttatctctgtcctcacatggtggaagggataagggagctctctcaggcctcttttacaagtgcactcatccagctcatgaaggctccaccctcatgacctaaccaagtcttaatgccccacctcctaataccattaccttgagggttaggatttcaacatataaactgggtgaatacaaatactcagtccagagcaaggcacatggaaactgtccaacggctttgaggtcaccaggtagccgaaagtgaaccaatttccggatacgcaattttctttagcactttttctaaaaatcatttgtctgagaactcacctccagttttcctttcctacctcccttgctcaatatctcaaagggaaagcataccttttaaacatcaagaatcttactatggtgctttggcccaaggtataaaaacccttggggctaaacatagaaagaatttaaaatattggtgttcaggaatcttctttaactcaatgccctgaaacctacctctttcttaaccatcttactaagagatgcagttccaataaacttttttttttttttttttgagagagagtctcactctgttggctggagtgcaatggtgtgatctcggctcactgcaacttccgcctccggggttcaagtgattctcctgcctcagcctcctcagtagctagcattacaggttcactccaccatgcctggctatttttttttttttgtattttcgtagagatagggtttcgccatgttggccaggctcatctcgaactcctggcctcaagtgatctgccggcattggccttccaaagtgctgggattatagaagtgagccactatgcccagccccaataaaattttatatttaataataattacaatgtgttcgcattattttactctattatgtatgcttaataatcacagaagctttttaatccatgaagccttatggtcacaaggaaataaaaagaattaactttctatttatgagctgtgcatggtggctcatgcctgtaattccagcaccttgggaagccaaggcaggagaattgccttggcttcctgggctcgggagttagagaccagcctgggcaacatagggaggccctgtctctattaaaaattaaaaaattagtagggtgtggtgacgtgcgcctgtagtcccagctacttgggactgaagtgggaggattgtgtgagcctgggaatttgaggctgcagtgaactgtgattgcaccattgtactccagcttgtgtgacagagtgagacccggtttaaaaaaaaattatgtttgtgagcatatttttgttgcagagaaattcaatatggtgatcaatagactttaagtatggaagtatgatggttggccaggtacggtggctcatgtctataatcccagggcttggggtcgaggcaggaggattgcttgaagccaggaatttgagaccagcctggacaacatggtgagaccctgtccctacaaaacaacacaacaacaacaaaaaacattagccagacatggtggctcaggcatatactcttaactacttgggagtctgagatgcgagaatcgtttgagttcaggagttcgaggctgcagtgcacttaagattgtgccactgcactccagcctgggtgacagagtaagactgtttaaaaaaaaaaaaggataaaatttctgtggggaaaacgtatagataattgatttgaagaagaaaaaatgaacaatagaataaattttttgaagattcaagatgtgtttacactttgttttgctttgtgcgtttgatgatggatgtcagattgaatacttttaaaagagtgatgtaacagttttattttaaaacgtcaatattcctagtatgttagaaattaaactttttgcaactatttaagcataatgaaaaaatttagatgttaggccaggggtggtggctcatgcttgtaattccagcactttgggaggttgaggtgggtggctcgctcgaggtcaggagttcaaggccagcctgaccaacatgatgaaacccaatctctactaaaaataaataaataaataaagcgggcatggtgacatgtgcctggaatcccagctactcgggaggctgaggcaggagaattgcttgaacctgggaggtggaggttgcagtgagtggagatcgtgccaccacactctagcctgggtgacagagtgagactctgtctcaaaaaaataaaataaaaaaaagataccacttaaaaacgaaggagtacatagctcccaaaattcttttaggggttatgtgaacaaaattttaaagactctcagtgacatagggttagctgtgagggtcagggcagaaattgtgcaaagcaattaagatagtgcttgatgaatgcaagtattatctgaagaactgagtttttttttttttttttttttttttttttttttttgagatggagtcttgctctgtcatccaggctgcagtgcagtggcccaatcttggctcactgcaacctctgcattctgggttcaagcgattctcctgcctcagactcctgagtagctgagattacaggcacacaccactacacctggctaattttttatttttaatagagatggggtttccccatgttggccaggctggtcttgaactcctgacctcaggtgatctgcccgccttgacctcccaaagtgctgggtttacaagcgtgagccaccacgccgtgtgagttctaattttagccctgtttcttcttcggtatttggtctagggaatttgttatttctgtgctttagtttcattgtctagataaaggataacacagatgactgtaaaacactttgagtataggaactcagatgagtatgattgaatctaacatcaataatgtcaacagcagctgggcacggtggctcacacctgtaatcccagcactttggtgggggctgcagtgggtggatccctctagcccaggagtttgagactagcctagccaacatggtgaaaccccgtctctacaaaaaaatacaaaaattggccaggtgtggtggcatgtgcctgtagtcctagctactcaggaggaggctgaggtgggaggatcacctgagcccagggaggtcgaggctgcagggagccgtgattgagctattgattgcactttagcctgggcaacagggtgagaccctttctcaaacaaaaaaatacataaataaataaaattttaaaaaatgtcaatggcaatttttatagtgatgaaaatatatgtataggctttataaataaaagtatatagcaggtgttcaaaaaatgcttgttaaacgagtgaatgaatgctaaaaggaaacttactagtgtgaaagaccatatacccattgaatgggtaccttcccttagtacctgcatttttcaacccatggtgcatttaaagctcattttggacattttcccataaattaaccttaaagataaaaagagtaagaaacaaaactttcccctgagatgtggctacttatttattttcagagggcgttttctcattgccattctgctatatagtgtagtggtcaagagcactacctctagagccagccaggctgggctcaagttcaagtgctgccatttaactagctgtttgtccttcggcaagtcacttaaactctctttgacccagcttctccatctttaaatgggtataataataaaaccatcctcatagggttgttttgaagattagtgagatgggcgataggttgtgtggtgggtagaataatgtttcctccttcacagatgtccatgtcctgaaacctgtggctacgttatcttatgtggcaaaatgaaatttgcagatgtgattaaggatgatgtgatgggggagattatcctgtggacccagtgtaatcataagggtccttaaggggaggcatgagaatcacagtgatgtagcatgagaaagacttgactggccagtgctagctttaaagacggaggaagggagctatgagccaaaggatgtgagcagcttgagccggaaaaggtaaggaaccagattctacccctagactatctgaaaatgaacacaacccttctaacatcttgatttgatcccagtgaggcccatttctgatttctgccttctggaactgtagattataactttatgctgatttaggacatcaagtttgtggtaatttgtcacagcagcaacaggaccctaattcaggtgggnnnnnnnnnnnnnnnnnnnnatctctttgcccacgcacaaactattttttagtttttcgagcctctacctacccttagtctcaagacagctgcctttaaggtaagctgcaagacaatttataacatcctattcttagactttccacttacacatggaaaatcatatgcattatcggcgtctgccacaaaagccatgctctgaggtcctattcaggaaaatattaactctgaattatggcctccctttctttggcagggggcactgagcttcacggagaccctagagtaggaatcaacccttcaggtcgaaggcccaagggaattagagcacttagagcaggagacatgggaaaagaaagaggaaaagaagttggtaggtccgaaggaggctggaaagaggggaaggcaaaagaatacacaacccagccgaatcatgggaagtgagagatggcttcctgcaatctagtcttgcgggttcttgctctagtttcggaaacttcccccgcagagtccagcgccgcgcacctgccccttggggccggtccctgcgcaggagcctgcggcaggctgggaatgccgttctgggagagcagcctcccaggcggggtggtggggagactgcagggaggagtcttggggagtgcaaacggaaagactacatctcccaggccgccacgctttccagctggagtcctagggcgctgactgctccccagtttccgtagggaagcgctgggctaccgcggctattgtgcgtcgcgctctcgccctcctcttcccgctgcagtgtctatggagcgaggctacgtttcattgccgccctggcttaacccttccggcgcctaaaaggacggccggccggccggctcccttgcaccaggaagaagtcttagcagcyagcgggccytggtcaggaaactctaaggtacaaggaaaacagttgaggaaggagccagagcgctccggtttggtcctcgggcttcgctggggcggggcgcaggcgttggctttaagaaaggggaggggacagtgcaatccgggttgcccgcggagttcggccaaggaagtcttccgctcgctccggagcgaggagcctgtagagaggctgttcccagctccagctctaacctcgcctacaccttgggcgggcccaagtgtcacgtttgcaattgctcaggaaggatccggcccgtctccggaggcaagtcgggctgcggtttttgctgcttatctgggaaggcgatgcctaagggacatgctgcttgctaggcagcaccctgccgggatccgactgcgatagttagctctccctggccctgaagccatcgccggggcgcctgttctctgtccggaccagccagcgctcctcaggagtctcactgaaacaggtacctgtcctccaaagggacggaggctatgagcttccttaagcgggtcgcgcgctcagtccgtcccctctacttcctctactgtgccattgatgctctcggtctttgtgtctttcccctttccccctactcccggccatcagaaccatgggtcatcccccgctggagttcagcgactgctacctggacagccccgatttccgcgagaggctcaagtgttatgagcaggaactggagaggaccaacaaattcatcaaagnnnnnnnnnnnnnnnnnnnnnnnnnnnnnnnnnnnnnnnnnnnnnnnnnnnnnnnnnnnnnnnnnnnnnnnnnnnnnnnnnnnnnnnnnnnnnnnnnnnnnnnnnnnnnnnnnnnnnnnnnnnnnnnnnnnnnnnnnnnnnnnnnnnnnnnnnnnnnnnnnnnnnnnnnnnnnnnnnnnnnnnnnnnnnnnnnnnnnnnnnnnnnnnnnnnnnnnnnnnnnnnnnnnnnnnnnnnnnnnnnnnnnnnnnnnnnnnnnnnnnnnnnnnnnnnnnnnnnnnnnnnnnnnnnnnnnnnnnnnnnnnnnnnnnnnnnnnnnnnnnnnnnnnnnnnnnnnnnnnnnnnnnnnnnnnnnnnnnnnnnnnnnnnnnnnnnnnnnnnnnnnnnnnnnnnnnnnnnnnnnnnnnnnnnnnnnnnnnnnnnnnnnnnnnnnnnnnnnnnnnnnnnnnnnnnnnnnnnnnnnnnnnnnnnnnnnnnnnnnnnnnnnnnnnnnnnnnnnnnnnnnnnnnnnnnnnnnnnnnnnnnnnnnnnnnnnnnnnnnnnnnnnnnnnnnnnnnnnnnnnnnnnnnnnnnnnnnnnnnnnnnnnnnnnnnnnnnnnnnnnnnnnnnnnnnnnnnnnnnnnnnnnnnnnnnnnnnnnnnnnnnnnnnnnnnnnnnnnnnnnnnnnnnnnnnnnnnnnnnnnnnnnnnnnnnnnnnnnnnnnnnnnnnnnnnnnnnnnnnnnnnnnnnnnnnnnnnnnnnnnnnnnnnnnnnnnnnnnnnnnnnnnnnnnnnnnnnnnnnnnnnnnnnnnnnnnnnnnnnnnnnnnnnnnnnnnnnnnnnnnnnnnnnnnnnnnnnnnnnnnnnnnnnnnnnnnnnnnnnnnnnnnnnnnnnnnnnnnnnnnnnnnnnnnnnnnnnnnnnnnnnnnnnnnnnnnnnnnnnnnnnnnnnnnnnnnnnnnnnnnnnnnnnnnnnnnnnnnnnnnnnnnnnnnnnnnnnnnnnnnnnnnnnnnnnnnnnnnnnnnnnnnnnnnnnnnnnnnnnnnnnnnnnnnnnnnnnnnnnnnnnnnnnnnnnnnnnnnnnnnnnnnnnnnnnnnnnnnnnnnnnnnnnnnnnnnnnnnnnnnnnnnnnnnnnnnnnnnnnnnnnnnnnnnnnnnnnnnnnnnnnnnnnnnnnnnnnnnnnnnnnnnnnnnnnnnnnnnnnnnnnnnnnnnnnnnnnnnnnnnnnnnnnnnnnnnnnnnnnnnnnnnnnnnnnnnnnnnnnnnnnnnnnnnnnnnnnnnnnnnnnnnnnnnnnnnnnnnnnnnnnnnnnnnnnnnnnnnnnnnnnnnnnnnnnnnnnnnnnnnnnnnnnnnnnnnnnnnnnnnnnnnnnnnnnnnnnnnnnnnnnnnnnnnnnnnnnnnnnnnnnnnnnnnnnnnnnnnnnnnnnnnnnnnnnnnnnnnnnnnnnnnnnnnnnnnnnnnnnnnnnnnnnnnnnnnnnnnnnnnnnnnnnnnnnnnnnnnnnnnnnnnnnnnnnnnnnnnnnnnnnnnnnnnnnnnnnnnnnnnnnnnnnnnnnnnnnnnnnnnnnnnnnnnnnnnnnnnnnnnnnnnnnnnnnnnnnnnnnnnnnnnnnnnnnnnnnnnnnnnnnnnnnnnnnnnnnnnnnnnnnnnnnnnnnnnnnnnnnnnnnnnnnnnnnnnnnnnnnnnnnnnnnnnnnnnnnnnnnnnnnnnnnnnnnnnnnnnnnnnnnnnnnnnnnnnnnnnnnnnnnnnnnnnnnnnnnnnnnnnnnnnnnnnnnnnnnnnnnnnnnnnnnnnnnnncaggagatgttggttgcagtgagccgagaccgtgccattgcactacagcctgggcaacaagagtgaaactccatctcaaaaaaagaaaagaaagtggtagtgtgttggtaactgctgccagctggtatttcttgtgcagcccttctgatttgccctgtggagtcggtgcttttccttcacatgctctctgcccacttttggtcagaatatgtacactgtcgaagttcctgcaggtcatttgattgtgtttgatcttttaatgatttgtcttattgtggcctgaccaagagtaaactcctagtagtatctgaaatgctgatccttaagaggttaaggatatgcaggttgtgctacataagtagaaaggtgagagttcacggaaaggaaaaggaggaatgtttcagctttgttttgttttgtttatatattacagtaaactgcttggtgctgtgtccccagtaaaacgaatctcatcataagccctaggaacagaatggctttgtgaagtggatggtaactaaaagcatgctaaaaatcaccagctaaggcatatcagagagattaagatttataagaaaaaaagtagttcaataaaacatggtggaagagcaaaagtttcataagctaggggcaagtaaaggtttttattctttccttttctttctttttttttcaatttttgtttttgagatgaagtcttgctttgtcgcccaggctggagtgcagtggcatgatctcagctcactgcagcctggatctcctggtttcaagcgatcctcctgcctcatcctccccagtacctaggactataggcatgtgccactgcgcctggctaatttttgtattttttggtagagatggggtttcaccacgttagccaggctggtcttgaactcctgacctcaggtaatccacccaccttggcctctcaaagtgctgggattgcagggatgagccaccacgcctggcctctttccttcttttctaagactcaaagtggtaagagtcaacagttaagcagatctaaaattttgcatatgagcagaatatccaagagatnnnnnnnnnnnnnnnnnnnnnnnnnnnnnnnnnnnnnnnnnnnnnnnnnnnnnnnnnnnnnnnnnnnnnnnnnnnnnnnnnnnnnnnnnnnnnnnnnnnnnngctccttgaatttgtggtagttttctgtttctgagtatacacagaagccaaaaataggacaggtagaaaataaaacccagcagctaacccattctccatttctttccattcaattgcatggattctaaaagtctgattagctagaggcaaaggtaggatgtttcctactgtcttgaccacagtgatgtttatactcccactctccttcctcacactgtgccagcggagcgactttctgaaagtaggtagggtggaagcaaaacaaagttatgttcttgctctgtgttgaggaaaaaggaaaaaggaacactggaatcggagttagaagatcaggattatgttcttggcttctccatcttgggatctaacacaaatcacttttttttttttgtttttttctgagacagagtcttgctttgtcacccaggctagagtgcagtggcatgatcgcagttcactgcagccatcgccccttgggttcaagtgatcctcgtgtcttagcctcccgagtagctgggactacaggcacacaccaccagatctggctagtttttgtgtttttagtagagatgggtttcaccatattggccaggctggtatcgaactcatggcctcaggtgatccatccactttggcctcccaaagtgctgggattacaggcatgagccattgcacttggtcccacaaatcacttttcatttttcttgttttagagacagggtcttgctttgttgcccaggctggagtacagtggcacaatcatagctcactgtcacctctaattcctgggctcaagtgatcctcccacctcagtctccccagtagctggactccaagtacacgccactatgcctggctaatttttaattttttttagaaactgggtctcactgatctcgcccaggctgatctggaattcctgggctcaagcaagcctcccaccacggcctctcaaagtgttgggattataggcgtgagtcaccacacccagccaaatcacttttttttggagacagagtcatgctctgttgcccgagctggagtggagtggcatgatctcagctcactgcaacctccgcctcccgggtttaagcaattctcgtgcctcagcctcctgagtagctgggattacaggcacctaccaccacgcccagttaaattttgtattttttttagtagagacggggttttgtcttgttgcccaggctggtcttgaactcctgagctcaggcagtccgcccccccttggcctcccaaagtgcaagaattacaggcatgagccaccgtgcctggccccaaatcacttttacttcgtctgtaaaatcggggtaattatacccacctcccaagattgttgtgaggctcaaagaaattaatggattatgaaaatgatctgtaaatggaaatggctaaacaaagttgttgataatnnnnnnnnnnnnnnnnnnnnaaacaaagttgttgataatacatcttcggattcttaatatatctgttggtgaatgtgtcattttctgtaggtttctgaagggaaatgcataagcagaagtagttggaactcctcttgcttaaatgtgatctcttcataattgttgaagtgcaaggtgattataacttaaactaatggaaaataaaaataccatccctctgaaaggtgactatattgccaacttttctgtttgtcctttatttttatrttggtagcttcagtccccaatgttgtttgaatatttgctaagccctgaggctaggcattattcagaacaagtgatgtggcccctgctcatatcacaaagcagcatgacacatctaataagtgttatatatagttagcgaatgcatactattcattcaatacatacttggacacataccgtgttcaagtcattgttcttggagctgtcaggcatacagaatgagtcacagatggatactgctttcaagaggttcttaggctggtgggagagacaagacgtggatagaaatgattgtcatataaggtagtagatacagatgagagccataaaagtgggaacaggtggacctgatgatatatgacatgagagggaaagctgatttcccagtgggagcacaagggagaagccaaggaagaagcaccatcagagttgggtagaattaataacactatcacttgtttagctgttcccatgtgtcaggcattacatcttgtaacagatttttgagataaggattattattcccattttttagatgaggaaactgaagttcagatgagttaagtaactttctcaactagtaagggcaagtgtctgaattagaacctagacctgactctaaaggccctgcttatcctactgcatgacactattcaggacagggcatttcatgtagcgggagtgacacagaatataaaggggacagcaaataatttgagtcatctggggtataggcaacagaaagggaggtttgggctcctgaggagctggattacagccaccatgcccagctaatttttgtatttttagtagagacaggatttcaccatgttggccaggctggtctcgaactcctggcctcaagtgatccaccagcctcagcctcccaaagtgctgggattacaggcgtgagccaccacgcccagcctacattcttttttttttttttaattgtgctagctaaataaaacattttcataggccagattcaatcaggttgcaacccctgagctaaatgatacagctctacaagtctggctcttggactctaatgggctaggaaaatagaggatgacagtcttcagataggggctttcctggggaagcaacaatggatactctttgcaaatgagcagaggcaaaatgatggtataatgggacaaaaccctggacatggcatctagatacctgagtaaggtgctggttctgttatgggatctgtgaccttgataagcgatttcactgggaccccagggtctgtggctttacaaagatggggctggggtgggaggtttataaacccactttgagctctaacattctatgacttactatgttttgcatggcatattatagtttcatgatttgagaaaggaatgactaacccaattacaggaccttattttacgcttacataaaatttcacattattttagtgtaaatgacagtatttaatttaacaaaaaattaaaacagaattttttgttgttgttgttgttttttttttttgagacagagttcactgtgttgcccaggctggagtgcagtggcgcaatctcggctcactgcaacctccgcctccggggttcaagtgattctcatgcctcaacctctcaagtagctgggactacaggcgcatgccaccatgcccatgctaagttttgwaatttttttttttttttttttttttagtagagatggggtttcaccatgctgtccaggctggtctcgaactctcgacctcaagtgatctgcctgcctcagcctcccaaagtgctgtgattacaggtgtgagccgctgtgcctggcctaaaagagaatttctaaatacccttttccaaaccaaggataatgtgctttataagtatgtttttgtttttttttttttttgttttaagagacagagtctcactctgtcacccagagtggcatacttttaagtacagtggcaccatcatagctcactgcaacttcgaactcctgggctcaaaggatcttatcggactcagcctcctgagtagttgggactacaagcacacactaccaatcttagctaactaatttttttttttttttttttttttttttnnnnnnnnnnnnnnnnnnnnnnnnnnnnnnnnnnnnnnnnnnnnnnnnnnnnnnnnnnnnnnnnnnnnnnnnnnnnnnnnnnnnnnnnnnnnnnnnnnnnnnnnnnnnnnnnnnnnnnnnnnnnnnnnnnnnnnnnnnnnnnnnnnnnnnnnnnnnnnnnnnnnnnnnnnnnnnnnnnnnnnnnnnnnnnnnnnnnnnnnnnnnnnnnnnnnnnnnnnnnnnnnnnnnnnnnnnnnnnnnnnnnnnnnnnnnnnnnnnnnnnnnnnnnnnnnnnnnnnnnnnnnnnnnnnnnnnnnnnnnnnnnnnnnnnnnnnnnnnnnnnnnnnnnnnnnnnnnnnnnnnnnnnnnnnnnnnnnnnnnnnnnnnnnnnnnnnnnnnnnnnnnnnnnnnnnnnnnnnnnnnnnnnnnnnnnnnnnnnnnnnnnnnnnnnnnnnnnnnnnnnnnnnnnnnnnnnnnnnnnnnnnnnnnnnnnnnnnnnnnnnnnnnnnnnnattttataaaattagaggcttggtgcaataatatttacggttctttctggttttattattttgttttctggctaccaccatgctagtcaaatggtcaaacaatgtgaattgattctatcataaactttaggagccaattcatcttcactctgggagaataggcaaagggaaaatccaagtagtatgtccagcatgagtagatgacttgctgacctacttgactrtcctctcattgaatgcttcttggtaggtctccacctgattcccttcagttctgttctgaatagytctatactgagggaccccaaagcttttaatccctttgggatgggtgtagtgccatggtgtgcgggaggagttggtgatataatatgcattcttgctcagcaggtatcttgtcattttcccagtgatatttaatcagtgcctctgagcacatggagttattttacatcttctccagagtaactcagatcaatataatgggtatgtcatttggtactgctgttagtattaatagatgtgaagcaatgctaaatggaatttgacagaggtgatatattgccatattcattggagttcctcacaagaccagattccagagtagctggactgtggctgctgtgggaactaggattgaaaagtgaaccaagccaacctttcagtgtgtccatttataagaaactattcttatttgggagtagaggatggtgccaggctggggtagggaagattttagcttgacttgcctgttaagaaaagttttccaatcagactctagagtgatgaaggaactttacctttcagcctcatttttatagccttattttttttaagcatagccaaaaccttttgtttaatctggcatctgtttctctaatcagttactacagaaatttcctaaaagcctatgaggatctggaaagttacacacttttccatgggagtaccctggaaatcttgagctgattttattttctagtggagtggaaggccctcatgatcctttaccaggcttgtatcaagtgctaaaccttgggcaatgtaaaggcaattcagtttaattcaagaaggttttactaagcacctactatgtgtcaggtactgtcctggaaactggggatacagtggtgaataagaatactatagactctgcccttttggaacatatgttaaatatcaaattaccctcttaaataattaattacaattgtgagaagagtatgaagaggaaattcagtgtgtgatttttttttatttttatttttatttatttatttattctgagatggagtctagctctgttgcccaggctggagtgcagtggcacgatcttgactcactgcaacctccgcctcctgggttcaaacggttctcctgcctcagcctcctgagtagctcggattataggtgtccgccaccacgcccggctaatttttgtattttcagtagaaacggggtttcaccatgttggccagactggtgtcgaactcctgacctcaggtgatcagcccacctcggcctctgaaagtgctggaattacaggcgtgagccaccatgactggcccatagtagaattatttataatggccaaaaagtggaaacaacctctaaatgtccatcaactgaaaaatggataaataaaaggtagtatagacatacaatggaatagtatttggcaataaaaagtaatgaagtactgacacatggtacaataaggatgaactttgaaaaccttaggataagtgagaaaagtgttataaatgactacctattgttcatgattcctttcatatgaaatgtccagataagcagatctattagagagagtatcaggttagtgattgctaagctggggggttggaatgtattgggactgctaatgggtaaagggtttctatttggggtcatgaacattttttaagattggattgcagtgatggttgtacagctctgtgagccattttatggtgtgtgagtcgtatctcagagctgtttgaaaaaaaaaaaaacattgtgtttggagaaacaggtgacaggcgcttgtccttatatacnnnnnnnnnnnnnnnnnnnnnnnnnnnnnnnnnnnnnnnnnnnnnnnnnnnnnnnnnnnnnnnnnnnnnnnnnnnnnnnnnnnnnnnnnnnnnnnnnnnnnnnnnnnnnnnnnnnnnnnnnnnnnnnnnnnnnnnnnnnnnnnnnnnnnnnnnnnnnnnnnnnnnnnnnnnnnnnnnnnnnnnnnnnnnnnnnnnnnnnnnnnnnnnnnnnnnnnnnnnnnnnnnnnnnnnnnnnnnnnnnnnnnnnnnnnnnnnnnnnnnnnnnnnnnnnnnnnnnnnnnnnnnnnnnnnnnnnnnnnnnnnnnnnnnnnnnnnnnnnnnnnnnnnnnnnnnnnnnnnnnnnnnnnnnnnnnnnnnnnnnnnnnnnnnnnnnnnnnnnnnnnnnnnnnnnnnnnnnnnnnnnnnnnnnnnnnnnnnnnnnnnnnnnnnnnnnnnnnnnnnnnnnnnnnnnnnnnnnnnnnnnnnnnnnnnnnnnnnnnnnnnnnnnnnnnnnnnnnnnnnnnnnnnnnnnnnnnnnnnnnnnnnnnnnnnnnnnnnnnnnnnnnnnnnnnnnnnnnnnnnnnnnnnnnnnnnnnnnnnnnnnnnnnnnnnnnnnnnnnnnnnnnnnnnnnnnnnnnnnnnnnnnnnnnnnnnnnnnnnnnnnnnnnnnnnnnnnnnnnnnnnnnnnnnnnnnnnnnnnnnnnnnnnnnnnnnnnnnnnnnnnnnnnnnnnnnnnnnnnnnnnnnnnnnnnnnnnnnnnnnnnnnnnnnnnnnnnnnnnnnnnnnnnnnnnnnnnnnnnnnnnnnnnnnnnnnnnnnnnnnnnnnnnnnnnnnnnnnnnnnnnnnnnnnnnnnnnnnnnnnnnnnnnnnnnnnnnnnnnnnnnnnnnnnnnnnnnnnnnnnnnnnnnnnnnnnnnnnnnnnnnnnnnnnnnnnnnnnnnnnnnnnnnnnnnnnnnnnnnnnnnnnnnnnnnnnnnnnnnnnnnnnnnnnnnnnnnnnnnnnnnnnnnnnnnnnnnnnnnnnnnnnnnnnnnnnnnnnnnnnnnnnnnnnnnnnnnnnnnnnnnnnnnnnnnnnnnnnnnnnnnnnnnnnnnnnnnnnnnnnnnnnnnnnnnnnnnnnnnnnnnnnnnnnnnnnnnnnnnnnnnnnnnnnnnnnnnnnnnnnnnnnnnnnnnnnnnnnnnnnnnnnnnnnnnnnnnnnnnnnnnnnnnnnnnnnnnnnnnnnnnnnnnnnnnnnnnnnnnnnnnnnnnnnnnnnnnnnnnnnnnnnnnnnnnnnnnnnnnnnnnnnnnnnnnnnnnnnnnnnnnnnnnnnnnnnnnnnnnnnnnnnnnnnnnnnnnnnnnnnnnnnnnnnnnnnnnnnnnnnnnnnnnnnnnnnnnnnnnnnnnnnnnnnnnnnnnnnnnnnnnnnnnnnnnnnnnnnnnnnnnnnnnnnnnnnnnnnnnnnnnnnnnnnnnnnnnnnnnnnnnnnnnnnnnnnnnnnnnnnnnnnnnnnnnnnnnnnnnnnnnnnnnnnnnnnnnnnnnnnnnnnnnnnnnnnnnnnnnnnnnnnnnnnnnnnnnnnnnnnnnnnnnnnnnnnnnnnnnnnnnnnnnnnnnnnnnnnnnnnnnnnnnnnnnnnnnnnnnnnnnnnnnnnnnnnnnnnnnnnnnnnnnnnnnnnnnnnnnnnnnnnnnnnnnnnnnnnnnnnnnnnnnnnnnnnnnnnnnnnnnnnnnnnnnnnnnnnnnnnnnnnnnnnnnnnnnnnnnnnnnnnnnnnnnnnnnnnnnnnnnnnnnnnnnnnnnnnnnnnnnnnnnnnnnnnnnnnnnnnnnnnnnnnnnnnnnnnnnnnnnnnnnnnnnnnnnnnnnnnnnnnnnnnnnnnnnnnnnnnnnnnnnnnnnnnnnnnnnnnnnnnnnnnnnnnnnnnnnnnnnnnnnnnnnnnnnnnnnnnnnnnnnnnnnnnnnnnnnnnnnnnnnnnnnnnnnnnnnnnnnnnnnnnnnnnnnnnnnnnnnnnnnnnnnnnnnnnnnnnnnnnnnnnnnnnnnnnnnnnnnnnnnnnnnnnnnnnnnnnnnnnnnnnnnnnnnnnnnnnnnnnnnnnnnnnnnnnnnnnnnnnnnnnnnnnnnnnnnnnnnnnnnnnnnnnnnnnnnnnnnnnnnnnnnnnnnnnnnnnnnnnnnnnnnnnnnnnnnnnnnnnnnnnnnnnnnnnnnnnnnnnnnnnnnnnnnnnnnnnnnnnnnnnnnnnnnnnnnnnnnnnnnnnnnnnnnnnnnnnnnnnnnnnnnnnnnnnnnnnnnnnnnnnnnnnnnnnnnnnnnnnnnnnnnnnnnnnnnnnnnnnnnnnnnnnnnnnnnnnnnnnnnnnnnnnnnnnnnnnnnnnnnnnnnnntttttatcctaggcagcttggaatttttcacaagtggtgagcagtaagtccagcactatagcgccatatgaggaactccaaggcagttctttacaaaaggttttcattaaggacttcccagaagcaggagggccacacttcaacttccaactctttccagagccaggctgtcatggaaaagcttttctctgtgattggaaaaatatatattatgtatgtggcaattgacagctggagactaatcttgaattcatccatcctgaattcattaggtgggaggaagagggtgggtaataaggcattgaggtgttttatagctgccccttacaacttttgttgagtacagaaaaaaaacaaaaaacaaacctggagcattgtaaagaaaatgcctctgccaccatcatcactatgctgaatttcttttgctctaaaacatgggaaatattgatttttttccctgtttggttgatgtggagaggtttgtcttctagaatccatgcccagtatttgagggattatggggatgattgttctgtaatggcattaaatgggaaagctaggggtaccagtgtgctaattgggtaacaactcagccagggattggataacaatgaaagcagagtagaaggggagggaaagctggggcttcttggaattttgtttgcttttgctttgtgaagagcagatgctatttgtatttaacaatttccttttctttgactaatcggcagtatcttgctggaattggactcagagttcgaggggccttttcaacatttcatttaatgccttcatatttcagatgaggaaaccgaagcctatgaggggtgttccttgtccaaggtcacagagccagttagtcacaaaatcagtactgaaaccaataatcggtcctactgtgcttcatgaaaacagtttctacccttcaggaactctctttgctgagactgtgatttttttttttttttttttctgttgagaatcactttcagcttgtgaaagaaagaaaagagttgttttttcttcaatgcatcttgccaagaatgcacgttcagtgtcagcctgaaggcagccaagcattttacagacctgcaggaatgaagtaggggaaggttcagggagtctgaagttacttctggagtttttctggttagcctttgcctagtaggagcttgataaaaatagaagatcaagagacagaccttctataatagatctttcccccaaatatgtgaaatctagagaatccatttatgaatgaggaagaagcaactctaatacaaattgagttgggttttaggatgtggatatataggtagatgtaggtataaactgccatttgcaaagctctttacagtataccaggcactttaacatacattctataactaaacagggaagaaatgtgttaaattacctccaatttatagatgaggaaactaagatttagagaacctaggtacttccctaagattgcatagctagtcagtagttgagccaagacttagtattttctgtgtattctttccacggttccccattgtttttattccctttagtgatgaaagagaatataagtgctgtacagaagaatacatagttcagaaagtagaagtgtcaagaagacatctggggccttctgcagagaaacggaagtagccatctgtacacatacccataggaagtggtggccattagaaaatgtttgaaagctggagaacagcattagagaagtgggtagctgacagggctgagacacctgagcttgtggtaagaatttctatgtgctattctgtgaaggctgctgaggaagacagtccagaccaaggtagatgtctttaaaggagaattgcctgaagccagtgaggtggttaaaaaaaattggggaagatgcatattggtgataaaggagggagtaaccttgggcatttttcattacgtctttagggtggaaaaaaactagaaaattataaagtagtggtggggcgtggtggctcacgtccataataccaggactttgggaggcccagatggggcagattgctggagctcagtagttcgagaccagcctggccaacatggtgaaatcctgcctgtacaaaaaatacaaaatttagccaagtatggtggcgctcacttgtaatctcaactactcaggaggctgaggtgggaggatggcttgagcccaggaggcagaggttgcagtgagccgtgatcacaccactgcactccagcctggttgacagagccagaccttgtctcaaaaaaaaaaaaaaaaaaattgttaaggagttaagaaagaggaaaagtaggatggtattttatagactacttgcttttttattctagaagtttcatagatggtgcagacatcatttagcccaagttacctgtgaatgttgagtttggggatgattgttctgtaatggtactaaatggggaagtgcggggtgccagtgtgctaattgggtaacaacttagccaggaattggatggccacgctagcagagtagcagaggagagaaaggccataatcccagcactttgggaggccgaggcgggcagatcacttgaggtcaggagttcaagaccagcctggccaacatggtgaaacccctgtctctactaaaaatacaaaaaaaaaattagctgggcatggtggcaggcacctgtaatcccagctacttcgaaggctgaggcaggagaatcgcttgaacccgggaggcggaggttgcagtgagccgagatcgcaccactgcactctagcctgggtgacagagaaaaactccatctcaaaaaaacaaacaaacaacaacaacaaaaaatttaaaaaaaaagaagtggagggaaagctggggcttctatcttgcttggaaccagtttcatccttaaatggagttgtgtgtttgtagtgataccacacataatacttcgtaaaaataatcacagtataatttccttcttagtatttttcagttcaacaagtttcacctatgatctcgatttgatctttacaacaaccctttgaactaatcaggcagggcattattagtgctctcagacaggtgaagtcaccaagggcagataatggtcccttgttttacagatgaggaaatttaaattcagagaagttatttgctcaaaattgttccactagtgtgtggcaagttgggattcaaacccagtatcttctggctcctagaggtggaaaattttttactatattatgatgtattatagaaggaggtcaatggttatgccttgtagggtgcgtttgggaagtctgcgtctctgggccttcctgtatggtgtcttgccattgtagttacctgattctccctgatgtctgtcccagctggcctggctttgcactcagccctctcctgctccttgagcctctcctcctaataccatctttgcacacagctcagtctctgtaaaaccctgtcatgtatcctcctcggggttgcctgtgtctgccagtatctccttttccctctaggacctgaggaagccctcttagagaccttgccttattgtgcattgttttgaaaattgccctcctagccagccatccctgctctaatgattcaccttcaaactgtgatttcaagtcttttggatcttcttatgccatgtgttaggcagcctctgacattcagaggggctcataaatataggtatgctatggtagtatatttaggaccagttcttttgcctccttcttacccatatgcctttaatcagcttctgctcctctggcaatatgggcataattggcatgtgttttcagcagagctcattatagagatttccattgcagcaggcaattttgtacaagcccctgtctgacattattaccaaagctattgccgttgttttgtcaggtctaacaagtccagcaaggtctggctgattgaagcattcattgaattggccactgggcaaggaggcggttgcttggcagttcttctcttcagggagggtttccttttttagtagcagtcttacctctaaggagtcagcagctccctttagaactggctttcccaaagtgtgtttccccacccttccacccagtggcttccagttgttctgaaagctgctggtcaactgtgcctttaatatttctaatggcaggagttaataatgtgatgtttaatagaaaacatgtgtcatcctattggcacaccagagaaggcagctctggtctctccattaaaccagcaaagatttttgttttttaatggtgataagtagaaataagtatatgggatacccacaggtatcttttactttgaagtcttttgtagcttctgcttttgagaataactgatagagggaaacttcttagccttgcacctttgctttttgctcctttccagaagtcctgggcagaagagagaggggataaggaatagtcacttgaggttgggcgtggtggctcacgcctataatctcagcactttgggaggccaaatgggtggatcacctgaggtcaggagttccagacaagcctgggctacatggcaaaactccgtatctactaaaaatacaaaaattagctgggtgtggtggcatgcacctgtaatcccagctatttgggaggctgaggcagagttgcttgaaccccagaggtggaagttgcagtgagccgagatcgcgccactgcattgcagccttcatgacagagtaagtctccatctcaaaataaataaataaataaataaataaatataaaaaggaatagtaactcgatttctcaaggagatctatttgtagtaaagcaggagccagcatgctgtggctcatggccaaatcctgtccacctcctcttttcgtaaataatgtctgttttcataaataacgttttattggcacatagccacacctatttgtttatatattgtctgtgactgcttttgcaataaagtggcagaattgagtcattgcaatagatacagaatagccctccaagactaaaacaggctgtgcaacattaattggctgttgttgggtggggcagggcattgagttccttaagtgttccttggaccttcttgtttgtgtccagcttctgctgagtttgtgtagagaggtatgcagggaagtggttttggaaatgacctattcccgcatacataatgaaagcttggaatgcaggttgtgctatgaggtgttttcctgtttgaatgggcaaagtgttcatcatcagagatgtattcctattgcctaccccggggcctgacacagtctcagttctgatctcaagaaactctcatacaggggttttgcttttcccagtgggcattcagaaacacactggttcactagcgcagaaacagttcatcctttttgactgtctgtctttgtgtatttggtcacgaactcctttttcctctttcccattatagatagtcgatgggatttttcacaaagcccttgaatagtttgtatgtgtttgttgattttgaactttgaactggtatatatataataccagcannnnnnnnnnnnnnnnnnnnnnnnnnnnnnnnnnnnnnnnnnnnnnnnnnnnnnnnnnnnnnnnnnnnnnnnnnnnnnnnnnnnnnnnnnnnnnnnnnnnnnnnnnnnnnnnnnnnnnnnnnnnnnnnnnnnnnnnnnnnnnnnnnnnnnnnnnnnnnnnnnnnnnnnnnnnnnnnnnnnnnnnnnnnnnnnnnnnnnnnnnnnnnnnnnnnnnnnnnnnnnnnnnnnnnnnnnnnnnnnnnnnnnnnnnnnnnnnnnnnnnnnnnnnnnnnnnnnnnnnnnnnnnnnnnnnnnnnnnnnnnnnnnnnnnnnnnnnnnnnnnnnnnnnnnnnnnnnnnnnnnnnnnnnnnnnnnnnnnnnnnnnnnnnnnnnnnnnnnnnnnnnnnnnnnnnnnnnnnnnnnnnnnnnnnnnnnnnnnnnnnnnnnnnnnnnnnnnnnnnnnnnnnnnnnnnnnnnnnnnnnnnnnnnnnnnnnnnnnnnnnnnnnnnnnnnnnnnnnnnnnnnnnnnnnnnnnnnnnnnnnnnnnnnnnnnnnnnnnnnnnnnnnnnnnnnnnnnnnnnnnnnnnnnnnnnnnnnnnnnnnnnnnnnnnnnnnnnnnnnnnnnnnnnnnnnnnnnnnttatttgtcataagctaacaggggacctttttctctctttgacacagttgggaagttctttattaaaggggccagaacagcagttccctttatagttaataatgatgtaatacaccaagtagtgaaggctacaggacaggaaccacagaagtcaccacagggcacattgcccagtcaagctttctccagctggtcagataatatttcactgaggtctaaagagaagaaatgttatgaacaggagcaactctctgcttccctgactcttaattccttctgattgattggtatgatcttgttatttcaggatgattattttagtatgatttaatacagatttaaaaaatatggcagttataagtttctatctcatgttattcatggtaccttttcaaaatggagcaatctggcctccaaaatctagctatagagaataatcacaggttcccatgtgtaagtagggcaaagagaatcagaattacaatattagaaagagtcttgagaggtcatggagtcaactcctctgcttcctagccacctaaatcagccaagacagacgtggctagagaaagaatggaattagattgttgccttgtagatgtcttccatctttaactctgtccttttgagagcagtagaaactagtttggaaggggaaatgctaacttttggactgcagggctttaattaagtcttcttctttttttattcttatgcacctaaagaacatttgggactaaagtggttaaagacatagtcttggttgaagttaggttactgagcttaggtttcagcatattctctgtctaggaaattgagctcatcagcaagtaatggtaatgggaaggcttagcacaatggcatttagttgccagaatgaccattggcttgggaggcacacagatctgggtttgaattccctatttactatctgggtggcatttgaacaagctatgaacttcttaaagtttcagtttcctcaattataaatggagacagtaataccaaccttggttatagaaggtatacatgaaataacatatttgaaagtaatatactcttaataaatgttagtctctactgtttaagtatatattttaaaaaaacatacttatgacagtgcttgtgccataaacaaacttaaattgtagtaattaataacttaattggtgtttggatatggcttatgacttgaaaattcaagaatatacttcacaaagagaagagaaaaggaatatgagtgcatatttctcatagtcacacagccttacccatattccaatgacagtaaagtggggactgatcagaaagccttctgggatagcatataacagcagccacactcaccaataaggtattggtatgcctgatcctcttctccttttcagtaataaccatttgagaaagattagcattgttatttatagtgctcttgggtctgatgttatatcattgtggttctactggcactgagaaagggaacaatctttagttctggtcaacgtgcctaacataactcctggccctcagtagtctctaagtattttatttgaatgaattaataagaccctattttacaggagataaattgagacagaacggttaagtggctcatctaaggattaagagagacagagttcttgtcaataatgggacctggtctactgccttggttcttaacacatattcttccctttccaggctgtcttatcccatgaatattgtgtaatacactgtaaagagacttccttcccccttatgagctggtgatttgcttgtacctaaattaagagagtaggttaaagatgcaatgagagtgctttatggcaattcaaagtataatgttttctctaggatttctttcattttgtttgtttgtttgttgttttttgtagagatgggggtctcattatattgctcaggctagtcttgaactcctgggctcaagtgatcctcctgccttggcttcccaaagtgctgggattacaggtatgagccactgaacctgccctatctaggatttcttagtttttggaattgcaacagagagggataaccccttttttgcatgttttgtcagagctgaggttgaacaaagggccctgggtgggcgtgtggggaaggataggtggttacggcatggattttataggcagatggtgttggcttggaagaaaatcacagtaacagtaacatgtgggtgtgggtgtagagggatatcttcttttccagcaccgtatctttgaatctgcccaccttcccctgagaattggctttgattaccttgatgttggttattctgatagacgaagctgcagggcagggctaatgtacattaatggagatgtgtgtataaatcatctcacagaatatacagacatcctctgtctctagaaagttggcctctttttgaacttctcactatgtccctagttgttacagaagtaatttagaaaccccagaagaaatatataaatagggtctattgcatactgggcctgaacaagctggagaggaataatttcacatttgatggcaggctattttacttgtttgtctttcttctccctttgcttcctgccttgctttgagtgactgcagaagctttttgtgattgtagggagccttggccaatgtgggaataggacccaggaattcaaatttctcacctgacatctgcagtaccttcagaatgcttctgaaactgatataaatgaagaaatactccaaaagattactattgaacaacaaaataaaaactttcacatgataaaccatatttagtcgcattcttcccttttcaggccccaagtatatagctgagatgggtctagtgtctttctttttatgtaccattttaggcaagttcttctcagtttataaatagacttttcattctcaacccttcttatgtgggcaagaaaaaggatttgtttaatagagtctgataaataatttttaattgttttaaattgtgataaaatatacataacataaaggtaccatcttaatcatttttaagtctttggttcagtgggattaagtacattcatattgttgtataaccatcaccaccacccatctccagaactcttatcgtcttgtaaaattaaaactatacacgttaaactttaactccccattcccagctgccctcagcccctggcatccattgttctactttctgtctttatgaatttgactactctataartggaagtacctcatgtaaaggaaagtatacagtttttggctggcctgctgtgactggtttatttcacttagcataatgttcttaaggttcatctgaaggaaacaaaaatatttcacctgaaaatatacgtctttgtcatattttaagatgactgttcagagcaccagtaaacagaagtagccctgcaaagctgtctttttggggacatttgcagctgtagggaaaatctgcactgatatagccaggtttttttctgaggccctcccttgtccagatctaggaaagattaactgagagtctgacacctataaaggtctgaataaacattcaccatctattctctctgagggctctgcctgtgaagttttatctatataacaagaccacttctgctagccaggcctcctcttctccccctgttctgccaccataacctgattttccaccataacctgtttttggccatgcctcgagggagtttccattctttctgtaacctcaagatggtataaaagcgtcaaccctatacaaactctggaagaaaatctcggaaaataccattatggacataggaacaggcatagatttcatgacaaagacaccaaaagcaattgcaataaaacaaaaaaattgacaaatgggacctaattaggctaaagagcttctgtgcagcaaataaaactatcaacacagtaaacagaccagctacagaatgggagaatatatttgcaaactacacatccaacaaaggtctaatatccagaatctatatggaagttaaacaaattaacaagcaggaaacagacagcctcattaataagtgtataaaggacacgactgacacttttcaaaagaagacatatacggggccaacaagcctatgaaaaaatgctcagcatcgctgattattagagaaaygtaaaccaaaaccacagtgagataccatttcaccccagtcagaatggctattattaaaaagtcaaaaaataacagatgctggcaaggttgtggagaaaagggatcacttatacagtggttcagccacttcggaaagcagtttggagatttctcaaagaacttagaacagaactaccaccattcgacccaacaatcccattattgggaaattattgggtgagggttgaaaaactacctattgtactatgcttattacgtgggtgacaaaataatctgtacaccaaacccccgtgacatgcaatttaactatataataaacctgcacttgtatgcctgaacctaaaataaaagttaaaaaaataaaagcaccagctaccttgcctttctttgaattcttatattttgtatgattcctgtgcacattaataaattgtatgccttttctcctattaatttgccttttgtcagttgatttttcagagaaccagcaaggatggagggagttttcccttagccctgatacatccatcttgtaacatgtgtcagaatttcatttctttttacggctgaaataatattacattatgtgcatatacattttgtttatccattcacctattgatggacacttaggttgcttccactttttggctattgtgaacaatgccgctgtgaatatgagtgtacaaatacctctttgagaccttggctttcaactcttttgggtatataccctgctatggtgcgaatgtgtatccccaaatgcatgtattggaaacttaatccccaatgcaacagtattaggaagtgtagacttttgggagatgtttagtaatgaggcccctgagatgtttagtaatgaggcccctgttattatcagtggattaatacccttataaaagggtttgatggaagaagtttgttcttccactttttttttttttggtggagtctcagtctgtcatccagggtggagtgcagtggcgctatcttggctcactgcaacctccgtctcctgggttcaagcgattctcctgccgtagtctcctgagtagctgggattacaggcgtgaaccactgcactggccttttttgttgttgtttttttgctcttcggccttctgccatgtgagaacacggcattcctcccctatggaggcagtgccatcttggaagcagagcctggaccatcaccagacacctaatttaccggcaccttggtcttatatttcccagcctccagaactgtgagaaataaatttctgttctttataaattactcagtctgtggtaatttgttatagcatcagaaatggactgagatatatccagtagtgtaattgctgtatcatatagtaattctatttttaattttttgaataacttgataaataattttaaagttttcttcaggatccataatatttgcatgaactgactcataaaaatgttggatttgctactttgattcaaacccatgattcattcggccaggggttttgttttggacagtggcattaggagatagttgatgaaaagaatgatattgcttcacacagtgattagataccctggaagtccgaatttctctacatcttgacctcatattaatttttctaactccttcttaaacctgtttataactctaacccacataaaggagtttcctaagtctactcatgaaaatatgacgttatttgatttgtcctagaagtgattctttgaaacttcaagaggaatttccaagttctggttttttagacttgcttaaaaaagaaaagtgtattcacatatccttaccttgtgtgattttaaagatttgtattttcagccctcagccctcagccctcattcctcatctttgcatacaaaagaattgtattttttctgttagcaacctcacttaaaaacacatcccttgcttggtgagtttcttgtcctctttctggatcatctccagctgtcttatgacattctgaacattgtcctcagcattctagggcattgctgaagcctataaaagagattttggtctgcaaagtttataatcccctgcctagtgataatcaccttattgttgggcctgggttttttggagacagttcacaactcctcctctccaggactgtagccaataaaatgttctccagagatagggtactgacagatgctcctgtgtgttcatgagagtcagtgtggcccagcagaaagcactggcctagggtttatagaattaggattctagtcttaaatctttgctaaccacgcaatcttaggtacagttcaccttttggtgcctcaatttccctatatgtgaaatgggatcaagaacacctaccctgttcccctcacaagattattctgagaatcaagtgagatcatggaaatgaaagttctttctaattaagtgctgtatgcctagaggaaatgtcgattgagacttaaagactatagggtgtatcaagtaattttgcttttctggcttaatttttttatttataagcccatggattagttgctaattattattattatctttttttgagacggagtctcgctctgtttcccaggctggagtgcagtagcacgatcttggctcactgcagcctccgcttcccgagttcaagtgattctgctgcctcagcctcctgagtagctaggattacaggcacacaccaccacgcctggccaatttttgtatttttagtagagacaaggttcgccctgttggccaggctggtctcgaattccttgcctcaagtgatctgcccacctcggcctcccgaagtgctgggattagaggcatgagccactgtgtctggcccagttgctaagtagaataagtgatttaacatgcacatcagttagaatattgtcactgctgttacctcattatgttaatactactggacatttgaaggtcagatttctaataatctcaatatccagaataaagctgggagtctagaggcttgcctttccaaaaacggtctctaatagcttaagtggttttcgctgtgcactrttccgtgggagagaatgttgtcctgattttattggctcttcatttaaattctgatgtggtttctaccccttagaaatttagaagcagaatctagggatttggaggtgaagtgaggagtctagcaccagaactttgatatgaaaaagaagtgacaatggaattgaattgaagtgtgtgtatgtattgggggagcctgaaaatattggggaaaacagatataaggcctataaagcattgtgctttgtgtctattttatgtagagttcaatartcctacatacctgagcattctttgagtatgtgacagcctcagattgactgatgttgtcacaatgatgaagtggagtcatccaaaaaccatttaagaaagcagaaagctgggcatgatggcatatgcctgtagtcctagctgctcaggaggctgaggcaggagggttgcttacgtccaggagttcgagtccagcctgggtagcatagtgagaccttgtctctaaacaacaccaccaccaacaacaaaaagaatgcagaaaattaaatgttagcttagctttccattaaaatggttaaattacaaaagttctaaatgtttgaagggataaactttatttaaattgaaaattaactttttgtaatggattattatctgataatgctgaataaacagaacattattgtattaatattttgaccattatattacaaaggtatttttgttattttctccatttggataattttgtattgttatacctaatttatagtagaggacattgacaaggtatgttatgccannnnnnnnnnnnnnnnnnnnnnnnnnnnnnnnnnnnnnnnnnnnnnnnnnnnnnnnnnnnnnnnnnnnnnnnnnnnnnnnnnnnnnnnnnnnnnnnnnnnnnnnnnnnnnnnnnnnnnnnnnnnnnnnnnnnnnnnnnnnnnnnnnnnnnnnnnnnnnnnnnnnnnnnnnnnnnnnnnnnnnnnnnnnnnnnnnnnnnnnnnnnnnnnnnnnnnnnnnnnnnnnnnnnnnnnnnnnnnnnnnnnnnnnnnnnnnnnnnnnnnnnnnnnnnnnnnnnnnnnnnnnnnnnnnnactgaagggcttaagataggatcaaccatattcataaaagtggtagagcaatggatttaaatgttggccttttgactctaaaagctgttgttttttctaagtcttccacttaggtatcatcattatgccttgtgttttggaacaattctgtaaaaaagaacatataggcatcattatccctattttaccatatgagcaaattgagctgaaagataccaagtgagctgcccaatggacacatgatggctagaacccaggtctgtcgatttctggaccattaactactttattttatgtatgtatgtatttatttatttatttattttgagacgaagttttgttcttgttgcccaagctggagtgcagtggcatgatctgggctcactgcaacctccgcctcccaggtgcaagtgattctcctgcctcagcctcctgagtagatgagattacaggtgcacaccactacgcccggctaatttttgtatttttagtagagaccgggtttcaccatgttggtcaggctggtcttgaactcctgacctcaggtgattcactcgccttgtcctcccaaagtgctgggattacaggcatgagccaccatgcctggccccagtatctattttagaaaccattttattttgaaataatttcaaagttacagggaagttacaaaaatagtacaaagaacctcagtttatccttcagtcagattcactgatttttaaaaaatattttgctctatttgtcttattctgtctctgattatttacatattattttttctggatcattttagattcagttgcatatattacgaccttttcccttaaatccttcagcatgtatttcccaagaataaggatatttattacatatgcatagtagaagtattaatgtcaggaatttaattttttttttggagatggagtcttactctgttgcacaggctggagcgcagtggtgygatcttggctcactgcaacctccacctcccgggttcaagtgattctcctgcttcagcctcctgagtagctgggattacaggtgcccgccactatgcccagctaatttttgtatttttgatagaaatggggttccaccatgttggccaggctggtctcgaactcctgacctcaggcgatctgcccacctcggcctcccaaagtgctgggattacaggcgtgagccaccgtgcctggcctcaaagtcaggaaatttaacactgatataatactattatctaatctaaagtcaatactaaaatttaactaattgtcccaataatatcctttttgtcccaataatatctgttttattttctgacccagaaaacaggattatgagttgcatgtagttatcactggagtattgccttttttttttttgacagattcttgctctgtcacccgggctggagttcagtggcgtgatctcagcttactgcagcctctgcctcctgggttcacgcgattcttgtgcctcagcctcctgagtagcttactagattacaggcatgtgccaccacgcctggctatttttttgtattttagtagagatggggtttttaccatgttggccaggctggtcttgaactcctggcctcaagtgatccacctgccccagcctccctaagtgttgagattataggtgtgcgccactacgcccagcctcattgccctttatataatatcttgttgcttctcttagcccattatgtcccaaaagtttagaaaacatttcttggatgaaagaagtgcataaaatagaggttaaaaaatgggaatgtggaccctttccttttcagtcacctcaggttgcttgcatttttttgtgaaaactcatctaccacttagacctgataaagatcacttattctgcagcagcttctgcttccaacagagtggggatttgggcccctccaagcttttctgctgacatctaggaaatcccaggtgtacacaggtctgatctgagctgtaatgcaggagtgtggctgtgccaagctagggaagaaagaaaatcaccccaaagactataatgggccaggcatggtagctcatgtctgtaatcacaacacattaggaggccaaggcaggaggatcacttgagcccagaagtttgagaccagcctgggcagcatagtgagacctccgctctaaaaaatttttttaaaattagccaggtggtgtcatgtgctcgtatgggaggctgaggcaggaggctcacttgagcccaggtgtttgaagctatagtgagctataatcacaccacttcattccagcctgggcaacagagtgactcaaacaaacaaacaaacagactgtaatgagcagactaggggaatagatggaagagcaaatgctgtacctgatgtaggacattattatttcaaatgtgcatcacttttatgataatgtttgcatcacatacgaattctttttttaaaattgtggtgaaaaaacacataacattaaatttaccatctgaaccatttttaaatgtacagttcagtagtgttaagtagatttacattgttgtgcaacagatcactagcttgttttcatcttgcaacaatgaacctctatacccactaaatgctaattcccccttctccccccagccttggcaactacctttctacttcctttttctatgattttaacaacttttgttacttcatattggtggaatcatacagtatttgtcttttgtgactggcttattttgcttgacattctcagagttctttcacgtagcatgtgtcagaacttcttttctttctttttttggtttattcttttttaagtttctattctcctacccgaatgtgtcagaatttcattcctttttaaggctgcataattattcctttgtatgtatatataccgcattttgtttatccttttacccatcaatgaacatttgggttgtttccaactcttggctattgtgaataatcctgcagagtacataagtgtgcaaatacacctttgagatcctgctttgaattcctttgggtatgtacccagaagtgggattgctggattatatgataattctatttaaaagttttggccaggcgcagtggctcacacctgtaatcccagcactttgggaggccaaggcaggcagatcatgaggtcaagagatggagaccatcctggccaacatggtgaaaccctgtctttactaaaaatacaaaaattagctgggtgtggtggtgcatacctgtaatcccatctactcgggaggctgaggcaggagaatcgcttgaacctgggaggcggaggtcgcagtgaaccgagatcatgccactgcactccagactggcgacagagtgagactctgtctcaaaaaaaaaaaaaagtttttaggaaccaccatactgttttccataatggctgcaccattttggcatcccataccaattctctgaaataggtagagttgttatcattaagcctattgtgcagataaagaagctgaatgacttacatatatacaaagttacgcagcggtaatgtaaaactgagacttcaacccaggtctcctggctctgcattcagcatctcatttcctcttatcttactcttctgcttgtgccacccctccagcgctcctcagacatgactgtggcacttcacttttagcatttttctgagtctagatggtacaactgtttcctttgctcaagaaatgccctccccatcaagcagtacatctcgtgcagtacctgagttcagaatgctgcctctgtttagactcaccattgcccttttgccttgttctcttgagcctaggatcgtacacaaggcacatttgaggaagcagccaattggcacggctctgtgagtctctacagcagtaggtctatgatagggacgtttattttttaaagtcgaaaggcacaattgctctttgatttagttgctgaacactgaccccctgcttagatttctgcaaattgaaagcagctatcatttcaacatcaacaccttcaaaaagaaaacacgcttgcacatgctcaaaaaattgctgatctgtagggaagagtagcaattccaaaaaagaaggcatatgatttttatctttcagtagtaattaacactacccttctctctaggaaagcttcctgccaggagttgtgtctcctctctgagtttaaacttatttgctgcctttttccttcctagagatcatctcaatattctattccacttaaaggcatttgacaccggttctgtatctgggctctgaggctartggtatgaaagcttccaagacaaactcccaaaactgtagattcctgaatcaagtgtcttgctggagtctgtagacttgaaacatttggcagctgtgctgcttttcctatttaacacacagggacatttggcggctaggactgtatcttaattctccatctttggctttgctttcttcatcatcttcccayctcacccatttctgatttgtgcagtgttggcttgttcaaattctgatcttttaggacactgtcattctttctaggcaggctatcaaaatgttcagtctttacttcagatactcctgtacacctcagattacacctctctgtgaaaacctctcccccaattttatcttttaacgtgtgagtatgtgcctatgtttgtttttctcggagagaaagatggtatctccctagagtttagttgactcccaaagtttaaaaactactggccatatgtggaacctgtcttggccctttccattatcacaatgcctcaagtcatttgcaaacctgacctgataagcactcttctgaagattttatcaggacctatttctttggtttctggttcttgatatggcactacctataactctaactgggctgtttgaagagaacagatcatgaggcccatcaacataagatatgcaataagatttctttatacttggggtttaatgattcagttcatactgacattaggcattatttactttgcctttgctttgagtcaaaatccggctaagcattttccccacatcctactgacttctttattttggttcatggtatttgtagcctaccagttggcaagaatggaaacctcaaagacaggctcttctcttttcttctcttccttctcttctcttctttctctcttcttcttcttcttctccttctccttctcctccttcttcttctttttcttcttccttctctttctttctctcttttcttttcttttctttctcccttctttcttctccccttctttctttctttcctctctcatgacccttacatccaataaatgcctaagtctggtagatttacctccagcagtgtcttttgcattcgtctccacctttctcttgctccttcttactgctacatttcaaacacttttcactttttgcctgagaaaacactagccgccaacttctatccctttctccttcggttcattccatactgattccagatgaactgtttgaaactaaagcactcatcatgccacttcctgttcagaaaccttcagtggttttccacactgccggcttcctcaagaaaagagtgtgcagcctgaccttcaaggttttccagattatgggcctaagggtcttccagcatcatctcctcttacttccctttatatctttggctatcaagctaaattggactctgcactgttctgcaaacctgtgttcagctctggttctcctcggtctcttttgctcaggccattcttttttcctggaatgctcttacccccatacatctctgtttattgaagtctgcccatcatgcaaggcccatctcaaatcttaccttttccttgcattcttcctagatctccccaaccgaatatgatttcttcctcatttgaactctcttgggacaatctacatctcctgatgtttgtataatgcttggtattatgcactcatcttcactactacattggatgctcttggaagataaaagttgtctcttagtagtcttgtatcactgtacaattgtgttactgtacaattgcgttactgtacaattgtgttacggtacaatttgaaacttagggccttgtgtgtatcaggcttttagaaagtatttgtggaattgagtagagttttatttagctttctttgtaatcctggtagtctatctagaatctttctagagcgggccaaatgccaccacctttgaggatatcttctcagttagaattaaccctttgttccttgatgttcacttacatgttgtttacactgtacttgtagcygtctgtctcattactaagttagctgtattgtgaatatctcccttccttctttggagagggattggttctgatttattactgtatatctaatatggtttggatttgtgtcctcacccaaatcccatgttgaattgtaatccccaatgttgaaggtggtgcctggtgggaagtgaaaggatcatggtggcagtttcttgtggtttaacaccatcctccttggtgctgtcgtcatgatagtgagctcttgtgagagctgattttttaaaagtgtgtggcacttccccacctcttcttgcccctgctctggccatgtaggatgtgcctgaaagaaaaaataacaacaacaaaagacatgcctggccaggtgcagtggctcacacttgtaataccagcactttaggaggcagaggcgggtgaatcatctgaggttgggagttcgagaccagcctggccaacatggcgaaaccctgtctttactaaaaatagaaaaatcagccaggcatggtggtgcacgcctgtaatcccagccactcaggggactgaggcaggagaattgcttgagcccaggagtcggaggttgcagtgagccgagatcatgccacagcactccagcctgggcaacagagcgagactccatctcaaaaaaaaaagaaaaaagaaaaaagaaaaaaaagagagaagaaagacgtgcctgcttccccttcgcttttccccatgattgtaagtttcctgaggcctccttagaagcagaagccactatgcttcctgtacagcctgcagaactgtgagccaattaaacctcttttctttatacattactcagtctcaggcattttttttatagcagtgtgagaacagactaatacaatatctcatgctgattagcacagtacctggctcataatatcaccggtagagggttgtgactgcaagttgtccaggttcttggcgttttggacaaagaattggacaaaacgccctgcaaagcaaagaaagaatgaagcaacaaaagaacgaaacagggatttattgaaaacaaaaatatactccacagtgtggaagcagacccaagcagtggctcaagggcccagatacagaatcttcttggattcaaataccccctagaagtttcccattggccatttcatgctcacctcatgtaaatgaagtggtagcccagagtcagtctgattggttgcagaaagcagtcgaccagaggctgaagtgaagttacaaagctcacactcctctgcaaacatcctattggttacagaaagcaaccaatcagagcctgtaatcccagctactcagaaggctgaggcgggagaattgcttggacccgggaggcagaggttgcattgagccaagatagtgccattgtgctccagcctaggcaatgagagcgaaactctgtcttaaaaaaaaaaaaagaaagaaaaaaaaagaaactaaaacaagaccaatgtagttggaaggtatggagtagttgcccaatcactcagggcctataggtcatgctagggagatatagcgtgaacccctcagagggttttatttatttatttatttatttatttttatttatttattttgagacagagtccttgctttgtcgcccaggctggggtgcagtggcannnnnnnnnnnnnnnnnnnnnnnnnnnnnnnnnnnnnnnnnnnnnnnnnnnnnnnnnnnnnnnnnnnnnnnnnnnnnnnnnnnnnnnnnnnnnnnnnnnnnnnnnnnnnnnnnnnnnnnnnnnnnnnnnnnnnnnnnnnnnnnnnnnnnnnnnnnnnnnnnnnnnnnnnnnnnnnnnnnnnnnnnnnnnnnnnnnnnnnnnnnnnnnnnnnnnnnnnnnnnnnnnnnnnnnnnnnnnnnnnnnnnnnnnnnnnnnnnnnnnnnnnnnnnnnnnnnnnnnnnnnnnnnnnnnnnnnnnnnnnnnnnnnnnnnnnnnnnnnnnnnnnnnnnnnnnnnnnnnnnnnnnnnnnnnnnnnnnnnnnnnnnnnnnnnnnnnnnnnnnnnnnnnnnnnnnnnnnnnnnnnnnnnnnnnnnnnnnnnnnnnnnnnnnnnnnnnnnnnnnnnnnnnnnnnnnnnnnnnnnnnnnnnnnnnnnnnnnnnnnnnnnnnnnnnnnnnnnnnnnnnnnnnnnnnnnnnnnnnnnnnnnnnnnnnnnnnnnnnnnnnnnnnnnnnnnnnnnnnnnnnnnnnnnnnnnnnnnnnnnnnnnnnnnnnnnnnnnnnnnnnnnnnnnnnnnnnnnnnnnnnnnnnnnnnnnnnnnnnnnnnnnnnnnnnnnnnnnnnnnnnnnnnnnnnnnnnnnnnnnnnnnnnnnnnnnnnnnnnnnnnnnnnnnnnnnnnnnnnnnnnnnncaaagtgctgggattacaggcgtgagtcactggggcctggccagattttgtatatatttaggaccctcccctgattcccagtctaaggtagcacattgcctttaagttagggccttagctgtctgatattgtgtaaatgtgatcctaattcaagacaggcggaccagagcaagtgacttctttataaacctgatagccctgtgtttctgtgtggtttcttttccaccattaaatgcatcatcaccacagcagtggaatacatagaaggggttggagaacatttcgtgggtttaaaaatttcaagtgaaaaatatgttggattgaaatctttggaaactattccactgggctattatagttgcagctgaaaacaattaatggagcagcagatgaaaaaccaaaacatgcaagcattggggcactgtggaataaggggatcatttaggtgggcctttctaccattggatagggcataaattgagaaaagtgcacatgtagtcatgagcaagtattaaagtgtctccccaaaatactagcaaatagtgagctaataaatggaggtggagaaaaataaaaggcaagggacaatataagatcaaagacagcttctgtttctttgcagcattttgtgcccccactctggcaggttttctacagatgctctgatcaggaaccagctggccccagggctggctctcagtctctcctggcagtccccacaccccaagcaagatcattaaatcatccttttgttaagggacgatgggaggagcctaatctgagaaaaagaaaagtaaggaagaacagggttacacctgccagtgataaaaggaagactgtggcaataagggaaaaaagcccagggaattaagaaagggttaacctgtggccaggcacagtggctcatgcctataatcccagcactttgggaggccgaggtgggtggatcacttgcggtcaggggttcgagatcaacctggccaacgtggtgaaaccctgtccctactaaaaatacaaaaattagctgggcgtggtggtgggtgcctgtaatcccagctacttcggaggctgaggcaggagaatcacttgaacctgggaggtggaggttgcagtgagccgagattgtgccactgcactccaactggggcaacagagtgagactctgtttcaaaaaaaaaaaaaaaaataaataaataaaaggaaaaaagtgtcaacctaacataacagaccaaaaaaaaaaaaaaaaagaacataaaagacaaacagaaacaggctgtcaggattcaggatgtgataaggctgcagtatggaaatggattcagctacctgggaaacttgcagagttgcaattgaaaaagttaatgatgttctccgataagaagcctggggcactgagaaggcctgttttgtaactctgggaatcctttagccagccactgtggtccctggtttatagccaattagaagttagaaagaaaaatggaaaaaacaaccaaaggaaaaagttgttaacagctgctatgattttatctaaatagaacttccattacaggctgtgagaagattaaagaaatctgggtgaactgtgctggagggtggagggtgttccagcacagctcttgctgagcagtcctggtgttgctccaaggcaagagcagcttgcaatcaggaggcagttttcgctagccacccagagaagattaacctcaagacccaggtaattgcagtttctgtttgctcctcagtcctgagagagtcctatgcccctggggggaagctcccctgggatgggagaggagtaacgggtaaatttccagccacttactacttatcaagggctcatcctgtgacagcaggatactcattagtttttatttttatttttatttttttgagatggagtctcgctctgtcgcccaggctggagtgcagtggcgtgatctcggctcactggagcctccgcctccagtgctccagcgattctcctgcctcagcctcccgggtagctgggattacaggcacgtaccaccatgcccggctaatttttgtatttttaggagagatggggtttcaccatgttggccaggctggtctcaaactcctgacctcaggtgatccgcctgcctcggcctcccaaagtactgggattacaggcgtgagccacagcgcctggccaactcattcgtattcagagtcaaggactccctgattgtccctcatacaagnnnnnnnnnnnnnnnnnnnnnnnnnnnnnnnnnnnnnnnnnnnnnnnnnnnnnnnnnnnnnnnnnnnnnnnnnnnnnnnnnnnnnnnnnnnnnnnnnnnnnnnnnnnnnnnnnnnnnnnnnnnnnnnnnnnnnnnnnnnnnnnnnnnnnnnnnnnnnnnnnnnnnnnnnnnnnnnnnnnnnnnnnnnnnnnnnnnnnnnnnnnnnnnnnnnnnnnnnnnnnnnnnnnnnnnnnnnnnnnnnnnnnnnnnnnnnnnnnnnnnnnnnnnnnnnnnnnnnnnnnnnnnnnnnnnnnnnnnnnnnnnnnnnnnnnnnnnnnnnnnnnnnnnnnnnnnnnnnnnnnnnnnnnnnnnnnnnnnnnnnnnnnnnnnnnnnnnnnnnnnnnnnnnnnnnnnnnnnnnnnnnnnnnnnnnnnnnnnnnnnnnnnnnnnnnnnnnnnnnnnnntcacctgaagtcgggagttcgagaacagcctgaccaacatggagaaaccccatttctactaaaaatacaaaattagccaggtgtggtggtgcatgcctgtaatcccagctacttgggaggctgaggcaggagaatcgcttgaacctgggaggcagaggttgcagtgagccgagatcgtgccattgcactctagcctgggtgataagagtgaaactccatctccagaaaaaaaaaaaaagagagagagaaaattagctgggcatggtgttgtgtgcctgtagtctcagctagtcggatggtgggggcaggaggattgcttgagctcaggagttggagattgcagcaagttaagattgcaccactgtactccagcccgagtgacagaacaagaccctttctcaaacaaaacaaaacaaaaacaaaaaaacaaggccaagcacagtggctcatgcctgtaatcccagcactttgggaggccgaggtgggtggattgcttgaggtccggagtttgagacgagcctggccaacatggtgaaaccccatctctaccaaaaatacaaaaaattagcggggtgtggtggtgcatgcctgtaatcccagctactcaggaggctgaggcatgagaatcgcttgagtctgggaggcggaggttgcggtgggctgagatcacgccactgtactccagcctgggcaacagagcaagactctgtctcaataaataaataaattaataaatacataggccaggtgtggtggctcacgcctgtaatcccagcactttgggaggccgaggtgagtggatcacttgaggtcaggagttgagacaagcttgggcaagatggtgaaaccccgtctctactaaaaatacaaaaattagctgggcgtggtagcgcgtgcctgtagtcccagctacttgggagggtgaggcaggtaaatcacttgaacctggcaggcagaggttgcagtgagccgagaatgtgccactgcattctagcctgggcaacagaatgagactcagtctcaagaaaacaaaaaacaaaaaaaacttaacatgtaaattctacatgaagaaaaaatattacatagtaacataaaagacttagactcaggtattcttgaatagaaagataataacataaaaatattaacttgcctaagtaaatttattaaaataaactcagtgcaaataaagatacaattttttgttaactagataaactgattctaaaagttgtatgtaaaagcaggcaagcatgaaaacccagagaaattagtcaatggagagtaattaggggaaattaatcttatcagatattaaaatatagcatgctattaagctatagtagttaaagcagtgtggtactgatgcatgattctaaaaacaacagaacagaccagaaagtctagaaatagattgaactcagaaatttcatrtctgataaaggtggcatttcagagcagtggggaaatgacgtattatttaacaaagtcaggccgggcgcggtggctcacgcctgtaatcccagcactttgggaggccgaggcgggcggatcacgaggtcaggagatcgagaccatcctggcgaacacggtgaaaccccgtctctactaaaaatacaaaaaattagccgggcgtggtagcgggcgcctgtagtcccagctactcgggaggctgaggcaggagaatggcgtgaacccgggaggcggagcttgcagtgagccgagatcgcgccactgcactccagcctgggcaacagagcgagactccgtctcaaaaaaaaaaaaaaaaaaaaaaaaaaccaaagtctattggatcaccttgatagccatttcggaaaaaagagattagtatccatacctcatgcttgacacccaggtacatttcagatagatcaaagatttacatgtgaaaaatagggccataaaacttctggtaaaaaagggagtatgtaaaaattaattttagagtgcagaagccttacttatatgatacaaaattaggaagtaaacttgaaaaatagaaataaaaaagggacatttaaagtataattgaaaaaaacagaaaggaaaggatgatatgtttgacgcatgaaactccaatttgtatatggaaaaagtatcatgaataaatgcaaatgtcaaattggtagccctcatgcattgctgcagtagaaattgacagaatctctttcaagggagtttggcaatttcaatcaaaatttaaaatgttagctgggtgtggtggtgtgtgcctgtggtcccagctacttgagagcctgaggcaggaggattgcctgcacctgggagtttgagggtgcactgagctgtgatcgagcctctgcactccagcctgagtgaaagagtgatactttgtctaaaaacaaacaaacaaaatcactgtttttttgtttgttttgttttgttttttaaagaggcagtgttgcccagactggagtgcagttgaaacgggagagttccctgaccccacttgcaggacatgcaacagaggtgtggctcatctgttcagtcgctgccgctgctcaaaccccttacgggaagcggagcatgcaggtgaacaggtggaggagcccaagwgggcatgtgttacagtgtgcccttttagccctgccatccatggacagcttgagtgttaatcagctcagtggaccctctgcctttctgcaagggcagagggccagtgtgacagctttctgtatcccgagctcttgtccagtgtcccggaagaatcgagtcacacacgaacttgaaggatgaatgcagggttttattgygtggtggaggtggctctcagtgggccggatggggagctggaaggggggatcgagtgggaagatgatcttcccctggagtttggctgtccagcagccaaactcttctctgaccactcccagctgaactcctcttggccttcagacattcctcctgttctctctttctctgctgcattgttctgctgttcatctgcttgtctcctcgtctgcttctggagcctggagatcagggtttatatgggtacaggatagggagtgttgtgggccaaaaggcaatgttttgggcgtgaaaacaggaatgactgtccccatttagggccgtgggtctccaggcttgagggtggggcctttgctggggaaccactctcttccatccagtatttgcctgtctcctgtgtgtatcacagtggtgcaatcatagctgactgctgccttgaattcctagactcaagccatcctcctaccatgcagtaaaaaatctccttataacttttgactccccccaaatttaactattaatagcttaccattgaccggaaggcttatctggtctgtagattaacacatattttgtatatgtattatatacggtattcttacaatatagtaagctagaggaaagaaaatgttaagaatcatgaggaagagaaaatatatttactattcattaagtggaagtggatcatcataaaggtgttcatcttcatgttgagttaggctgagaaaagagggattggtcttgctgtcttaggggtggcagaagaggaagaaaatcttcatataagtggatctgtgaagttcaaacctgtgttgttcaagggtcaattgtctattttgataatatgtataccttttgttgttttcctattgctaatgcaacaaattagcacaattttgtggcttaaagcatgcacatattatctgatagttctggaggtcagaagtacaaaatgagtttcactgctaaagtcaaggtgtaggcagggctggttcctcgtcgaggctctggggggagaacctgtttccttgccattttcagcttcaagtggctgtctgcgatccttggcttgtgggccatcctccatctttaaagcacattgctccaatctctgcttccatcattacattactgacttctctcctccattgatcctcctacgtccctcttaagtatctttgcaattacactgggctcatttgggtaatctaagataatcctaacatctcaagatctgtagctcaaccacacactagcagagtcccttttggcatgtaaagtaacacattcataggttctggggatgagggtgtggatatctttgagggatcattattcagcctaccacagatatgttcttgcataccctatctctggaagaaaaaaactgctgagggtagttgcctctggagataggaagctgggggctgacggacaagggtaagacaaaaacgtatgctttactgaatgcccctttgtattttttgagtttgtgtctctgtattctgtcacaaagtgaaatatgctcattgtggatattttagaaattgcaaaaaaagagaaaaacacaaaaatattaatcatagtgcaactgcccagactcagccactattaatattttttatatatttccttatgttatttctattcataattatgtctgtgatagaataatagcttccccaaaatatccaagtcctaatccttagaatctgtgaacacgttaccctaagtacccaaaggaaatttgcagatgtgattaaggatcatgagatgaacagattatcttggattatctggggtgggcccttataatagggaggaagaaaggtcagatagagagaagatgatgtggtggcaaaagtagctgtctaggatacaggaatatgtgtagcctctggtagctagaaaagtccaggactgaattctcccctagagctttcaggaagaatgcagccctaccaacacctttggacttctgacatccagaattgtaagataataaatttgtgtcattttaagctactaaatttgtggtaaattgtttcggtagcattaggcaattaatactatgtctttaataagcattccttcatgctaaaacatgttttgtgaatactgtaatagctctttaatgttattgctgtttattcttctagactgcaagttgtacaagggcagggaccatttacgtcttgatcaccattatatttccaatgtcttgtctgcagtgggcccttaataattattcatttagtaaatcagtgaatacaccacaatttatctaacttttctttttgagacagtttcactctgtcacctgggctggagtgcagtggcgcaatttctgctgactgcagcctcgacctcctgggctcaagtgatnnnnnnnnnnnnnnnnnnnnnnnnnnnnnnnnnnnnnnnnnnnnnnnnnnnnnnnnnnnnnnnnnnnnnnnnnnnnnnnnnnnnnnnnnnnnnnnnnnnnnnnnnnnnnnnnnnnnnnnnnnnnnnnnnnnnnnnnnnnnnnnnnnnnnnnnnnnnnnnnnnnnnnnnnnnnnnnnnnnnnnnnnnnnnnnnnnnnnnnnnnnnnnnnnnnnnnnnnnnnnnnnnnnnnnnnnnnnnnnnnnnnnnnnnnnnnnnnnnnnnnnnnnnnnnnnnnnnnnnnnnnnnnnnnnnnnnnnnnnnnnnnnnnnnnnnnnnnnnnnnnnnnnnnnnnnnnnnnnnnnnnnnnnnnnnnnnnnnnnnnnnnnnnnnnnnnnnnnnnnnnnnnnnnnnnnnnnnnnnnnnnnnnnnnnnnnnnnnnnnnnnnnnnggggcagttactgccatgctgctattcttgtgatagtgagttctcatgagatctgatggttttataaggggcttttcccccttttgctctacacttctccttgctgctgccttgttaagaaggacgtgtttgcttccccttctgttgtaagtttcctgaggccttcccaaccctgtggaactgtgagtcaattaaacctctttcctttataaattacccagtctcaagtatgtccttataacagtgtgagaacagactaatagacatacattatctcaatttaatccttacaaaaacctcatgactggtaaatgctattattatccccctcgcccaaagtcacatagtgagtaagtggcagaaacccagatctctcagggtccagattcaacactcttaaccacaacactctacagcttgctaaatattggaacatcctgtacatgctgatttttatggctttttttttttttactaaatcacacatattaatatcttcccatgtcattacacattttatttatttatttatttatttatttatttatttatttatttatttttgagagggagtcttgctctgttgcccaggctggagtgcagtggcacaaacttggctcactgcaagctctgccttttgggttcaagcgattctcctgccttagcctcccgagtagctgagattacaggcaccctccaccatgtccagctaatttttatgttttagtagagatggggtttcaccatgttggtcaggctggtctctaactcctgatctcaaatgatctgcctgcctcggcctcacaaagtgttggaattacaggcatgagccaccgtgcctggcccatttttaactatcattaaaacatgttctggccaggtgtggtggctcatgcctgtaatccaannnnnnnnnnnnnnnnnnnnnnnnnnnnnnnnnnnnnnnnnnnnnnnnnnnnnnnnnnnnnnnnnnnnnnnagccagagttgatggtgtgtgcttatagtcccagcaacttgggaggctgaggcaggaggattgcttgagctcgggaggtcaaggtggcagtgagccatgattacaccactgtactccaagttgggtaacaatgagaccctgtctcaaaaaaaaaaaaaatgttgactagtattccattgtctgtatctaccataatttctcagtacgatcttattactactaaataggtcttattactaaacattttagattatttccattataaacttaattcagtttgtttttatttttgatatggaaaattcaaatatatagtgaagtagagggaatagtataaagaactcatgtgtctccatacccagcttcaatctgttatatctatgcccctcacctagttccttccaccttgggcctggattactttgaagcaaattctcagacatcatatcatttcatctgtgaatactttagcattaaacactatttttatactataaaattgcctcagttgcctggattatcttcctaaaaaacacatctgatcagacactcaataaatagctgttgaatggcttaatccctttccctggttgcttgaaaatgcagctgactccctactgtctaaaagaattaataccaaacttctttttttttttttttgagacagagtctccctctatcacccagtcgggggtgcagtggggcgatctcggctcactgcaacctctgcctcctgggttcaagccattatcctgcctcagcctcccaagtagctggaattacaggtgcatgccaccacacatggctaatgtttgtattttgagtagagacagggtttcaccatgttggccaggctggtctcgaactcctgacctcaagtgatccacccaccttggcctcccaaagtgctgggattacaggtttgagccactgcatctggcccaaacttcttaaataggcatacgagaccctttatactctgaccacagcccacttcttcaagcttccttttctgttatttattcccatatatatcttccactccacccaccaaactgctttttgtttcctgactgtagtccacattcttctgacccctatctttgcttaagattccattctttgcctgtgctgttccctttgcatgccacgcccatcacacattttctccgtctggaaatactcattcttcaagctccagctcaaatctcttctgtaaagctctctgcatcacactcaaacatagtcagatgatccctcttcttacttgcagtgcctttgagttatacttttatttttgttttcagtatattgtattgtaattatttaatgtttctgctcctcctatgagttccttcagggcaggaacatgtcttatttgtcttcatcagaccatagcacctagcacagatatgtcaggtaagtgtgcactaagagtttgtaaaataataattaattccacaaatatttattgaatatctgtatgccacgcactgtcctaggtatgcagatatgttggtgaaagagacaaagtcccttttatggagcttaaattttcatagaaagagacataaaatacacgagtaaacaaacagatacagtattttcttacaggaataaatgcaataaagaaacaacaggatgatgaaagagtatcatatagtttgtattttcaagatacttctggctctgtgcattgaatggattataggaatgagagtggaagcagggcaatcagtttaggaggctattacattaatctgagtaagagaatggtggcttgaactaaagtggtggtggtggagatggtgagaaacgcgtagggatttaggatatacttagaaagtggaatcatcacgacttgcccatggaggggagcaagggagaggatatagggcagagagagagagagagagagagagaaacagaaagaaagagaaaaagagaagagaagggaagagaagagaaaagagttgagttttgtttggacataaatttgagatgcctatttgaaatgaataaaacaagagtagcttttggtggtctggcttcattcccctttgtttattgttctctgatatttgggaacggggtgatagaaggaagaaaatcatttctctgtgacattcaagtcgctacagtttacctagggttttcttctatcccaccctttccaaatgttagatggcaacaaggtgttgttcctctcccctctccttccttctttggtttayaaaataaaccgacccacacagctgacccttagcaagggctgtgtaggtctgcgaagtttaataacagttgcagatagattggctaagagaagtcagctggtgggtggcagggcaaataacggcttcatcagagccaaatacggatattagtttccccagtatatatgacaacttgctggtagcaaatgaatcttagaattaagacactgctaaacagtaaagatgattgttcagtattgggtttggctttattttgaaacattagaccctagagtttggatactggcccagtgaggccactggcaaacactattagtgcagattcaggatttttatatttctggaactctacgctatattcttggagactgctgccaaggtgcgcctggccacagaggtctgccttttatgccatagaaaataactgctttttaaaaaaataaatctttaaaagaaaaggtttrttcattgtagtttcttgtctagtttcaggaaggggttaaatttggctttgattagtagtgggtttggatggagttatcataaattgtgtccagaaaaatcagaaaagctatttttttcccaaagccatcttctcaaaagattctattkaaatgttggcccgtcttctctcaggggctgaaagctttgatgttcttctttctctggcttgtggtattgtatcagtaagttaattgctggttcacaacagtttatggttaagtccttggaattagaatttttattccaactgatttacctttgggttgacgagtagcagaaagaaagggttcattgtttctaatctataaggcagaataaataatgcagattggtgggaagcatttcagagcaggcattaaaaatagtaaattatattaataagcaaagcctatccaactccaccctcttgactcttgggatgaaactgataaacaaccatccatgttcttttattggctccaaacacatgcaaccagcagagcgaacaacttgctgctctatgcacacttttccagtctttgtttttacttgcccctaactcagacttacttagatttcaaatgtgaacaacagagtctaacagaattcactgtttgtgattttttaagcaaatggttgttaagaaacatctggttatagttaataaagttcctcctgtgtgtgtgtgtatatgtgtgagatatgttttaagttgtaaggcttattgccacattcaggtcttattcttgtcatgctggtttccagaagataactagttaatcacactagtttcagaatatgaaatgtagaggaattttttcttttcctttttcatttcattctctgtttaccaaacaaaacatgactgactgtttcatcactcttcagacttaataggacagtcacagtttaacagtattctttgttatattggcctatggcaaggaattttagaagttgctgagatcttaattattttgtccagttatttctgggggagggtgggtaatatgcttttggcattggacaggatagttcttcattgtttgtctgggctgggcattgctagatgtttaaatacccgcagccattgtgccaagcaaaatcaactctgcatcttgtcagatgccccccaggagtagtactcctttgagattgaaactactgatctagtttaaacccttcctatttcagaggggaagaccgaggtccagagggacctgttcaaagctacacataactggactgcaacctagctcttctgagtcctagattagtgtcctttctcccaatatattttgaggggcttatttaaatacatttatactgattttttttaaaaaaattatttcaatagtttttggggtacaggtggtttttggttacatggataagttcttcagtggtgatttctgaaattttggtgcacccatcacccaagcagtgtacactgcacccagtatgtagtcttttatctgtcaccctcctcccaaccttcccccgggagaccccaagcctgttatatcattcttatgcctttgcatcctcgtagcttagttcgcacttataagcgagaacatacaatatttgattttccagtgctgagttacttcacttagaataatggcctctaactctgtccaagttgctgcaaaagacaatattcttctttttttttttttttttgagatggagtctccctctgtcgcccaggctggagtgcagtggcacgatcttggctcactgcaacctctgcctcctgcattcaagcaattttccagcctcagccttccgagtagctgggactataggcaactgccaacatgcctrgctaatttttgtagtttttcagtagagatggggtttcaccatactggtcaggctggtctcgaactcctgacctcaggtgatctacctgcctcagcctcccaaagtgctgggattacaggcgtgagccacggtgcccggccaaaagacaatatttcattcctttttatggctgagtagtattccatggttattctgatgttttttgtgcccttagagctttttgactagtgagagggccttcctaggcataagtatgatcaaaaggtggtggaatatggaatttacctaragcataatacaccctcattttaatttaatcaagaaaatttgttgaatgtctgctatgtgacagtctgggaaaatggtagtctcataaccctctacttttgaaataatataaatggaatggggtggtcatatgaaggaaattacttaacaatttagagggtgaccagtttttaaaagttgaaatgcaatgtaatgcttatttcataccggattatttattttctaggaatcaagtataatcaccagcttctttattttttcttcagtcacccctcccccatatacgtttctccccactttccgtttatttagcccaggtcagagtgaagagtgatcaggtaactggcaaasgttcctccttagggaaacaattccaaactcactccctggtcaagttgcttctagatcttggctttgtcaccagtaacactgaggcaaagatataaacagggaacagtcttctctgccatggaatttttgcctcagactaccaaaatgcaattcgttctctcatggatgagagaaagaattgaaagaacaagttggagctctctggggatccctagggggttgtcctcttctggagggccagttgttttccatttactttttcttgttttccatgttgagtttcgctttggaggatgttcctccaacattgcctgtttttttttttttttttttttttttctgggatggagactcgctgtcacccaagctggattgcaatggtatgacctcggctcactgcaacctccacctcctggattcaaggaattgaatccagcctcagcctcctgagtagttggggttacaggagtgcatcaccatgcctggcgaattttcttattgtatttttagtagaggcggggtttcaccatattggccaggctggtctcaaactcctgacctcaggtgatctgcccaccttggcctcctaaagtgctgagattgtaggcgtgagccaccacgcccagccaaacactgcctgtttaattcctttttgtcatgccaaaatgctctctgagatgacttagcagtctgcacttggtctgagatgagaggtgacctatttttctcctccttcatttctgatcctattcaatagcattttttttctttatttcttggtagagatggagtctgtctatgttgtccaggctggtcttgaactcttgcctcaagtgatcctcccatctcggcctcacaaagtgttgggattccaagcctgagccactgaacttggcctcagtagcattttcagtgttagctccatccttagtatgatgaccctcattcttcctcccaagtgggccacacgctacagagatcttgcctatcaccgaaaacaaaagtggacttcatgaattctatgggctttgaccaaatagtgttaataacttgcttttggggagagccccttttctgttctactctctgttgcaactcatctatagatacaagatctattctttttgtgggggtttaaaaaacaggtttactgggataaaattcacataccataaaattcacctatttatartgtctcattcaatgttttgtggtatattcacagagttgtgcaaccatcaccacaatcaattttagagtattttcatcactccaaaaagaaaccttgtacccattatgaagacggcctactcttaaacttagttcattatcaataataataatatttggtgagggcttattctgtgcattaggctgagtacttgcctttgttatctcatttaatacttaaaaccatcctgtgaattagggactaatattattcccatttttacgatgaggaaactgaggcatgtagcagtttaaaacttgttcctatccaaactggttgtacatggtgaatcctagattctaacttaggccatctggtgccatagcattttattttattttattttattttattttttttaagacagagtctcactctgttgcccaggctgtagtgcagtggcccagtctcagctcactgcaacctctgcctcccagattcaagtgattttcctgcctcagcctcctgagtagctgggactacaggygtgtaccaccacgcccggctratttttgtattttagtagagacggagtttcaccatgttggccaggctggtcttgaactcctgacctcaaatgatccacctgccttggcctcccaaaatgcttggattacaggtgtgagccattgcacctggcctggtggcattgcttttaacaaatcataacactgtcacattttgtttataggatrggaccaagcacagttttcactccttttcatttacatgaactataatttgagattttctgtcataaacaggtcactgagtcagtatttattaatcacttgttacttataccatacactgggacagaagcaatgtgggatgcagagaggggagagaaagaaagagacagcgagagagagagagaaagaaagaaagggaagaggagagaagagagagagagattggccctatcctcaagaagcttgccatctaattggtatggctggtccaccttgtagagccacacttgagagatgccatacacatgccacagatggttggtactgttaagctctgtagaaggagacattaatgtgggttggagtgatgagagaaggcttcctgaaagaagtggtctgtagcagaacctaggtgaacctaggtggaaataaaatcaaatggataggagtgggaatgccaggaagtatgttggaaggaccttgaaataggttggagatggttgggagacctttgtgcaaatcagactgtggagggccttgcatgtcagacaaaatagtttgttaaatgaatgtttaacagacatttgttgagcgcttactatgtgccaagcactcttgcagccactgggggtagagcagtgggcaaaatacaaaaaaatccctatcctcaaggaaattgaattctatttggggaaatagatgaaaaacaaataagttagttgtatgatcagataatgtgaaaaaacaaagaagggggcataggaagtgtcatgtgtagggggtagtggctacatatttggattttgaaatttttcatttagatagctgacagccattgacaaacttctcatactatgttttggcatggtgtttatccttgcgattgcctaagagaaggagagctttagaagtgagaagtgagtcttggagaggcttagaggcaggtaggaagctctagggcaagtgggagccaggtgtagcctctgagtcttgcagctgtggtacagtggaaaaagcactggatttggatacatacactttgaactctggcaggaaccttaggtcacttcacttctctaagctttgtttcctcttctgtatagtggggataggagcacctaaccaacaagtgttatcaagattatttgagaaggtgaccacatagttggaagtaaagctctactcagcaaatgtaaaagaacagaaattataacaaactgtctctcagaccacagtgcaatcaaactagaactcaggattaagaaactcactcaaaaccactactactacatggaaactgaacaacnnnnnnnnnnnnnnnnnnnnnnnnnnnnnnnnnnnnnnnnnnnnnnnnnnnnnnnnnnnnnnnnnnnnnnnnnnnnnnnnnnnnnnnnnnnnnnnnnnnnnnnnnnnnnnnnnnnnnnnnnnnnnnnnnnnnnnnnnnnnnnnnnnnnnnnnnnnnnnnnnnnnnnnnnnnnnnnnnnnnnnnnnnnnnnnnnnnnnnnnnnnnnnnnnnnnnnnnnnnnnnnnnnnnnnnnnnnnnnnnnnnnnnnnnnnnnnnnnnnnnnnnnnnnnnnnnnnnnnnnnnnnnnnnnnnnnnnnnnnnnnnnnnnnnnnnnnnnnnnnnnnnnnnnnnnnnnnnnnnnnnnnnnnnnnnnnnnnnnnnnnnnnnnnnnnnnnnnnnnnnnnnnnnnnnnnnnnnnnnnnnnnnnnnnnnnnnnnnnnnnnnnnnnnnnnnnnnnnnnnnnnnnnnnnnnnnnnnnnnnnnnnnnnnnnnnnnnnnnnnnnnnnnnnnnnnnnnnnnnnnnnnnnnnnnnnnnnnnnnnnnnnnnnnnnnnnnnnnnnnnnnnnnnnnnnnnnnnnnnnnnnnnnnnnnnnnnnnnnnnnnnnnnnnnnnnnnnnnnnnnnnnnnnnnnnnnnnnnnnnnnnnnnnnnnnnnnnnnnnnnnnnnnnnnnnnnnnnnnnnnnnnnnnnnnnnnnnnnnnnnnnnnnnnnnnnnnnnnnnnnnnnnnnnnnnnnnnnnnnnnnnnnnnnnnnnnnnnnnnnnnnnnnnnnnnnnnnnnnnnnnnnnnnnnnnnnnnnnnnnnnnnnnnnnnnnnnnnnnnnnnnnnnnnnnnnnnnnnnnnnnnnnnnnnnnnnnnnnnnnnnnnnnnnnnnnnnnnnnnnnnnnnnnnnnnnnnnnnnnnnnnnnnnnnnnnnnnnnnnnnnnnnnnnnnnnnnnnnnnnnnnnnnnnnnnnnnnnnnnnnnnnnnnnnnnnnnnnnnnnnnnnnnnnnnnnnnnnnnnnnnnnnnnnnnnnnnnnnnnnnnnnnnnnnnnnnnnnnnnnnnnnnnnnnnnnnnnnnnnnnnnnnnnnnnnnnnnnnnnnnnnnnnnnnnnnnnnnnnnnnnnnnnnnnnnnnnnnnnnnnnnnnnnnnnnnnnnnnnnnnnnnnnnnnnnnnnnnnnnnnnnnnnnnnnnnnnnnnnnnnnnnnnnnnnnnnnnnnnnnnnnnnnnnnnnnnnnnnnnnnnnnnnnnnnnnnnnnnnnnnnnnnnnnnnnnnnnnnnnnnnnnnnnnnnnnnnnnnnnnnnnnnnnnnnnnnnnnnnnnnnnnnnnnnnnnnnnnnnnnnnnnnnnnnnnnnnnnnnnnnnnnnnnnnnnnnnnnnnnnnnnnnnnnnnnnnnnnnnnnnnnnnnnnnnnnnnnnnnnnnnnnnnnnnnnnnnnnnnnnnnnnnnnnnnnnnnnnnnnnnnnnnnnnnnnnnnnnnnnnnnnnnnnnnnnnnnnnnnnnnnnnnnnnnnnnnnnnnnnnnnnnnnnnnnnnnnnnnnnnnnnnnnnnnnnnnnnnnnnnnnnnnnnnnnnnnnnnnnnnnnnnnnnnnnnnnnnnnnnnnnnnnnnnnnnnnnnnnnnnnnnnnnnnnnnnnnnnnnnnnnnnnnnnnnnnnnnnnnnnnnnnnnnnnnnnnnnnnnnnnnnnnnnnnnnnnnnnnactttcttcacagaattggaaaaaactactttaagttcatatggaaccaaaaagagcccgcattgccaagtcaatcctaagcaaaaagaacaaagctggaggcatcatgctacctgatttcaagctatactacaaggctacagtaaccaaaacagcatggtactggtaccaaaacagagatatagatcaatggaacagaacagagccctcagaaataacgccacatatctacaactatctgatctttgacaaacctcacaaaaacaagcaatggggaaaggattccctgtttaataaatggtgctgggaaaactggctagccatatgtagaaaggtgaaactggatcccttccttacaccttatacaaaaattaattcaagatggattaaagacttaaacattagacctaaaaccgtaaaaaccctagaagaaaacctaggcattaccattcaggacataggcatgggcaaggacttcatgtctaaaacaccaaaagcaatggcaacaaaagccaaaatttgacmaatgggatctaattaaactaaagagcttctgcacagcaaaagaaactaccatcagattgaacaggcaacctacaaaatgggagaaaattttcacaacctacttatctgacaaagggctgatatccagaatctacaatgaactcaaacaaatttacaagaaaaaaacaaacaaccccatcgaaaagtgggtgaaggatatgaacagacacttctcaaaagaagacatttatgcagccaaaagacacatgaaaaaatgctcatcatcactggccgtcagagaaatgcaaatcaaaaccacaatgagataccatctcacaccagttagaatggcaatcattaaaaagtcaggaaacagcagatgctggagaggatgtggagaaacaggaacacttttacactgttggtgggactgtaaactagttcaaccattgtggaagtcagtgtggtgattcctcagggatctagaactagaaataccatttgacccagccatcccattactgggtatatacccaaaggagtataaatcatgctgctataaagaaacatgcacacgtatgtttattgcagcattattcacaatagcaaagacttggaaccaacccaaatgtccaacagtgatagactggattaagggaaatgtggcacatatacaccatggaatactatgcagccataaaaaatgatgagttcatgtcctttgtagggacatgggatgaaactggaaatcatcattctcagtaaactatcgcaagaacagaaaaccgcacaccgcatattctcactcgtaggtgggaattgaacaatgagaacacatggacacaggagggggaacatcacactctggggactgttgtggggtggggggaggaaggagggatagcattaggagatatacctaatgctaaatgatgagttaatgggtgcagcacaccagcgtggcacatgtatacatatgtaactaacctgcacattatgcacatgtaccctagaacttaaggtataataataataataataaaaaataaaaaataaaaaaataaaaaaaaagagaaggctgggtgcagtggctcacacctgtaatcccagcactttgggaggctgaggtgggcggatcacgaggtcaggagatcaagaccatcctggctaatgtggtgaaaccctgtctttaccaaaaatacaaagaattagccgggcgtggtagcgggcgcctgtagtcccagctactcgggaggctgaggcaggagaacagtgtgaagccgggaggtggagcttacagtgagctgagatcgtgccactgcactccagcctgggcaacagagtaagactccatctcaaaaaaaaaaaaaaaaaattagctgcatgtgttggcgtgagtctgcaatcccagctactcaggaggctgaggcaggagaatggcttgaacctgggaggcggaggttgcagtgagccgagatcgtgccactgcattccagcctgggtgatagagtgagactccatctcaaaaaaaaaaaaaaagattacttgagataatgtgaatgaaaccttcattagttgtatagtcatctacaaatatgaaaagttagcccttgtggacagtgcctgtgaaaattgtaatgctgttcttttaagtctttccaggaatctgatagtggtaattgaatttttcatgtcaacaaagtcataaatcagaattttaaatcacaaagcacagttggtacaaggcactctataagaggtactgagctagatggtgggagggtagtggtggccaaggcagccttcagggagttttctttgtgctatgtttaagtctgccagcatggaataagggaagcatgactgaggagtaggtgcttcatgcagtgtggccacactccttctgtggccttgcctctgccctttatagcaaccagtaacacacccaccaaacagaaccatgtgtagttccatgatctttctctttctttatctctgtttcctatctctttctccctttccatctcatttatctctctatgctcccccaatccccaattcattcctttacacctacttccatctgcctgaagtgctcttccgtgccatattttccaggcaaactttaagttcacatcctcagcttctgtttcccctcctctagaaagccttctctgatctttctgctgtccaagtgattgcattgaattgcagttgttccatttgagtctccttcactagaatgagttccttgagggcagggattgtgctttgtctgtctctgggtccctggttcttagtgctaggattggcattaaggaaatgcttgctgacttgaaataattgtaaaagtggaagactrtatagataaccaagatttatctaggaactccttcargacttctctatttatacatcttttatgaactgaatcataaaccacagatccagtgactgaagagcagatcagggggaggctatagaatatggtaataaggctatattgcaaagtattgcaaacataattctagagtcagactacgttatagctccttcacttcctagctgtgggacctggaaataagtcgtttcatctctctgtgcctcagttttctcatccataaaatgaagattataatagtccctactttgtagggttgttttgagaattatataatttaatatacataaaatgcttaaccaccctgggcaacataggaagaccccgtctctacaaaaaattaaaaaaaaaattagttgggtgtggtggcatgtgcctgtagtcctagctagtcaggaggctgacatgggatgatcacttgaacccaggagttcaagaccatcctggacaacagaggaagaccctgcmtctacatagaaagagaagaaaaagcggagacagttcctggcacctagcaagcactctgtaaatgttagctcttctcatctaagtaaaatagaggcatattcaaataaaggaagtttggaataagtctagagatcatttttttctcctcagggatccctgttctgaatctttttttcagatccctgttctgaatcctctcacctcagcctcccaagtagctaggactacaggtgtgcacctccatgccctgctaagttttaaaatatttttgtaaagagaccagttctcgctatgtttggcaggctggtctccaactcctggcctcaagtgatcctcctgcctcagcctcccaaagtgctggggttccaggtatgagccaccatgtctggcacattttcagtttttcatgattacagatagagctgctgtaaacattattatatgtttttttttgtgtgtgaacacacattatttctagagggtaaatgcccatgggcaggactgtgagctcatatatgtacatgtttaattttataagaaactgccaaaccattttctagagtggctgtgacaatttatattcccactagcaatgtataagaattccannnnnnnnnnnnnnnnnnnncagcttctctctatccttggcagcacatggtatggccactttgttattttagccttgctaataggtgtgaagtggaatcttgactgggtgttagtttgcttttccataatgactaatgacgttgaacgtattttcaggtgcttaattgccatccaatgtatctttggtcaaatatctgttcaaatattttgcctactaatgtaatttgttgttaattttctttattgaatcttatgtattctgtttacataacaaaataataaagtttagtgaatcttttatgtattctgagtatgggttctttgtcagatatacgatttgctaatattgtcttctagttggtggcttgtcttttctaaaatcgtcttatgaaaaaaattagccaggcatagtgatgcatgcctgtagtctcagctatttgggaggctgaggcaggaggattgcttcagctggagagatcaaggctgcagtgagctacgatcatgccactgcactccagcctgggtgaaagaatcagaccctgtctcaaaaacaaaacaaaacaaaacaaaaccccaaatcctcttattagggtctttcatagagcaaaatattttaattttgatgaagttcaatttatttagtgatttttttttttttttttgagatggagtctcactctgttgccagcctggagtgcagtggcgtgatctcggttcactgcaacctctgcctcccaggttcaagccattctcctgcctcagcatcctgagtagctgggactacatgcgtgcggcaccacgcccagctaatttttgtatttttagtggagacggggtttcaccatgttggccaggatggtcttgatctcttgacctcgtgatccgcccgccttggcctcccaaagtgctaggattacaggcatgagccaccgtgccctggattgtgcttatggatgcctgagaatatttcacctaaccctagatcatggagattttatcttatgttttcttctagacattttagcattttaggttttatatttagatttgttatgtattttgagttatatttttgtgtatggtgtgaggtttatttagaagtttttttttcttcccccaattgtactagcaccatttgccacaacttaactgtgacaacttagaaatcacttaacctgtcatggcctcactcttcttttctctaaaatggggataataatagcatgtagttcatgtggttaaaggaaagattccagactactatttacatatataaatgcctagcacacaacaaacagttattattagtattcattttatagagtttcaaattttgaggtttaatttcatgattgacaaactttgataacatgtaatacacattgtcccttttcatcccttccaaggatgttggagtacgtgggccagtgctgaggtagggttctggtagatgggttttattgggatgatggctgaaaccacttgtagtcaagaaatgatagtagtttccagctgggaggggaactgaggccagagtcagttcaataaaggcaagagtgtgtagccagaaacacaaaatgaaaaatgaagtcatatgtgatggattaaatgggtaaaggaaaagggttctggaccctgactgtgaataaagcaagatgttggggctccctcttacagaaggaacactggtcctttattcttgtttaaaagtgtcgaacttggtttttctcttcaagatgcccttcagtactgcgttgggagcctcttgccctgttctccaaacaaattcagtctaagaccatgttttgctgtgagctctgctgctttggtgtcaaaacctggtaatgtgccagttcccctttggggaggctttctaaaacatactgctcagcagagctgaaaaggctgaagaaccttctccagaaggtgattgtgcctgtggtaggtcttggtctgggagccatttccaaagctggataccacagctactttgtccatcctcactatgctccctggcactccatgccatgtaggctccccagcaactctcctttgtctccccgagaaagagctgacagttgcaatgtcttttttttttcttaaacttcctctttgatcagtgttttgagatcctaggtgaatacgttttttgtgacaagcatgtgcaagatacgcagaaaggaagtaatgctatggaaaagttgtagtcacaaccagtgtgaccagagatcattatcagtctggtcaagtcactcctgcttggagtagtgtcactggaaactgacactgcaattgacatggtctttgagcttccagatgtggcaaaacaaatgttttattgtacagcaccgaagacacaacttagtttggtgttttatgtgtacatctccaagataataatggcacctgacttcagcccttcgtagtttagaaagtcctgtcatgtttcctatttaatttgattcttacaataagaatgagagagataggacagggattattattcatgttttacagatgccgaaactgtcagggaggcagagttggaggggtacacagtggtcaagagcataggttctgaggcatatttcggtaaaatatataacaacatttttgattttgaccatttgtaagtatacagatcagtggcattggttacattcataatgcaatataacccactgtgcccggctgtggatttctgttgatgtggaaatatagttgttccagttccatttgttgaacagactcttctttctctgttgaatggatttgccttctgtgtcgatttttgacctaaggtctcttttgtctgatattagcagagccacttcaactctcttttggttactattttcatggaattgctttttgcatcttttaagtttcaatctatttttgtctttgggtcaaaagtgagtctgttgtagataacatatacagtcatgtgtcacttaacaatggagatacatgggtgggcatggtggctcacacctgtaatcccagcactttgggaggccgaggtgggtggatcacctgaggtctggagtttgagaccagcctggccaacannnnnnnnnnnnnnnnnnnnctggccaacatggtgaaaccccgtctctactaaaaatacaaaaattagccgggtatggtggcacatgcctgtagtcccagctacttgggaggctgaggcagaagaattctttgaatcctggaggcagaggttgcagtgagccgagatcgcgccactgcactccagcccggcagcccgggtgactgagtgagactccgtgaaaaataaacaaacaaacaaaaaacggggatacattctgagaaatacgtcattaggcaattttgttgttttgtgtattgacacaaacctgtatggcatagcctactataaacctaccaaggctatatggtacagtctattgctcctaggctacaaacctatactgcatgttactgtactgaatactataggtaattataacccaacagtaagtatttatatatccaaacattgaagagggctgggcacagtggctcatgcctctaatcctggcattttgggaggctgaggcgggtggattgcttgagcccagcagttcaagaccagcgtgggcagcatggcaaaactcggtctctataaaaaaacacaaaaattagcatggtgtggtggctcacgcctatagtcccagttactcaggaggctgaggtgggaggatcaattgagcctgggaggttgaggcttcagtgagccgtcataacgctactgcactccagcctggctgacagaacgagacctttttttggaaaaaaaaaaaaaaagaaagaaaaagaaaaaacttgaaaggtataggaaaaatatggttatataatgttatggaaccactgttgcatatgtggtctgtcattgactgaaacattgttgcatataactgtagttagatcctgctttttaatccatattgtgggtctctctgcctttgtattgcagagttcacaccatacatttaaagtaattactgataaggaagggcttacttccgacattttggtttttgttttctgtatatcttttaacttttacatcctcattttctcgattactgccttcttttgtattaattgatttttttgtagtggaccgttttgagtcccttcttctttttatgtttatattttatttgtggttaccatggggattacttttaacatcctaaatttataacaaatgagtttgaattgataccaacttcacacttataaaatacaaatctccactcttttacagctctgtcccctctcctgtgtattgttgtgacaaattacatctttctacatactatgttcaataacatagatttataattattttaaagcacttaaaaacaaagtaggatataaaaaagtagagttataaacaaaaagttcgataatgctggcttttatatttgcctgtgtagttacctttaccagagatccttatgtcttaatgtggttttgagtaactgtctagcatctcttttttttttttttttgagacggagtctcactccattgcccargcttgagtgcagtggtgctatctcagctcactgaaacctccacctccccggttcaagcaattctcctgctttagcctcccaagtagatgggattgcagggtgtgtaccaccacacccagctaatnnnnnnnnnnnnnnnnnnnnttccaagtgctggggattacaggtgtgagccctgtgcctggccggttgagcatctttttatttccactcaaaagatccctttagcatttcttgtagggcaggtctattggtaatgaactcctgcagcctttgtttatctgggaaggtcttactttctccttccgttttgaaagaccattttgccagatgcagaattcttggttgacaggttctatatatatatatatatatatatatatatatatatatatttcagcaatttatgccatcccactgtcttctggcctctgtagtttctgatgagatattggctgttagtcttaatgaggagccttatacatggtaagttgcttttttcttgcagctttcaagactgtctgtcttttgacaatttgtttataggatgcctcagtgtggatctctttgaatttatctttcttgagtttaagcttcttagatgtctagattcatgtctttcatcaaattggggacatttttggccattatttctttaaacattccttttgtccctttttcttcactttctggcagtctcacagtatgtaattttgtctgcttgatgatgtctcaatgacccttagactgttaatctttaatttctctatcttagtgatattgycattttcctgattttttgttctgcatgttttcctttagctcttttagcatatttaagrcagtgtttttgaagtctttgtctactaaatctgatgtctggacttcctcaggaacagtttcagtcagtttattttgttctttgagtaggctgtactttcctgtttctttgtttgtcttgtgatttttttgttgttgttgaaaacaatgtttgaatattataatgtgttaaccctggatatcatattctctcccttctccaggagttgctggggttttttctgtggttgttgttgttgttttgtagagatgaagtcttgctatgttgcctgggctggttttgaactcctgatctcaagtgatcctcctgcctcagcctcctgagtagctaggactaagagatgactagatttttttttttcgaggagtctcactctgtttcccaggctggagtgcagtggtgagatctcggctcactgcaacctctgcctcccgggttcaagcgattctcctgcctcagcctcctgagtagctgggactacaggcacgtgctaccatgcctggctaattttttgtatttttagtagagatggggtttcactgtgttggccaggatggtctcaatttcctgacctcgtgatccacctgccttggcctcccaaagtgctgggattacaggcgtgagccactgtgcccagcaattttttcttattgttaaaattcttagtagtattttggtttacttacttttccannnnnnnnnnnnnnnnnnnnnnnnnnnnnnnnnnnnnnnnnnnnnnnnnnnnnnnnnnnnnnnnnnnnnnnnnnnnnnnnnnnnnacatggttgcgtttttttttgagatgggggttctcactgtgttgcccagactggagtgcagtggtgtgattatggttcactgcagcctctgcctcctgggctcaagtgattctctgcctcagcctcatgaatagctggaactacgggtgcacaacaccatgtccagctaatatttgttttttgtttttattatttgtgctgatgaggtcttgctatgttgcccagggtggtctccaactcctgacttcaagcgatccttctgcctcggtctcccaaagtggtgggattacaggcatgagccaccatacctggccagcagttgcttttgaaygtcctcattgtccaaggaaaccattcatctgccccccatcagctttttctcccatgtcttagccagtgtattgtttgtttcaactataataatatggcccagacatctgagggttattaggtcagcgtgcagtgtttttgggcactactcaccatttctagcttgagttttgtattaggtaaaacaaacacaagtgcctggccttagttcttcaggtagcctccagactagtttgaacagttgtgtattagtctgttctcacaatgctataaagaactgcccaagactgggtagttcataaaggaaagaggtttaattgactcacagttctgcatggctggggatgcctcaagaaacttacaatcatgaccgaagacacctcttcacagagtggcaagagagagaatgagtgcccagtgaaggaggaagccccttataaaaccatcagatctcatgagaactcactcaccagcccaagaacagcaggggggaaactgcccccatgattcaattatcccttgacaggtggggattattacaattcaaggtgagatttgggcgggggcacagagccaaaccatatcaagaagtatacaataatttgtatttaaggtttgctctattccctctggaatcagggtacagggttgcacactgggaacgtaggctaccatcactttaaaacaaaaaatgccactgtgctagagaaagggtgggttaaaggcaagtaaaaatgccacaaaactttcctaccattttgaggtgacctgttttatgattcagcattcacttgggtcacgtaaagttttgacttttttccagagttcaataaagttgattctgagagtttctgcttgtgttttttttttttttttcccgagacagagtcttgctctgttgcccaggctggagtgcagtggtgctatctcggttcactgcaacatctgcctcccgggttcaagtgattctcctgcctcggcctcctgagtagctgggattacaggtgcacaccagcacaccctgctaattttttttgtatttttagtagagacatggtttcatcaggctggtctcagactcctgacctcaagtgatctgcctgcttcagcctcccaaagtgctgggattacaggcgtgagccaccatccccggcctctgcatgtgtttttgatgtttctgtgggagaacaagagcttggagcttcctggtccaccattttgctgatgtcactctgactactctttttaatccacactccctaacttacagtagcgtcctggctccactctgtaaccttgaactagttacttaacctctctgttttctttagtgcaaagttgggtataaagatagtacctacctcaaaggatagttgtaagaattaaataacataattcatgtaaagacattagtatagtgtgtggtaagttaagtgctcaataaacgttagttatctttggaaattacaccataattatatgtaccactaagaaagaacaaaatgtcagttagcatgtggcatgccattgatagtaaaatgtannnnnnnnnnnnnnnnnnnncagcctggccaacatagtgacaccctgactctacacacgggcacacacatacctgcacatacacacaaattaattgtctgggcatagtggtgaacacctgtagttccagctacttgggaggctgaggtgggaacattgcctgagcctgggaggtcaaagctgcagtgagccatgattatgccactgcactccagcctgggagacagagtgagaccctgtctcaatttagaaaaaaaagtcaaataggtgtattttacaactgattaattatcatatcaccatcattatcactatgattgccaggcctcacctggtgcaggttttacattttgcaggcaaggcagctaggcctagagatggtaagtgacttgctcatggatttgtaggcatttatgtcatagccagatctggatcaggttccctgactcttattctgggtacccagagagactggggccccagtctctcacaactagtagtttatattataaatactattctgttatgtctcactgttgtaggtgtgttagattttcgtcagcaatgtgctcaaagtgagaagaataggaggaatttgttttttttttttggagaaaaagttgctgaagtctagctgggtaagttgagtcttttctgagagcatgagtgtgggattaaaaatcagatgtcactctcttgccatgagaccttggatagtcacttagtctctttgagccaaacagtgttagaaatctccaaaaaaaaaaaaaagggaataattgctactccatagagttgtttcagagtgtgaaatggcatcacttctaagaatactgcctggcacatggtagatttccactcagtgttggttctcttttctactcctttgagagaagtgggctcagtgacattctccctgctcagctcaaactttgtttatgtttatgagtgtgtagaattagatcaacattgttctctgtggcggatttgttagtggctgagggaaaggtagcagctggatgctgtaattctctcgagagacattcctactgctgagtgaggaggagagcacagctgtttgtggaraatgaacaaaatggtaattgcctcgtgtcagctggtacattctgagacttttgctcttgttgatgttttcttcagtggctgccttatgttaaacatgcccctacccatttgctgcactggtcttgttccagcttcttcaayatgctacgtaggctctttcatctcctataccttgctcacgtggtttctctcaaattccaattttttttttttcctttttgtacctagcaaactcctacatatcctttaagtctctgctcaaatgtcatttcttttgtaaggccttgttgaatgactcttttgaagagtaacattattcctatatctggaaccgcatggtataatttatttgtttaaatgcatttctcctctattagcgtctatgttcatttgaagacagtggccatgtttatttcttctttgtattgcacaggcctagcacatggagcagttatcatagctgaagtttactattgtccatattatctcacaggctttcacactcaccctgtaaagtagatactgttgttattcccattgcacagatgaggaaagtgaggattagagaagttaggtaaatcatcaaggatcacagggcaaggtgattgaggagcatgtagtagaaatttgttgtgactccaaggtcatgctgttaacctctgtgctctagcatggtgcagtccaatagaactttctgtgattatggaaatgtctgtgtgttctttgcaatatagctactgagcacttaaaatttgcctagtgtgattgatgaaatatatttttaattttattaaattttaatgagttgaaatttaaatagccacatgtagaaaactgaactctgatctcttaatggctgtctagcattttcttttagccttaactcagaatttctctcaactgttcttatttcatcaattactctattaaagaaactgaattacatcctgatggaaacagaatgatctccttttcttaagacagttatgtatcttttagcagtctatcgttattatttagagttggtgttaaggctgtagaaattggaaaagttgttgggaataaatgttgtcatcactcttaaacccagttttcgactatattaagtataaagtacaaagatgaaacagattgcaatagatttctgggggaaaaatgttacttctctggctaacacacaaataggcaaaaataattattccaaaggaagtttaaaatcacagggatactacagtctagaagtgtcccatcaaagacacttgctgttgggctgaaggaacaggaagttatgaaaagcactcagtgcctaaagtcactgttgacatgtcaagaggtcctagagaataatccaagannnnnnnnnnnnnnnnnnnnnnnnnnnnnnnnnnnnnnnnnnnnnnnnnnnnnnnnnnnnnnnnnnnnnnnnnnnnnnnnnnnnnnnnnnnnnnnnnnnnnnnnnnnnnnnnnnnnnnnnnnnnnnnnnnnnnnnnnnnnnnnnnnnnnnnnnnnnnnnnnnnnnnnnnnnnnnnnnnnnnnnnnnnnnnnnnnnnnnnnnnnnnnnnnnnnnnnnnnnnnnnnnnnnnnnnnnnnnnnnnnnnnnnnnnnnnnnnnnnnnnnnnnnnnnnnnnnnnnnnnnnnnnnnnnnnnnnnnnnnnnnnnnnnnnnnnnnnnnnnnnnnnnnnnnnnnnnnnnnnnnnnnnnnnnnnnnnnnnnnnnnnnnnnnnnnnnnnnnnnnnnnnnnnnnnnnnnnnnnnnnnnnnnnnnnnnnnnnnnnnnnnnnnnnnnnnnnnnnnnnnnnnnnnnnnnnnnnnnnnnnnnnnnnnnnnnnnnnnnnnnnnnnnnnnnnnnnnnnnnnnnnnnnnnnnnnnnnnnnnnnnnnnnnnnnnnnnnnnnnnnnnnnnnnnnnnnnnnnnnnnnnnnnnnnnnnnnnnnnnnnnnnnnnnnnnnnnnnnnnnnnnnnnnnnnnnnnnnnnnnnnnnnnnnnnnnnnnnnnnnnnnnnnnnnnnnnnnnnnnnnnnnnnnnnnnnnnnnnnnnnnnnnnnnnnnnnnnnnnnnnnnnnnnnnnnnnnnnnnnnnnnnnnnnnnnnnnnnnnnnnnnnnnnnnnnnnnnnnnnnnnnnnnnnnnnnnnnnnnnnnnnnnnnnnnnnnnnnnnnnnnnnnnnnnnnnnnnnnnnnnnnnnnnnnnnnnnnnnnnnnnnnnnnnnnnnnnnnnnnnnnnnnnnnnnnnnnnnnnnnnnnnnnnnnnnnnnnnnnnnnnnnnnnnnnnnnnnnnnnnnnnnnnnnnnnnnnnnnnnnnnnnnnnnnnnnnnnnnnnnnnnnnnnnnnnnnnnnnnnnnnnnnnnnnnnnnnnnnnnnnnnnnnnnnnnnnnnnnnnnnnnnnnnnnnnnnnnnnnnnnnnnnnnnnnnnnnnnnnnnnnnnnnnnnnnnnnnnnnnnctcatatacctcccaagccccctcctccggtttcccctcattaacatcttgcattagtgtgagacatttgttacaattgatgaaccaatattgattgctacattattattaaagtccatagtttacattagaattcacactttgaattacatgctaagacttttgacaaatgcgtagtgacatgtatccaccattacagtatcatacagaatagtttcagtgctgtaaaccccacccccaaccccgtgcctcacctagttatcccttcctctttccctttgagctcctggatgtacttcatgatgctttcatctatgtatacacgtagaacggctaaatcaagctaattaacatactcgttacctcacgtacttattttatggtgagaatatttaaaatctactttatttgcaattttcatgtatacaagacattgttattatctataatcacatgcttgacaatggatctcttgaactcattcctcctgtcaatatgaaattttgtgtcctttgaccagcatcttcccaatctcttctcatccccctgctaactatcattctactctctacttttatgagttagactttttaggattccacatataagtagatcatgcagttttcacttcctgtgcctggcttatttcactagcataaggtcctccatgttcatccctgtgttgcaaatgtcaggatttccatagcaagaacacaatcaacagaatgaggagacaacttatgaaatgggataaaatatttgcaaaccatacatatgataagagtttaatatccaaaatatgtaaggaactcaggcaactgaatagtaaggaaatgaataacctgatttaaaaatagacaaaggacctgaaaagacatttctcaaaagaagacatataaatggccaacaggtatatgaaaaaaatgctcaacattagtagtcatcagggaaaggcaaattgaaatcacaaccatataccacctcctacctgttataatcactattatcaaaaagatgaaagagataagtgttggtgaagatgtggataagtgtgtacactttgtgggaatgttaattagtatggccattattgaatacagtatgatatttcttcaaaaaattaaaaatagaactatccaaaggaaatgaaattggttgttgaagggatgtctgcactcctgtgttcattgcagcatcattcacaatagccaatatttgtaatcagctcgagtatctatcaataggtaaagaaaacgtggtatgcatacacaacaaaatagtattcaggcttctgtaattttaattgagcatttgtagggttccattttctctcagcatattaattatacttcttttaaatctttttattttattttacatatatacatatatatwttttttattttttatttttattttttttttcagatggagtcttgttctgtcacccaggctagagtgcagtggtacaatctcagctcactgcaacctctgcctcccaagttcaagggattctcctgtttcagcctcccgagtagctgggactacaggcgcccaccaccacacccagctaatttttgtatttttagtagagatagggttccaccatattggccaagctggtctcgaactcattaccttgtgatccgcccaccttggcctcccaaaatgctgggattacaggtgtgagccactgtgcctggccttatttttatttttaagactactcaagtgcagtagtgagaagggggcaaagagtagaacaagaagtttgatttgtaactgactgtgaacaatcagttgagataactcactaccctcagaccagcccttcttttaaaactttttttggtgtttgccctagagtttgcaatgtgcatttagaaagagccaaatctattttcaaataacgctacactatttcacaggtagtgttagtatcttatagcagaagattaccaatttctttctcgagtcccttatgatattgttgtcattcatttcagctatccatgcactgtcatcactgaatacattgtccctatcattattttaagcaaatggtcatctgttttttgtttctgtttttggtggtttttgtttgtttgtttgtttttgggtggagccagggtcttgctctgtcacccaggctagagtgcagtggcatgatcttcactcactgcaacccccacctcccgggctcaagacatcctcctacctcagccttccgagtgggtgggactaccggcatgtgcctggctgattttttgtatttttggtagagacagggtctcactatgttacccatgctggtcttgaactcctgagctcaagcgatcctcccacctcagcctctcagagttctgggattatagttgtgagctactgtgctggttatctattttatcaacagctggacatggtggcttatgcctgtaatcccagcactttgtgaggttgaggtgggaggactgcttaagcctaggtgtgaggcaccacggggagttcaagaccagcctgggcaacataatgagactctatttctacaaaattttcaaaattagctgggtttggtgccgcgtcactgtagtcctacctacttggaggctgaggtgggaggatcacttgaacgcaggagtttgagactgcagtgagctatgatcgtgacactacacttcaacttgggagacagagtgagatctcatctctaaaaaagacaaaacaaaacaaagcacctcgagccactcattttaagagttgagctgatttacgtagtgctacccaactatattttcctgtatatgtaattgcagacactgttctaagcactttacacatattaacttatttaatcctcacaggaaaacttataaggttggtgctgttaggatgaccattttacaaaggaggaagctgaggaacagaggggttaagtaacttgcctaatgccacagagcaattacatttcagcctggtgatttgaacttaggcattctggctctcatgctgtactaggcaattcttttttttttttttttttttttttttttgagacggagtctcgctctgtcgcccaggctggagtgcagtggcacgatctccgttcactgcaagctccgcctcccgggttcacgccattctcctgcctcaacctcccgagtagctgggactacaggtgcccgccaccatgcctggctaattttttgtatttttagtagagacggggtttcaccgtgttagccaggatggtctcaatctcctgacctcgtgatccgcccaccttgatctcccaaagtgctgggattacaggcttgagtcactgcacccggcctgtactaggtaattcttagctggtggtgagacatcactactaaatgtggatgggatgggatgggatggatatgttatttcttgggtctctctataaactgttccaggaggctcacgccccagggaaatttcctttcaattgtctcttatattttccttctatgatcttttgtgctgcctcacaaaaacagaaagccattagtttcatcttctagccacatatgttcataaaagctgtaaaacccatgagtatgagatgcttggaggcttgtagttattgtaaataatttacaaatccatatgtaccccaaatttttctgcagaataataatgtgtgcactattaaaaaatattaaaaattacagctataatcatatgagagggtaaaaaatattgagaggtatgaaaaatagttcatcatacataataggaggtaaatgttgctcaagagagagggtgattgtgaattaaattttttaaaaagcagagataagtaaaaacaaaaaccttgggttaaaaaggggaatcctagccacactggctcttccagatgagaaaactttttccaaactgtagaccagggctgccattttgagagaatagaaaatgatgacatttgtgaactggtagtcagaacactagcattgggggcttttggcagtggtagtccttggatttgaaccacatttccactgcttaacagtcgtgtgatttgggacaagttactcaatttctccaacccttagctttcttatctgaaaaannnnnnnnnnnnnnnnnnnnnnnnnnnnnnnnnnnnnnnnnnnnnnnnnnnnnnnnnnnnnnnnnnnnnnnnnnnnnnnnnnnnnnnnnnnnnnnnnnnnnnnnnnnnnnnnnnnnnnnnnnnnnnnnnnnnnnnnnnnnnnnnnnnnnnnnnnnnnnnnnnnnnnnnnnnnnnnnnnnnnnnnnnnnnnnnnnnnnnnnnnnnnnnnnnnnnnnnnnnnnnnnnnnnnnnnnnnnnnnnnnnnnnnnnnnnnnnnnnnnnnnnnnnnnncccagcaaataaagtggccaagaacttgagttttgatggtatgaagtcataaataagattatggatgtaaaagtgcctaacacaaaactagatatttgacaaagtaagaatcctctaaaggcattagtcaaagagcttagtattagtatggtagacaacagtgacttgggaattactatgttgttctagttgatttcttaacagctttgacctctttatatcatttggaaagaatcaaatggacctcaagaggttatttagttctgtgctctgcctcttgtcagacaaacttcaaaattcagtattccctttgttataaatcctgtttgaaaagatatctaggaaaacgagcacatgacctcccaaggtagacagtccctgtgtacaatgacttataagccaaattgactatttattttctttctttcttcattattattattattactttttgaaatggagtctcactccattgttcaggctggagtgcagtggtgtaatctcgactcactgcaacctccccatcctgggttcaagcgattctcgtgcctcagcctctcgagtagttgtgactacaggtgtgcagcaccatgcctggctaattttttattttattttattttattttattatttttttttttttagtagagatggggtttcactatgttggccaagctggtcttgaactgctggcctcaattgatctgtccctctcggcctcctaaaatgctgggattatacgcgtgagccactgtgcctggccctaatggactatttcttaatgtaattagtacttgctacttattgcttgggtccctaaatagtatgttttcatggagtaaccaacttttctggcctattttggcctttaaatattatctatctcaataaaaacagtcaaacaaaatcaacaggcatcttaacaaaagcttgtggaagtcagtgtggcgattcctcagggatctagaactagaaataccatttgacccagcaatcccattactgggtatatatccaaaggattataaatcatgctgctataaagacatatgcacacatatgtttattgcggcactattcacaatagcaaagacttggaaccaacccacatgtccaacaatgatagactggattaagaaaatgtggcacatatacaccatggaatactatgcagccataaaaaatgatgagttcatgtcctttgtagggacatggatgaagctggaaaccatcattctcagcaaactatcgcaaggacaaaaaaccaaacgccgcatgttctcactcataggtgggaattgaacaatgagaacacatggacacaggaaggggaacatcacacacaggggcctgttgtggggtgggggcaggggggagggatagcatcaggagatatacctaatgctaaatgacaagttaatgggtgcagcacaccaacatggcacatgtatacatatgtaacaaacctgcacgttgtgcacatgtaccctagaacttaaagtataataaaaaacaaaacaaaagcaaaagcaaaacacagatacactctgttttgctgagagctagagaaatgctgcggaaaacctagaagtagctgtgagaatatatatatcctggctgatttaggtatcattcacagagcaaataattcacctacttaaattgtacaattcactgagttttagtatattcgcagagttttgcgaccatcaccacaatcaattttagagcattttcttcaccctaaaaagaagcctcataccaaataacagtaactccttattttcccccattcctgctagcactaggcaaccacaaatctttctgtgtctgtagatttgcctattctggacattttatataaatgggatcatacaacacgaggtttttcgtgactggcttctttgatttagcataatgtttaccaggttcatccctattgtggagactgttttaaaaattctctgcatttggaggtcagacctcagtgtattcagaagggctctccagagacttagaaccaataggatatgtatctatatatatatacagaaagaggggcctggcgcagtggctcatgcctataatcccagcattttgggagaccaaggcaagtggatcacttgaggtcaggagtttgacaccagcctgggcaacatggcaaaaccccacctctactaaaaatataaaaattagccaggcgtggtggcaggcacctataatcccagctcctcgggaggccaaggcaggagaatcggcttgaacccaggaggtggaggttgcagtgagccaagatcataccactacactccagcctgggaaacagagtgagaccctgtctcaaaaaaaaaaaatattttaaggaattggctcatgtgattgtggaggcttggcaagtccaaatacctaatgggagaggcaggcaggctgaagactcaggaaggagttgnnnnnnnnnnnnnnnnnnnnnnnnnnnnnnnnnnnnnnnnnnnnnnnnnnnnnnnnnnnnnnnnnnnnnnnnnnnnnnnnnnnnnnnnnnnnnnnnnnnnnnnnnnnnnnnnnnnnnnnnnnnnnnnnnnnnnnnnnnnnnnnnnnnnnnnnnnnnnnnnnnnnnnnnnnnnnnnnnnnnnnnnnnnnnnnnnnnnnnnnnnnnnnnnnnnnnnnnnnnnnnnnnnnnnnnnnnnatttgggcaccgtgccccagccaaaatgacacataaaattgtaacatttggcgattttttttttttttggaagaagtcttgctctgtcacccaggctagagtgcagtggcacaatctcggcccactgcaacctccaccacccgggttcaagcagttctcctgcttcagcctcccaagtagctgggattataggcatgtgccaccacccacacccagctaattcttttatttatttattttttggtagagatggggttttgtcatgttgaccaggctggtcttgaacttctgacctcaggtgttccgcccacctcggcctcccaaagcgctgggattacaggtgtgagtcagcacctggccacacttcgctatttttatcctgtgaataggtaaacaaacctaacattgaggattgtctttcttggaagcatatgcaatttaaaattagcaccagcaattgctgtattttgaatctctttgtgtaaacaactactctgagataaagaatgacttttgaaatgacccagaaagaatatggatcttgcacggtagcctcaaagctaagtaaagaaaggagttcttttctgtcttcttgaaataggaaaatatttcatcttgaaactatctgagcctttcttcctgccctggatagcctatatcagcatatgaactggagagagagagattaactacatgtatcagccagaaactcaaatgatcaaatgtcaggactaccttcaggttttattggtctacgttccacagcagacattaatcttccacaatggacagatgcaatgttttatgtacttctgtattttatccctgcctctgtcctatgcaatttcctttcctactttcttaaaatgaattcgttttcttgcagattctagatgcagttattaagttttctgacacaactagaaagattttcctttgtctctgcatttcaagagaaagcttctctagtcacagtcatgtaaaatgtaaaactcttgagtacaaatgaaggaattctgcagagcttaaataaatacaggctgactaatatgtaggggaaactagcctagtcactcagagtctccagtctgatgccactgagttataggcaccttcctgggcccaacagttgggtttatgaagacaggatctggatgtccattccaggccccagaatatttacctaagatatatgtactcataaaatcagaaagaatatttgactgcagataggaaataattagggatgagcagagccttatgatcacagaggtagtgggaggtatggccagaatttgaactacaaactcagtgttctttctatctcatcatgacgtttcttttagttttttttttttttttgagacggagtctctcgctatcacccatgctggagtgcagtggcgtgaccttggctcactgcaacctccgcctcctgggttcaagtgattctcctgtctcagcctcccaagtagctgggactacaggtgtgtgccaccacgcccagctatttttttttttagtagagtcggggtttcaccatgttggccaggctggtctcaaactcctgaccgcaggtgatctacccaccttggcctcccaaagtgctgggattacaggcatgagccaccgcgcccgacttttttttttttttttttttttttgagatggagtcttactctgtcgcccaggctggagtgcagtggtggtgtgatctcggctcactgcaatctctgcctcctgggttcaagcaattcttgaactcggtctcggtctcccgagtagctgggattacaggtgtctgcaaccacgcccagctaatttttgtatttttagtagagatggggtatcaccatgttggccaggctggtctcaaactcctgacctcaagtaatctgccagcctcggcctcctaaagtgcagggattataggtgtgagccactgagcctggccttatcataacttctcaaacactgctcaacaatgccttgtccagagacattatcaatggctaatatcattttaatgctcttttattaaactatgtatatactgagtttgtataaatagtggatttaaaatgagtatctgtgaataggaaccttattctttgaaataatgtactctaactttttcgatttcagcatctgttttgctgagtcttcatcactatggtctaggatgttaagtcaataatattgaaaggtctgcctgtatattttgttttagtactaactttttacaatattatattttaggaagaaaaaaagactaatttatgccttgtggtgtagctcctttgagtgtatattaaaacagtcatggttgctgaaatgaagaaattgagcaatggaaattgtgaaagtagaatggaatcttacaaataagttaatatgagaaataattataaggtattatcattttcttgattatttgatcttattatgctttaatattctacaaaagcatttgtcattttaagtaggaaacaaaaacagcataaatttactttttacacgttatttatttatttatttatttaaggtggagttttgcttttgttgcccaggctggaatgcagtggtgtgaccttggctcattgcaacctcctcctcccgggttcaagcgattctcctgcttcagcctcctgaatagctgggattacaggcacccgccaccatggctttttttttttttttttttttttcctgtagagacggggtttcaccatgttggccaggctggtctcaaactcctgacctcaggtgatctactcgcctcagcctaccaaagtgctgggattacaggcatgagccaccatgcccggcctactttttacactttaaataggtgaattttatggtatatgaagtatgtctcaataaaagtatttataagaacctgcacttaatctccctgttgttctgatttttcttaatgcaccttctttttttttgtttgagacagggtctctccctgtctccaaggctggagtccaggggtacgtgcgttcatggctcactgcagcctcggcttcctgagctgaagtgatcctcccacctcaacctcctgagtaactgggaccacaggtgcaagccaccacgcctggctaattttttgaatttttgtagagataggatcttcctatgttggccaggctggtctcgaactcctgggctcagcaatccactcgcctcagcctcccatagtgttaggattacaggcgtaagccactgcaccgggcctgatacacctttcttctgaagaaacttttctttccctctgtggatgacttttttcccttcttaccataaagcattgagatgttcctcctgcttcgttgctctttcctataactagttttaaaaatagttgtctaaattttagagaaagtaaaaccctttctagttctgacattggaaggactttatgaaggattttgtgctttagtttcatcaaagtctcccaatgaaacctaagttgctttccattctaagcctggtgtttattttaataagtgaatgttttcccatagctgggggaaacatctaggcctcattctcctctttctgccaataaatatgttataattgtagctccagtgatactatttctttacattaaggtgaaagcttacaagaaatgcatgcatagcaaatcattgggctttgggatcaaagcactgtccggctgataatctagtttccatcaaatagtgatgtgttttgaggagggctgggtgttttttttttttcatttcttttgttaattaattgtaataaaagcctctaaaggatttttctggagactgtctaccaaatcttctgaacagggaaaattttataggaataatattaatattctttggaaaattttccaaagtttaagccccttaagaaggttttaccttctgggtgcggagttggatttaacaaacatttctggctgggcgtggcggctcacgtctgtaatcccagcactttcagaggctgaggcgggcagatcacgaggtcaggagatcatcctggctaacacggtgaaaccccgtctgtactaaaaatacaaaaataaattagccgggcgcggtggcgggcaactgtagtcccagctacttgggaggctgaggcaggagaatggcgtgaacccgggaggtggagcttgcagtgagccgagatcgcgccactgcactccagcctgggcgacagagcaagactccgtctcaaaaaaaaaaaaaaaaaaagaaagaaaaaaattagccaggcgtggtggcaggcacctgtaatcccagctactcgggaggctgtggcaggagaatggtgtgaacccgggaggcggagcttgcagtgagccgagatcgcggcactgcactcccgcctgggcgacagagcaagactctgtctcaaaaacaacaacaacaacaacaaaaaaccagaaaaccaaacatttctttggtggctgctgggaggtcctgtactagacccaggggatggagagatgaagcaaccacagtgccagcctacaggtgtcccacggctggatgagagagacagggtaattcacaaccagctgtgctttggtgaccatgtttagtgaaccaaatttggaatatatggtcattattaatagcagtgtacttatgtgcttatggtaacaatgagatggaatattttaaactggggccttccttattttctgggatatatagtatcatatacagataaatcgaaattttgtgactcttgttcaagagtactcctgagtttacagtcagtggtgaggtaagaggaaacagtgttactgacttctttgcttttttcttactcctcccctgacattttcaggtgggtgaaatctggttgaggggacatcaaaagaatttcagaaaaataggccaggtgtggtggctcacgcctgtaatcccagcactttgggaggccgaggtgggtggatcacgaggccaggagttcgagaccagcctgaccaacatagtgaaaccccgtctctactaaaaatacaaaaattagctgggcgtggtggtgctcgcctgtaatcccagctactcaggaggctgaggcaggagaatcgcttgaacctgggaggcggaagttgcagtgagctgagatcatgccattgcactccagcctgggcaacagagtgaggctcatctcaaacaaaacaaaacaaaaaacagtttcagaaaaataaagtcactaaaagaccctgtgtggtctaaggggtatgaaaatatggcagaggcagctctatgccctagtaacacttggcattttaaaggctttttttgacctggtgcaatggcccacaactgtaatcccaacacttggtaggccaaggtaggcagactgcttaagtccaggagtttgagaycagcctgggcaacaagtgagaccctgtctctataaaaaatttaaaaattacccaagtgtggtggcatgtgcctgtagtcccatctacttgggaggctgagtgggggaggatgtcttgagtccaggagttcaatgctgcagtgagcactctagcctaggtgatagagcaagtctctgtcggaaagaagggaggaannnnnnnnnnnnnnnnnnnnnnnnnnnnnnnnnnnnnnnnnnnnnnnnnnnnnnnnnnnnnnnnnnnnnnnnnnnnnnnnnnnnnnnnnnnnnnnnnnnnnnnnnnnnnnnnnnnnnnnnnnnnnnnnnnnnnnnnnnnnnnnnnnnnnnnnnnnnnnnnnnnnnnnnnnnnnnnnnnnnnnnnnnnnnnnnnnnnnnnnnnnnnnnnnnnnnnnnnnnnnnnnnnnnnnnnnnnnnnnnnnnnnnnnnnnnnnnnnnnnnnnnnnnnnnnnnnnnnnnnnnnnnnnnnnnnnnnnnnnnnnnnnnnnnnnnnnnnnnnnnnnnnnnnnnnnnnnnnnnnnnnnnnnnnnnnnnnnnnnnnnnnnnnnnnnnnnnnnnnnnnnnnnnnnnnnnnnnnnnnnnnnnnnnnnnnnnnnnnnnnnnnnnnnnnnnnnnnnnnnnnnnnnnnnnnnnnnnnnnnnnnnnnnnnnnnnnnnnnnnnnnnnnnnnnnnnnnnnnnnnnnnnnnnnnnnnnnnnnttgaattgttgtctcctagctgttttgaaatgcacaataggatttttttgtattttttaaaaattatactttaggttctggattacatgtgcagaacgtgcagttttgttacataggtatacgcatgccatggtggtttgctgcactcctcaacccgtcacctacattaggtatttctcctaatgttatccctcccctagccccccaccccctgacaggcccgagtgtgtgatgttcccctccttgtgtccatgtgttctcattgtttaactcccacttatgagtgagaacatgcagtgtttggttttctgatcttgtgatagtttgctgagaatgatggtttccagcttcatccatatccctgcaaaggacatgaactcatcctttttttatggctgcataggattccatggtgtatatgtgccacattttcttcatccagtctatcattgatggacatctgggttggttccaagtctttgctattgtgaatagtggcacaataaacatacgtgtgcatgtgtctttatcgtagaatgatttataatcctttgggtannnnnnnnnnnnnnnnnnnnttgggtatatacccagtaatgggattgctgggtcaaatggtatttctagttctagatccctgaggaatcaccacactgacttccacgatggttggactaatttacactcccaccaacagtgtaaaagcattcctatttttccacaacctctccagcatctgttatttcctgactttttaatgatcaccattctaactggtgtgagatggtatctcattgtggttttgatttgcgtttctctaatgaccagtgatgatgagcattttttcatatgtctgttggctgcataaatgtcttcttttgagaagtgtctgttcatatcctttgcccattttttgatggggttgtttgtttttttttcttgttaatttgtttaggttctttgtagattctggatattagccctttgtcagatggatagattgcaaaatttgtctcccattctgtaggttgcctgttccctctgatgatagtttcttttgctggaaatgcacaatagattaatgttaattaatctatccagcatcaggtcttaggaaatttaaacttctttagatggcattcaagctattcacagtttgtcttctatttgtaccacttctccagttttatcttctatttctcccctccacacctcctacttgccaaatgcattgggttctcagaatatttctaatttccttttggattccttgtctatttatctgctgtttcctctgcctggaatttcctcctccattctcacctgtgtgaacatctccttatccttgaagtcatagccaaatatctgtcactcttctgtggagcctttcctatgccaaaacaattactctgttgttcgtctttgtagccctagtgcctatcacaatgcttgtcaccaaataggtgctgagtaaacattttgcatgaggttcattcgttttcatactataatagcaaatatgctccctaaggaaatttgaaaaatacagaagaatataaataagaaagtagcaatcatgcacagccgcagtaacaaccactttttttttttgacatattctagtcttttctaagtatatcatatattttgtagatggttgagattgttttggtaaaaggttgataaattgctctctttattacttctttccactcatgtttcatgatcccctgatggtcttcttgctctggctgtgttcatatagttatattctctttcctccccatcttccacttgcacacttgctagttccctcctcaaaaacctaattagatgtgtttctctttgttggctatgtcctccaccttcactaaccttgtttttcatcaaaacctgttatcaaaccaatagtcacaatgagttttgcatgattgaacccatctacttctctacctgatcctctaacactgatggaaattaaatatggatatttaagctgtaagtgaccttggggaggctagtcctcccttgtcattttcagataactcatgtgccccacacataggtggtggtaagtgtgtagtagggccctccctattcctagccttttgttcttactgaggtcttatagctggtaattggcagcatcaggactagagtccaggtctaactgattcctaagctaacctatattcccttgataggttgcttctgttaaaatgttatttggttgttgaagataacttttgtctccaaannnnnnnnnnnnnnnnnnnncaggatagaatggttccttgctttggaacttctcccaggctcacccagagagcttcttagcagagctaggaataatattcatatcttctaatgtctagattttcagtttaggccatgagagccagctgagttctctgaggagagttcctcatttttttttaatcaggaaatatagaaatcaatatgtgagtgttagcttggcacagtggctcatgcctgtaattccacctttttgggaggctgaggcaggacgattgcttgagcctgagagtttgaaaccagcctgagcaacatagagagacctcatctctacaaaaaatacaaaaattagctgggcatggtggcgtgcacctatggtcacagctactcaggaggctgagattggaggatagcttgagcccatgagatttgatactgcagtgatctgagattgtgctactgcactccagcctgggtgacagggcaaatccctgtctaaagatataaatatatgggtgttaaaatttgatcactggcaatgttaattcaggattcacagaatcataagatgttagaactgagaggagcctttgaagttctgtagtgcagccccattttactgatgaaggaaatgaggtcctgagagggcccaaggtcacatagctgtaaatggtggggaaggtactagcaggagcctcaggcctccaatactaaaagacactggagaatatattaggcagggccacaaggtaggtgaagaagaaagtcttgggatatgtgtcttttcctctgacatattatagcatgtgtcatatttgtgaatgggaaggggtccacaaaaataacatttgcttcgtacactctagttctgtgttgtatatacacatgaaggattgtcacaaggtaggtaaacaaattagattgttttcccaaaagaattctcgcagagaaattgagcttactttgtcagctttttacgatgaacagaatttggagtataatgatttgggggctgtgggttccccgtgtgcaaactaatattctcagcaaacacactttgcagaaagcagctagagttgatggaaagaggtctgtcctgggattaaatactggtcctgctggaaacttattgtggacaattaatagggaccttttccctctcccagcctcagtttcctgttatgtaaaatcagagattacatttgttcatttcatggattttcttgtgctgatatcttatttctaaggtcattttttcagctttctgctgaagcagtcactcctctcagctatttgctgtattccaagagaggtctccattctctccttattgcctaattagattgttgtatactacagactgatggacatgctgtgcttttcatttatgcagaagcctttgttttctcttggatttcccagttgttttgcttctggttgatttatccttggactctattgttatttgatacagcctcctattaatagaagtttgtcttcttggtcacttctctcttcagttcatcagttctgaaaactgtgttttcattcagnnnnnnnnnnnnnnnnnnnnnnnnnnnnnnnnnnnnnnnnnnnnnnnnnnnnnnnnnnnnnnnnnnnnnnnnnnnnnnnnnnnnnnnnnnnnnnnnnnnnnnnnntgttgatagttagtctctgtggtttcttttaaaatgacatttgtttatttatttatttatttgagacagagtccctttctgttgcccaggctggagtgcagtggtgcgatcacgggcccactgcagcctcaacctcccaagctcaagctatcttcccacctcagccccctagtagctgggactacaggcaagcactaccatgcctggctaatttttcatatttttttgtagagacggggtttcaccgtgttgcccagggtggtctcaaactcctggactcaaaggacccgcctcagcctcccaaagtgttgggattataggcgtgagccrattaacccagccaaaaaggacatttatatactattataacattcttgtagaaatactggagaatatttttatgcataagcacagttcttcttgaattgtatacatatttgaattgtatctgggactacaggcgtgtgccaccacacctggataatttttgtatttttggtagagaaggggttttgccgtgtttcccaggctggtctggaactcctgggttcaagtgatttgcccatctcagcctcccaaagtgctgggattacaggcatgagctccccggctgatacaagactattttctaatctacagactttattcaaaatttaccaattgtgaggtttttaaaacaaatctcattttgtaaaacccacctccactgagattttgctatgaattaagtaatctctatttttggacattgagaacattatcattttttgttttggtattttgagtaatgctgtgtgcatttttgtagatataggtttttaatctcctttcaaattatttctttaagatatacattcctatggagggttattggtcaaagggtatagatattttggtggctttggtaagctgaactccattcttttgagaggaagtttacacaatgtgtgaaagcagaagtattggaatgagacagaccttgtttaaagtcctgtttgtaacatttgccagctgtgtgatctctctcaagtgtcttctacttcgagtgcttctttctttatttgaaaaaatggaaattacaatttgtactccacagagttgtttgaagtttaaatgagaaaaacttatgtagtaaatttagcacattatgacaataggtattatgattttctcctctttggattgtaaattccaggagggcagggatgttgtctatctgggtccctatgttgtctctggcacctaacacagtacttggtgcaaagaaagtactgaagaaatattaatcgaatagatgaatgtcataggttataataatttatagtaccagcagtaattttaaaactatatgtgttttcttgcagtcctataagcatagcattttattaaaaaataaaacctttctgctgtctgctattttaatgtgttcttgtctaattagcattttatgtttttattatcttttttaatttttattttttgtagggggtgtctcactgtgttgcccaggctgatcttgaactcctgggttcaagcgctcctccctccttgacttcccaaagtgctgggattacaggtgtgagccacgttgcccagtgtcccccaggctggagtgcagtggcacaatctcggctcggtacaacctctgcctcctgggttcaagtgattctcctgcctcagcctcctgagtagctgggattacaggcacccaactccatgtctggctaatttttgtaatttttgtaaaggtggggtttcaccatgtcggccaggctggtcttgaactcctgacctcaattggtctgcctgccttggcttcccaaagtgctgggattacagatgtgagccaccatgcccagctattatttcttacataaattttgcatatatattggttggggcttctcttgaatgtgccagtgagaaaatacccattggttggtcgatgaaagggatggggttttcatagatgttgtatctttcctttcttagaataacatttaaacaggttcagtgacaagcaagttaaactacacattttacctttccaaaaatggggttgacctggccaaagggttgacaacacctttggatagttcccacattcttacatcattgctaagacttactaaattgataggatctttataatggtgcttttgacacttaaatgtgtatgtgaatcacctaggatgtattaaaatgaagcctgattcagtagatctggggaacacactttgagtagcaaggctatacgccagtcttaaaggtgaaaaagtgagagagatcagtagttnnnnnnnnnnnnnnnnnnnnnnnnnnnnnnnnnnnnnnnnnnnnnnnnnnnnnnnnnnnnnnnnnnnnnnnnnnnnnnnnnnnnnnnnnnnnnnnnnnnnnnnnnnnnnnnnnnnnnnnnnnnnnnnnnnnnnnnnnnnnnnnnnnnnnnnnnnnnnnnnnnnnnnnnnnnnnnnnnnnnnnnnnnnnnnnnnnnnnnnnnnnnnnnnnnnnnnnnnnnnnnnnnnnnnnnnnnnnnnnnnnnnnnnnnnnnnnnnnnnnnnnnnnnnnnnnnnnnnnnnnnnnnnnnnnnnnnnnnnnnnnnnnnnnnnnnnnnnnnnnnnnnnnnnnnnnnnnnnnnnnnnnnnnnnnnnnnnnnnnnnnnnnnnnnnnnnnnnnnnnnnnnnnnnnnnnnnnnnnnnnnnnnnnnnnnnnnnnnnnnnnnnnnnnnnnnnnnnnnnnnnnnnnnnnnnnnnnnnnnnnnnnnnnnnnnnnnnnnnnnnnnnnnnnnnnnnnnnnnnnnnnnnnnnnnnnnnnnnnnnnnnnnnnnnnnnnnnnnnnnnnnnnnnnnnnnnnnnnnnnnnnnnnnnnnnnnnnnnnnnnnnnnnnnnnnnnnnnnnnnnnnnnnnnnnnnnnnnnnnnnnnnnnnnnnnnnnnnnnnnnnnnnnnnnnnnnnnnnnnnnnnnnnnnnnnnnnnnnnnnnnnnnnnnnnnnnnnnnnnnnnnnnnnnnnnnnnnnnnnnnnnnnnnnnnnnnnnnnnnnnnnnnnnnnnnnnnnnnnnnnnnnnnnnnnnnnnnnnnnnnnnnnnnnnnnnnnnnnnnnnnnnnnnnnnnnnnnnnnnnnnnnnnnnnnnnnnnnnnnnnnnnnnnnnnnnnnnnnnnnnnnnnnnnnnnnnnnnnnnnnnnnnnnnnnnnnnnnnnnnnnnnnnnnnnnnnnnnnnnnnnnnnnnnnnnnnnnnnnnnnnnnnnnnnnnnnnnnnnnnnnnnnnnnnnnnnnnnnnnnnnnnnnnnnnnnnnnnnnnnnnnnnnnnnnnnnnnnnnnnnnnnnnnnnnnnnnnnnnnnnnnnnnnnnnnnnnnnnnnnnnnnnnnnnnnnnnnnnnnnnnnnnnnnnnnnnnnnnnnnnnnnnnnnnnnnnnnnnnnnnnnnnnnnnnnnnnnnnnnnnnnnnnnnnnnnnnnnnnnnnnnnnnnnnnnnnnnnnnnnnnnnnnnnnnnnnnnnnnnnnnnnnnnnnnnnnnnnnnnnnnnnnnnnnnnnnnnnnnnnnnnnnnnnnnnnnnnnnnnnnnnnnnnnnnnnnnnnnnnnnnnnnnnnnnnnnnnnnnnnnnnnnnnnnnnnnnnnnnnnnnnnnnnnnnnnnnnnnnnnnnnnnnnnnnnnnnnnnnnnnnnnnnnnnnnnnnnnnnnnnnnnnnnnnnnnnnnnnnnnnnnnnnnnnnnnnnnnnnnnnnnnnnnnnnnnnnnnnnnnnnnnnnnnnnnnnnnnnnnnnnnnnnnnnnnnnnnnnnnnnnnnnnnnnnnnnnnnnnnnnnnnnnnnnnnnnnnnnnnnnnnnnnnnnnnnnnnnnnnnnnnnnnnnnnnnnnnnnnnnnnnnnnnnnnnnnnnnnnnnnnnnnnnnnnnnnnnnnnnnnnnnnnnnnnnnnnnnnnnnnnnnnnnnnnnnnnnnnnnnnnnnnnnnnnnnnnnnnnnnnnnnnnnnnnnnnnnnnnnnnnnnnnnnnnnnnnnnnnnnnnnnnnnnnnnnnnnnnnnnnnnnnnnnnnnnnnnnnnnnnnnnnnnnnnnnnnnnnnnnnnnnnnnnnnnnnnnnnnnnnnnnnnnnnnnnnnnnnnnnnnnnnnnnnnnnnnnnnnnnnnnnnnnnnnnnnnnnnnnnnnnnnnnnnnnnnnnnnnnnnnnnnnnnnnnnnnnnnnnnnnnnnnnnnnnnnnnnnnnnnnnnnnnnnnnnnnnnnnnnnnnnnnnnnnnnnnnnnnnnnnnnnnnnnnnnnnnnnnnnnnnnnnnnnnnnnnnnnnnnnnnnnnnnnnnnnnnnnnnnnnnnnnnnnnnnnnnnnnnnnnnnnnnnnnnnnnnnnnnnnnnnnnnnnnnnnnnnnnnnnnnnnnnnnnnnnnnnnnnnnnnnnnnnnnnnnnnnnnnnnnnnnnnnnnnnnnnnnnnnnnnnnnnnnnnnnnnnnnnnnnnnnnnnnnnnnnnnnnnnnnnnnnnnnnnnnnnnnnnnnnnnnnnnnnnnnnnnnnnnnnnnnnnnnnnnnnnnnnnnnnnnnnnnnnnnnnnnnnnnnnnnnnnnnnnnnnnnnnnnnnnnnnnnnnnnnnnnnnnnnnnnnnnnnnnnnnnnnnnnnnnnnnnnnnnnnnnnnnnnnnnnnnnnnnnnnnnnnnnnnnnnnnnnnnnnnnnnnnnnnnnnnnnnnnnnnnnnnnnnnnnnnnnnnnnnnnnnnnnnnnnnnnnnnnnnnnnnnnnnnnnnnnnnnnnnnnnnnnnnnnnnnnnnnnnnnnnnnnnnnnnnnnnnnnnnnnnnnnnnnnnnnnnnnnnnnnnnnnnnnnnnnnnnnnnnnnnnnnnnnnnnnnnnnnnnnnnnnnnnnnnnnnnnnnnnnnnnnnnnnnnnnnnnnnnnnnnnnnnnnnnnnnnnnnnnnnnnnnnnnnnnnnnnnnnnnnnnnnnnnnnnnnnnnnnnnnnnnnnnnnnnnnnnnnnnnnnnnnnnnnnnnnnnnnnnnnnnnnnnnnnnnnnnnnnnnnnnnnnnnnnnnnnnnnnnnnnnnnnnnnnnnnnnnnnnnnnnnnnnnnnnnnnnnnnnnnnnnnnnnnnnnnnnnnnnnnnnnnnnnnnnnnnnnnnnnnnnnnnnnnnnnnnnnnnnnnnnnnnnnnnnnnnnnnnnnnnnnnnnnnnnnnnnnnnnnnnnnnnnnnnnnnnnnnnnnnnnnnnnnnnnnnnnnnnnnnnnnnnnnnnnnnnnnnnnnnnnnnnnnnnnnnnnnnnnnnnnnnnnnnnnnnnnnnnnnnnnnnnnnnnnnnnnnnnnnnnnnnnnnnnnnnnnnnnnnnnnnnnnnnnnnnnnnnnnnnnnnnnnnnnnnnnnnnnnnnnnnnnnnnnnnnnnnnnnnnnnnnnnnnnnnnnnnnnnnnnnnnnnnnnnnnnnnnnnnnnnnnnnnnnnnnnnnnnnnnnnnnnnnnnnnnnnnnnnnnnnnnnnnnnnnnnnnnnnnnnnnnnnnnnnnnnnnnnnnnnnnnnnnnnnnnnnnnnnnnnnnnnnnnnnnnnnnnnnnnnnnnnnnnnnnnnnnnnnnnnnnnnnnnnnnnnnnnnnnnnnnnnnnnnnnnnnnnnnnnnnnnnnnnnnnnnnnnnnnnnnnnnnnnnnnnnnnnnnnnnnnnnnnnnnnnnnnnnnnnnnnnnnnnnnnnnnnnnnnnnnnnnnnnnnnnnnnnnnnnnnnnnnnnnnnnnnnnnnnnnnnnnnnnnnnnnnnnnnnnnnnnnnnnnnnnnnnnnnnnnnnnnnnnnnnnnnnnnnnnnnnnnnnnnnnnnnnnnnnnnnnnnnnnnnnnnnnnnnnnnnnnnnnnnnnnnnnnnnnnnnnnnnnnnnnnnnnnnnnnnnnnnnnnnnnnnnnnnnnnnnnnnnnnnnnnnnnnnnnnnnnnnnnnnnnnnnnnnnnnnnnnnnnnnnnnnnnnnnnnnnnnnnnnnnnnnnnnnnnnnnnnnnnnnnnnnnnnnnnnnnnnnnnnnnnnnnnnnnnnnnnnnnnnnnnnnnnnnnnnnnnnnnnnnnnnnnnnnnnnnnnnnnnnnnnnnnnnnnnnnnnnnnnnnnnnnnnnnnnnnnnnnnnnnnnnnnnnnnnnnnnnnnnnnnnnnnnnnnnnnnnnnnnnnnnnnnnnnnnnnnnnnnnnnnnnnnnnnnnnnnnnnnnnnnnnnnnnnnnnnnnnnnnnnnnnnnnnnnnnnnnnnnnnnnnnnnnnnnnnnnnnnnnnnnnnnnnnnnnnnnnnnnnnnnnnnnnnnnnnnagtttgagaccaacctggccaacatggagaaaccctgtcactattaaaaatataaaaattagctgggcacggtggcacatgcctataattccagctacctgggaggctgaagcacgagaatcacttgaacctgggaggcagagggtgcagcgagctgagattctgccactgcactccagcctgagtgacagagtgagactgtctcaaaaaaagaaaaagaaatacatttgtgtttgtattgattttatattctgtaaccttgatgaacttatttattacttctaatagtttttttaaaaactggattccattagattgttttgtatacaagatcatgtcatctgcatatacaaatagttttatttcttcctttccaatctgcatgtttttcacttcttttctttgcctgtgtcctggctcaaatctctagtacagtgttgactagaactggtgaaagcagacatccttgtctccttcttgatatcatggggaaagtattcggtctttcaccattaagtatgaggttagctgttgtgtttttcatagattttctttatgaggtggaggagatttccttctgttcctagtttgttgaatgtttttataaagaaagattttggactttgtcaattacttaatctacatctggtgaaatgatcatgtggtttttctcttatattctatttatgtggtatattacattaattttcatatatatataaatatatatatatatatatttttttttttcagacagggtctcactgttgcccaggctggagtgcagtgacacaatcagggctctcactgcagccctgacctcctgggctcaagtgacccttccgccttggctccccgaatagctgggactacaagcttgtgccaccatgcctggctaattttttttttactattagtagagatggggtttcaccatgttgcccaggccagtcttgaactcctgagctcaagggatcctcctgccttggcctcccagaatgttgggattacaggcgtgagccactgcgcccagaattttttgtatgttggagcaacattgcattattggcatnnnnnnnnnnnnnnnnnnnnnnnnnnnnnnnnnnnnnnnnnnnnnnnnnnnnnnnnnnnnnnnnnnnnnnnnnnnnnnnnnnnnnnnnnnnnnnnnnnnnnnnnnnnnnnnnnnnnnnnnnnnnnnnnnnnnnnnnnnnnnnnnnnnnnnnnnnnnnnnnnnnnnnnnnnnnnnnnnnnnnnnnnnnnnnnnnnnnnnnnnnnnnnnnnnnnnnnnnnnnnnnnnnnnnnnnnnnnnnnnnnnnnnnnnnnnnnnnnnnnnnnnnnnnnnnnnnnnnnnnnnnnnnnnnnnnnnnnnnnnnnnnnnnnnnnnnnnnnnnnnnnnnnnnnnnnnnnnnnnnnnnnnnnnnnnnnnnnnnnnnnnnnnnnnnnnnnnnnnnnnnnnnnnnnnnnnnnnnnnnnnnnnnnnnnnnnnnnnnnnnnnnnnnnnnnnnnnnnnnnnnnnnnnnnnnnnnnnnnnnnnnnnnnnnnnnnnnnnnnnnnnnnnnnnnnnnnnacttcttatgatttcagttctttcaaatttattgatggttgtttaatgaagtagcatataatctatcctggataattttattagtgcacgtgagaagaatgtgtattctgctattgttgggtgaagtgttctatagatgtttgttaagtcttgttagcttttcatatttttgaagtcttatatttctgaagtattgattttctatctagatctaaccattattgaaagtgagttactggctgggcgtggtggctcacgcctgtaatcccagcactttgggaagagccgaggtgggcggataacttgagctcaggagttcaagaccagcctgggcaacacagtgagactctgtctctaaaaaaaataaataaataaaaaaaaagaaagtgaatcgttgaattcttcaatgtctattgttggattgtctatttttccattcaattttgtcattgtttattttatgtattatgtattttgggctctgatgctctgatgttatgtgcatacatgtttataattgttatatcttcttgatggattgactcgtatcattataaaatatctctcctgatttccattgtcttttttttttttttttggtttggagtgtattttgtcctattctaatatagccactccaggtttctgatctttttcatacttagcttttaacatatttgtgtctttgaatgtgagatgtgtctcctgtagactgcatatagttgtctctttaaaaaaaatttagctggttgtgggggctcatgcctgtaatcctagcaactcaggaagctaaggcaggaggatcatttggggtcaatattttgaggcctgcctgggcaacgtagaccttgtctttagaaaaaaaaccaaaaattaagttttgcacttaaacaaatttatattgtttaatgtatttctgttgaatgttactattgacataggtggatttacatctgccattgtggtttaaaaatttgtctcatgctttttcgttgctatattcctccttaactgctttattttgcattcggtgctgttattgttatacatattttatctataatatttaaaaatcgaacaatacgtttttataataattatcctagaggtttttgtaacttttaaagaagttgatgcgtaagaatgggaaaaaaattgaaaaagacaaaaatgaacatacagaaacaattttttaaaaaagttgaaggaagggaacaagtgtacctttatagcatttgttatagtaacatttttgggtgcaatttctggttcttttcatttgtttttgtgggttcatgttaccattttgtgtcattttcttacttcttttttttgggacagagtctcactctgtcacccaggctggagtgcagtggtgtgatcttgactcaccacaacctctccctcccgggttcaagcaattctcctgcatcagcctcccgagtagctggaattatagatgcgtaccaccatgcctagctaatgttttctttttgtatttttggtagagatggggtttcaccatgttggccaggctggtctcaaactcctgacctcaagtgatcctcccacctcggtctcccaaagtactgggattacaggcatgagccaccacgcctggcccataatagctttgctttaatccacttctgtgatcatattggaaaataaatttttttagccatgggccccgaaatacacacacacacacacacacacactctcacacacacacacacacgtacacacatagagtttaatataattgccttttacatcggttaagagaagaaagaagaagatacatatgtttatactgtctttttcctttttattttttgagactcggtcttgccctgttgcccaggctggagtatgatggtgtgatcttcgcttactgcaaccttgatctcccaggatcaagacaatcctcctacctcagcttcccaagtagctgggactacaggtgtgtaccaccacacccagctaattttttaaattaattaattaattaattttattattttatttttttgtagagatggggtctcagtctgttgcccaggttggtcttaaactcctgggctcaagcaatccttttgcctcggcctcccaaagtgttgggattacaggcgtgaacactgttcctggcctatactgtcttttataattataaaatttcctttacaagacatctcagtttaaaaaaattaattaattacttttttagcaagcatttctgtgaaagagagatctcagttttttatgtgaatttgaattactctctgtggtcaactgctttgagattcaagaagtccttcagtatttcttgtgagtccactagcagaggactctctcactagaatctgggtctcaacttatacaatgaaaatcagcatctttgagggtggagcctaggcaacggtagtttaaaaaattgtaccatgttattatttttatttttttgaggcggagtctactcttttgcccaagctaaagtgcagagacatgatctctgctcattgcagcctccacctctcgggttcaagtgattcttctgcctcagcctcccaagtagattggactacaggtgcacgccacccgtgcccagctaatttttatatttttagtagagatggggtttcaccatgtttgccaggctggtctctaactcctgacctcaagtgatccacctgccttggcctcccaaagtgctgattttacaggcgtgagccaccgtgcccagcaaattctgataataaaccaaggactataaccacagggttagatgatttccaaggtctcatgtagctctcacatcgtgtgacactgtggatagatttcgtagttcatgttagaccacaccttcgtagcatatcagtctgacagaggcctgtggttctcaaagtttgtccctagaaaaacagcatcagcatctcctggtaaaatgttaacattgcaaattctcaggcaccactctacgtggaatgaatcagcaatggacattcctgcaaaggacacagcagtatgtgtattaacaaactctatctctccatgtgattctattgcactgtgaagtttgagaaccactggcatagagaaagagaactgtgggctttggggtccgaggacttctcattagtcttggagaggtatgtataaatgaccagttattttgggcacctaacgtatcttcgttgagcacccccccgcttttttttttttaaggagaggaagaatatttgcattttcttaactcacatggttgttgtgaggctagagcgcttatgtcaaagcccctttgtaaactgcgaagcatgtaggcacacacaaggagtcattgtgagcaagggaagtacaattcattaagcatctcttctgggacaggaactattaattaattaattaattaattaattgagacagggtcttattctgtcgcccaagctggagtgcaatggtgcaatcttggctcactgcaacctctgcatcctgggctcagataatcctcctgcctcagcctcccaagtagctgggactacaggcatgcaccaccatgcctggctaatttttgtattttttgtagagatggggtttcaccatgttgcccaagctggtctcaaactcccggactcaagggatccttccaccttggcctcccaaagtgctgggattacaggtctgaggcactgcacccagccaggaatttcatatttattattttatttaattcataaccactctacatgtagtgaaataattatttagaaatccaatttagtttttgaattgtattggaatttatacattgaaattcaacatcaatccagctgcatcaaagtctaactatatggaaattcatcgatatcaaaatgtaagtacacaaagatcaaactgcatcaaaatccacaggagagctaggagaaaaattgtgtatattaaaatactaagagcattttgttgcattctcccacctcctcaccaacaaaagctcaaaatcttgtcctgtcatatcagtagctaaagcatgttaacacttagctcttacactaaactagttacttctttgacttaggggaagtcatacttccttactggattgtactttaatctttctattttaaaattagtggttttacagaaataaaatctttaaaatataattcttaccttagtctatttaaaacatgctgttacagctcagcatggtggctcatgcctgtaatccctgcaccttgggaggctcaggtgggcagatcacttgaggctgggagtttgagaccagcctggacaacatggcgaaaacccatctctactaaaaatacaaaaattaaatgggtgtggtagcgcatgcctgtagtcccagcttcttgggaggccgaggcatgagaatcgcttgatcccgggaggcagaggttgcagtgagccgagatgatgcactgcattccagcgtggggacagagagagactctgcctcccccaaccmaaaaaaaaaaaaaaaaattcatttgaaattagagaaaacttccctgccaacattggtccttaagagtgtgattaggagctctcagaagtcacgggttttattctgaaattaataacacttgcttcccaatagagaggtactcactgtgcatgagaatattttgatgttttgtcacagccatttcatatatggaggtgcgtgtgtgtgtgtgtgtgtgtgtctgtgtgtgtgtgtgtgcacgcacgcgcgctttattatttatttatttattttgagacggagtttcactcttgttgcccaggctggagtgcaatagtgcgatttcagctcacagcaacctccgcctcccgggttcaagtgattctcctgcctcagcctcctgagtagctgggattacaggcatgtgccaccatgcccagctaattctgtatttttagtagagacgggttttcgccatgttgtccaggctggtctcaaactcccggcctcaggtgatctgcctgctcggcctctcaaagtgctgggattacaggcgtgagccaccgtgcccggccgcatgtgtgtgtgctttaaaccactaatcttattggatgaatattattacattatatgacatttgcatgcattctattattattattattattattatttgtagagatgggggtctcactatgtatcccaggctggtctcaaactcctggcctaaggtgatcttcctgcctgtactaagattacaggcatgaaccaccacgcctggcctttttttaaaaaaataagtatttatttatttttgcatgcattttatggccaccgttatatatactatggcttaacaggggctagaatgtgaacttgaagttttagtgtttcggttcctttctctgtaaatttgaatgaggctagctagtgatggagtggtcagtttctgaagaatattgttatcttggcactaaagaaacaaattagctcccattttctattattcctgcatccaggcagcagaatctgtttgctttatttactgaagattcgtgtacaggcacagtagcagcctgtgttcctatggtttgaaggctttaagctctttgctgttttttttttttaatttccataaattatcatttagaggtaatagaaatggttgggaggttataaagattttccccctatcgttttttggcccagaaatctcctgctttgttctctcaaaggctgagtctttagcagaggctctgccaaaaagaactggagttttcccttgggaatcagaggaaaggctcagtattcagcaaatttgaaaaaggcaagcttttcagatgttaataagtctaaacaggacccaggaagctctgcagtctccaaggcagattaaatacccaagtggtataacctttccctcggctgtggccaggttcttaactattggtgataactttaagaacggatcacaaaggtggaattctcccaaaagtcatcactctgaacttggaatccaatacaagcttcaaaagtcacagcaagcaataagcactggcaacaccaggcgcctatttgggtgccagattttcacattttctttgggtttctcaccatgtctctaaccccagctgctagtgaatgcttaactgccagttgctgccacaaacgtcatgttggaaatgaaaaaaaaagttctctgccttggaaagagcacaggagacacagcaaaaagctagttattttcatcatcatcattattaatgcaaatttaaaagcacagagtcataaaatagacactgtgtacacatgtcctcaagataaacattctgtcatgtttgcttcagatcgttctcattcttttttcttatttatttatttatttatttatttatgagacagagtctcactgtgtcaccaggctggagtgcaatggtgcgatctcggctcaccacaacctctgcctctcaggttcaagtgattctcctgcctcagcctccccagtagctgggactacaggcatgcaccaccacaccaagctaatttttttgtagttttagtagagacagagtttcaccatgttggccagattggtctcgatctcttgacctcgtgatccacctgcctcagcctcccaaagtgctgggattacaggcaggagccactgcacccggcctctttttttttttttttttttttgatacagagtctagctctgtcacccaggctggaatgcagtggtgcgatcttggctcactgcaacctgtgtctggtggattcaagtgattcatgtgtttcagcttcccaggtagttgggattacaggtgcctgccaccatacccagctgattttgtttttttagtagagactgggttacaccgtattggccaggctggtctcgaacttctagcctcaagctatccacccacctcggcctcccaaagtgctgagattactggcttgagccaccgcacctggcccagatcgatctcattttctaagtaaaacatagagatagtgaaatctgcgtttacctctttccccagtccttattactttctctcaccaagggcagccacaatgctgaatttggtatttatccttcttggcaatgttttctgtttatatataatattataatcattatgtaatataattatatattaatacatatatctactaatatataattaatacaatacattataattataagatataactattatataattatgtactatattgtatataatcatatataaattatacaagtacaatataattttacataaattatataaacataactatataaattatatatataattttatgtacattatataagtatacttttacagaattatacatcttatgtatattatatatgagatatatattagatatatactagatgtatacatttgttgtttgtgtctatatatatggaatagaaaacatggccaagaagaatgcatgccaaatatatatttaaatatattaatatgtaatatatttaataaatctatatttaatagttatattaaatattttagttatataaatatataaatgcttatatttatagatactatgaatattatatagagatataaatatatatttgtgctggaaatgttttgtatatttaaattttttttacaagtggaatcatactatatgtacttcaacttgtttttttttccacttagcattgttctttttcgaattttagatattttcatgttgatatacagtatatagatataattcattcttcactttttttttaaagaggcagagtctcactatgttgcccaggttgggctcgaacgcctgggctcaaatgatcctcctgcctcagcctcccaagtagctggaactaaaggcacttgttgccatgctgggattcattaacttataatactcactaggacacttctgttatgaatattgttgggaaaattaaaaattaaatctcttgctaacttagaaaatccttttcacaaatgtggaaaagaaagaaaactggccgagcgctgtggctcatgcctgtaatcccagcactttgggaggctgaggcaggcagatcacctgaggtcaggaggtcgaggccaacctggccaacatggtgaaaccctgtctgtacaaaaatacaaaaattagctgggcatgatggtgggtgcctgtaatcctactactcgggaggctgaggcgggagaatcgcttgaacccaggaggtggaggttgctgtgagccgagatcttgctgttgcactccagcctgggcgacagagtgaaactctgtctcaaaaaaaggaagaaaaaaaaaaagaaaaagaagaaaggaaaagaaagaaaaccattgtgttactgaaagcattaaatcagacggggatgtgaatgacaggtaatacactaatgagactgtaagcatagaaagaaatgtcacacttttacataggcaagaatatatgatccatttacatatgtgttctcaatataaagcataacttgccctccagttagatttgacagcacttttattttacatagttcaggcaatattcaccttgtagttgaggtggccatatgttagctaattgcctttatccaaagaaaaaaatataacttctcttgtctatatgcccagcaggcatttaagatttaaagcaaggtacctaagctaaactccctgaggtaacaaggagatagaggtatatttatcttgatgttaatgtttcaaagagatggatccccaggtccttaagaaaaatattaggtggtcatgctggcaagaggcttatttagctctttagaacatttgcatagttatagaaaagatagaaggtggctttgtaataaccttttcttgaggaaatgctctaagaaaaggaagaatggaaaagccttttcctattcagcaactgggaacattcaatcctactatatactacatatttatttattcatttacttataaatgggcatgtaggctatttctaatatttcattatttcccataatatgccaatgaacatccttatctatgccttcctgggcagtgtgcaagagttactcagattatgagcattgttaatactacagatatttccaaattgtattcctgagtgcttatacacatttatacttacaccaacaaatataagactatccactttatccatttgttcacatcattaagatttgaggctgggtacagtggctcatacctgtaatccctgcactttgggaggctgaggtgggtggatcacttgaggtcaggagttcaaggccagcctggccaacatggcgaaactccgtctctactgaaaatacaaaaattagcggggcgtggtggtgggcgcctgtaatcccagtcacttgggaggctgaggcaggagaatcacttgaacccaggaggcggagagtgcagtgaactgagatcgcatcattgcactccagcctgggcaacaagagcgagactccatctcaaaaaataaaaagatttgaaatggccagaccttaaacattttgccaatctgacggatgtgaaatggtatctcattattccttaatttttgttttcctaactactaattgagtatgttacaatgtgtttattagccattcatattttcttttttgtgacgtgcttatttttgtagtatttgcccatttttcttttgggtttttggtcttcattattgatttataagagtcctttctatattttagaagttagtattttatttgttatatatgttacaaataatttcccctattcctagtattccccattgccaaagtcaactatactgttaatttttatcctcctttcattttatttcctgtattttttgtcatgcagaagtttttaactgttaaaatatatttattttcctttattacttgtactttttgcatcttatttaagaaattctttcctatgctgaagttagagatgttttcttgtgttcttttaaaagtttaaaagttttggctgggcgcggtggctcacgcctgcagtcccagcacttcgggaggccgaggtgggcggatcacgaggtcaggagatcgagaccatcttggctaacatggtgaaaccctgtctctactaaaaatacaaaaaattagccgggcgtggtggcaggcgcctgtagtcccagctactctggaggctgaggcaggagaatagcgtgaacccgggaggcggagcttgcagtgagccgagatcgcgccactgcactccagcctgggcgacagagcgggactccgtctcaaaaaaaaaaaaaagtttggccgggcgcggtggctcacgcctgtaatcccagcactttgggaggccgaggcgggtggatcatgaggtcaggagatcgagaccatcctggctaacaaggtgaaaccccgtctctactaaaaatacaaaaaattagccgggcgcggtggcgggcgcctgtagtcccagctactcgggaggctgaggcaggagaatggcgtgaacccaggaagcggagcttgcagtgagccgagattgcgcccctgcagtccgcagtctggcctgggcgacagagcgagactccgtctcaaaaaaaaaaaaaaagtttaaaatttttttttttwttttttttattttttttattttttatttttattgatcattcttgggtgtttctcgcagagggggatttggcagggtcataggacaatagtggagggaaggtcagcagataaacaagtgaacaaaggtctctggttttcctaggcagaggaccctgcggccttccgcagcgtttgtgtccctgggtacttaagattagggagtggtgatgactctcaacgagcatgctgccctcaagcatctgttcaacaaagcacatcttgcaccgcccttaatccatctaaccctgagtggacacagcacatgtctcagagagcacagggttggggataaggtcacagatcaacaggatcccaaggcagaagaatttttcttagtacagaacaaaatgaaaagtctcccatgtctacttctatccacacagacccagcaaccatccgatttctcaattttttccccacccttcccgcctttctattccacaaaaccgccattgtcatcatggcccatccccaatgagccgctgggcacacctcccagacggggtcgtggccgggcagaggggctcctcacttcccagtaggggcggcccggcagaagtgcccctcacctcccagatggggcggctggccgggcggggggctgacccccccaccgccctcccggacgggcggctggccaggcagaggggctcctcacttcccagtaggggcggccgggcagaggcgcccctcacctcctggatagggcggctggccgggcgggggctgttccccccacctccctcccggacggggcggctggccaggcagaggggtcctcacttcccagtaggggcggccgggcagaggcgcccctcacctcccggacggggcggctggccaggcagggggctgatccccccacctccctcccggacggggcggctggccgggcggggggctgaccccccccacctccctcccggacggggcggctggccgggcagaggggtcctcacttcccagtaggggcggccgggcagaggccccctcacctccggacggggcgcctggccaggcaggggctgatccccccaccgtccttcccggacggggtggctgccgggcggagacgctcctcacttcccagacggggtggttgccagacggagggctcctcacttctcagacgggcggttgccaggcagagggtttcctcacttctcagacggagcggccgggcagagacactcctcacctcccagacagggttgcggcccagcagaggcgctcctcacatcccagacagggcggtggggcagaggtgctccccacatctcagacgatgggcggccgggcagagacgctcctcacttcctagatgggatggcggcggggaagaggcgcttctcgcttcctagacgggatggcggccgggcagagacgctcctcactttccacactgggcagccaggcagaggggctcctcatatcccagacgatgggtggccaagcagagacgctcctcacttcccagacggggtggcggccgggcagaggctgcaatctcggctctttgggaggccaaggcaggcggctgggaggtggttgtagcgagccgagatcacgccactgcactccagcctgggcaccattgagcactgagtgaacgagactccatctgcaatcccggcacctcgggaggccgaggctggcggatcactcgcggttaggagctggagaccagcccggccaacacagcgaaaccccatctccaccaaaaaaaaacgaaaaccagtcaggcgtggcggcgcgcgcctgcaatcgcaggcactcagcaggctgaggcaggagaatcaggcagggaggttgcagtgagccgagatggcagcagtaccgtccagctttggctcggcatgagagggagatggacacgggagatggacacggagactggagatggatatggagacgggagatggatatggacactggacatggacacgggacatggacaaggatacgggaaaaggagaaggataccggacacggaaaaggacaccggacaaggatatggataatggaaaaggaaatggaaaacggaaaaggaaaaggaaaacggaaacggataaggaaaacgggaaaggaaaagggaaacggaaagggaaacggaaacgggagagggaaacgggagagggagagggagacgggagagggagagggagactgtggtctttatccaaaagtttaaaaattttgcttttcacatttagattataatccatgtagttttatttttgtgtatggtatgagatagacatctagatttgtatatagatggccaattaatccaacatattttatgtaataatattcacttttttcaatagtttgtgatgtttcctgtgtcatatcataattttttatatatatgtgcatctatatcagagatttccatttctggtccacctggctatttgtctatcccggcaactagactgtcttgattattgtagcttgtaagaagtctagcttattggagagtctgattaaattgttttccagtactttcttaactgtttttagattggcacttctctattgaatgactgagttcatcaagttccattaaaaaaaaacctacagattagaattgcatgactttatagattgattgagagaacagaccccatgagttttctcatgtatgaatatgggtaattgtttcaactatcaggggtcatttgtatctttcaatattgtttaatttttttaagagacagtgctttgctctgttgccccaacttgagtgaagtggcatgatcatagctcactgcagccttgacctcccaagctcaagtgatcctccgacctcagcctcccgcgtagctgggactgcaagtgcactccaccatgcccatcaaatttttttttttttttttacttttgtggatatggggtctccttatgttgcccaggctggtgtcaaactcctgggctcaagcaatcctcccaccttggcctcccaaagtgttgggattacaggcgtgagccactgcacccagtctgtctaaaatttttaatatgaaattcatgcacattttttcttaaattcattttaaggtaatttacatgtttagttgctatgatgaacccctttaaagtattttctaattattatttatttttatttttagatttttttttttttttgagaaaaggtatcactgtgtcgcccaggttggagtgcagtagcatgaacacatctgacactgcagccttgaactcccaggctcaagtgatcctcctcccacgtcagcctctggagtagctgggactacagcgcgcaccaccatacctggctatttttttttttttttaatttttgtagagacggagtcttaccggtttgcccaggctcatcttgaactcctgggctcaaatgatcctcttgcctgggtctcccaagttgctgggattaaaggcaagagccaccatgcccagcctaattgtttattttgaacatttggaattcaattgattttcatattgttgatcttgtatccagtaactttgatgaactgtcattatttctaatggtttgcctgtaggtttgtttgtattttcttactggtaatatcatgtcacctataaatatttattacttcatggctttctttctaacctttacactttatctaacttttccatgtccaaatgcattggctagcatggccatacagtttctattagtaagagctatagggacactctggacttcatctgtgctttaataggaatgcttctacaatttcaccattaaatttgatgtttgatgtaagcttttaatagatagtggtcatcaggttaatgaagttctttctagtctgaggatgcctttttttgtaatgatcctcatggatgagtactgcattttaatcaaatgctttttattgtcagtctgtatgtatgataaattacaataataggttttctaatgttcaattatccttaaagtcttaaaccatacgtaatcatgatgtatagtcaatttcttatatgttgcttattcaccaaaattctgtttaggatttttgcatttatcttcatgaatgagattggtctataatttttttcttgtacattttatcatttactcattcaacaagtatttattgagtccatactgtgttctgtgtactgttctagtgaatgttgatatagtagtgaataaaatagataaaaatctttgccctcatgaaacttatattctactatggggaagacagaccataaacaagacaatttattaaatatgtagtatattagatgttgacaaatgctaacgatacaaataagcagaaattaggatacatagtgtgtgtgtgtaggggggtatgcaatctcagaaaagaatttacagcaacagctctcttacaaggtgacattttaggaaagacatgtgagggaagagaaagtataatggctctgaagtaagcatgtttctggtaggttcaagaaagagaaaggaagccattgtagctagactgttttactatcagaccaataagtaaattgggtagctttccctctctttaaaaaatgtaattgtatcttacataattatactgtaatataaaaaccaggaaactgacaatggtacaatgtatatgtatcgttctatgcattttatcaagctgtgtagatttgcatgactttaaccttagttaatatacataacgatttcatcaacacaaatatcttccttcatgctacccctttatattcacgcccacacacttccttgccaccacatgtatcctctggcaactaagaacatgctctccatttctatatttttgtcattttgagagtattatataagtggaatcatacagtatgtgaccttttaagatttttttttcttttttctcagcataattttctggtgattcttgcaagttattgcatatgtcaataattgatttatttgtattggtattgagtggtgcaactttctgttttgttttattttgtttcgagacagggtctcactctttcaaccaggctggagtgcaatggtgcgatcttggctcactgcaacctccgtctcccggattcaagcgattcttctgactcagtctcccaagtagctgggattacacgcacacaccaccactcctggctaatttttatatgtttagtggagacggggtttcatcatgttgaccagactagtctcgaactcctggcctcaagtgatcgtcttgcctcaaccccccaaaatgctgggattacaagcatgagccaccgtgcccagctaagtggtgcaactattgaatagtattccatggcatggatgtatcatagcttgtttaactattcaccttttgagggacattttagtcatttccattttttggctattacagatgaagctgttatgaatattcctgtagaggattttgtgcagtcatatgttttgttttctctgggataaatgcctgggaacgtaattgctgggttgtatgataagtgttttaaaagaaactgagggccaggtacagtgacccatgtctgtaatcccagcactttgggagtctgaggtgggcagattgcatgaatccaggagtttgagaccagtctgggcaacatggcgaaaccccatctctacaaaaagtacaaaaaattagctgggtccagtgatgtacacatgtagtcccaactactgtggagtctgaggtgggaggataacctgagccaggtagttgaggctgcagtgagccatgatggcgccactgcactccagcctgggtgacagagtgagaccctgtctgaaaaataaaataaaataaaataaaaacaaactcttagaatgtaaaatatgtttggtcttttttttttctttattttgagacagagtcagggtggagtgcaatggtgcgatattgggtcactgcaacctccacctcccaggttcaagcgattcacctgcctcaacctcctgagtagctggaattataggcgcccaccaccatgcccagctaatttttatatttgtagtggagaaggggtttcaccatgttggccaggctagtctcaaactcctgacctcaggtgatccacctgccttggcctcccaaagtgctgggattacaggcatgagccaccgtgttatgcccagcctgttatgtcattcttatgcctttgagtcctcatagcttagctcccacttgtaagtgagaacatacgacatttgggttttccattcctgtcactcatactttgggtagaatggaagcctgcaaacctgtgtggcttcatgctgggagactttcatgtaatatgatggactggactaattattaatgattgaatgggattctagtaatgtgccagtatcttttgaattctgtatccttctgatgtaaggccagcagggttctaaggggtagagagtagggacttgtgatattgcaaaatatgtattcggtctttgagcaggtttcctgacatacaactcctaaaatcattcgaatcttgtaagtgatgtctttttgtatgctaataatggacccatgcctggcaccttctaggtagcgtcacgatagggggtggtcaccataaagactaaggcaggaatagagggttgggacttgagtcccactcccaacctccagggagggaagaggggctgaaggttaagttggtcaccaataatcaatggtttaatcaatcatggctacacaatgaagcttccataaaggcctaaagaactgggtttgtagagcttccagatagatgaacacatgaaggttcccagagggtggtatgcccaagtagggaagggaagccctgttcctctttccacatgccttgctctatgtatctcttcacctgtatcctttgtaatatcttttataataaatcagtaaacataaggggtttcctgagtttggtgagccgctctatcaaattaatagaacacaaagagggggtaatgggtaccccaacttgaatctggtcagtgagatgttccagagacctggacttgggtctggtgtctgaattggggtagtgttgtggtaccgagcccccagcctgtgggatctgatgctatctccaggtagatagtgtcataattgaattggatgatgcccagctggtgtccactgcaaaattgattgcttatttggggtatgggggaaaattcccaaccatttggtcacagaagtcatgcatgttgattgttgctgtgttgtgagaatatagaaaaatgggggggggttcattcatagaaactgtcaaagtgttttctagagaggtttcacaattttacatttgcaacaatgtaataagaaattcagtttttctgtatcctcaccagcatttggtattgtcactgttttttgttttagcctttctgatagctctgtggtaatatctcaatatctctttgtatttatatwtatttttttgagacggaggcttactctgtcgcccaggctggagtgcagtggcgtgatcacagctcactgcaacctctgcctcatgggttcaagcgattctcctgcctcagcctcctgagtagctgggattacaggcgcccaacaccatgcctggctaattttgtatttttaatatagatggagttttgccatgttggccaggctggtctcgaactcctgacctcaagtgatccacccatctcagcctctcaaagtgctgggattacaggtgtgagccactgtgcccggcttctctttctattctttatgtttactgatcagctatttatgttgactattgtttcttatgcttatttgccatccacatatcctctgcagttaaatatttttttatatctgttgcccgttttctgtttggattgttatcaattttcaactttgagtattctttatatgtataaagaattttatatatgagtcctttgtgagatatgtggtttgtgaatactttctctcaatctacaacttgtcttttcatcctaacaggtcttttgtagagcaaaattgtaaaattttgttggagtttaggttgtagatttatttatttatttattttctttggagagcaagtctcattctggtctctcaggctgcagtgaaatggctagatcccggctcactgcaacctccacctcccaggctcgagcaatcctcccacctcagcctctcgagtagctgggactacaggtgagcgccaccacactcagccaatttttgcatttttcatagagatggggccttactgtgttgtccatgctggtcttgaactcctgtgctcaagtgatccacctgcctcggcctcccaaagtgctgggattacaggcatgagccaccatgcccagtcattttttttttcttttataggtcatgattttggtattatgtctaagaactcttcgtcaaggcctaggatctaaagattttcttcaaactttctcctaaaaattctgttgtttaatgtttaagtctgtgatgcattttgagataatttttgaataaggtatgaggtttaagttgaggttcatttttatgtctcatgttcagtggctccagggccatttattggaaaagtaatatttcctccattcaattgcttttgtacctttgataaaaatcacttgggtaataatttgtgtagatattccatttcaccctcaggagggcataaatgtggactgcacatggtgattttcttcctaagatgcagtatggaaaggaggaaagaaagagtaatttgagagtggagaaacctgacactgcgttatccaggtgatcaaggtcaacatcaatagtgataaatcatgttgatagtgtatacctgtggtatgatgtatgacagtggcactttatctcagtggtatttctccccaaaatttataatcccagtgtaatcatgataaaaacttaagacagatcttaattgagagacattctccaaaatacctgagcagtacttctcaaaaccggcaaggtcatcaagaacaaggaaagtctgagaaactaccagagctaaaaggagcctaaggagtcatgatgactaaacgtaatgtgggatcttggatgggatttggaaaagtaaaaagaccttaggtaaaaaccaaggaaatctgattaaagtatggactttaataatgtatcaatattcactagttgtgacacatgtaccatactattatacactgctaataacagaagaattgggtgtagtgtatatgggaactgtactctctttgaaattcttcaataaatctaaatcattctaaagtttatttaaaataatcagtggggctgggtactgtggctcatgcctttaatcccagcactttgattttttaaaaaggagctattttagttcctttatgtttccatatacattttagaattattttgtctgtctttgccccaaaaaaatcttgctgtggttttgataggaattgcctgaaacctgtatatcaatttggggagaattgacatttttattatgttgagtcttataatacataaacatggtaagcttctccatatatttagactttgatttcttttgtctgtgttttgttttcggtatacaattcttgaataggtttagttagaattacatgtacttgttttttgggggggttcattgtaaatggtattgtgttttttatttcagtttctacttgttaattgctagtatatacaaatacgattgatttttgtatgttgattttgtatggggcagctttgctgaactgatttattagttctaggaattttgtggcagattgcttggtgttgttttacagactatcagtcatctgaaatacagacgctttgaaatagagacacttttgatacgttgtaactttagttcaatgtatagttttttgtttgtttgtttttttacttgagatggggattcaaagtgttgggattacaggtgtgagccaccttgcctggcctcagtgtgttgttaattttccttgagatttcctctttgacctataggtttaggaatgtgttagtttccatgtgtttggaaattttcctgatttcttactgctactgatcttttcttttttcttttcttttcttttcttttctttctttctctttccctccctctctcccttcctcctcctcctccttcctccttctcttcttcttcttctttttcttttcttttctccttccctcactccctcctttcttttttctttctctctctttctttctttctctttctttctttctttctttctttctttctttctttttttctttctttctttctttctctctctctttccctccctctctccctccctctctcccttcctcctcctcctcctcttcttcttcttctctttttcttttcttttcccctcgctccttccttccttccttccttccttccttccttccttccttccttcctttctttctttctttctttctttctttctttctttctttcctctctttctttcttcttcttctttttctttttttttttgagacagattttcactctgttgcccaggctgcagagcattgtcaccatcagggttcactgcagcctcgacctcctgggctcaggcagtcctcccatctcagcctcctgagtagctgggattacaggcatgcattaccacgccaggctaatttcatgtattttttgtagagatggggctttgtaatgttgcccaggcctttctcgagctcctgggctcaagcaatccacatgcctcagcctccccaagcactgggattacaggcttgtgccaccgtgcccagcctgttactgatttctagtttgatttcattctgaccacagaatattccctgtggaattgaaaataaaaaaactttttttgaggttggttttatggctcagaatatggctgtggtaggcagaataatagcccttcaaaggtgtccacattctactcacttaaatttataaatgttatattgcatggcaaaagggaattaaggttgcaagtgtaatgaggtttgctgatggcctaattttgagatgtgagcatatcttggattagccaattgtgcccagtgttttcataacggtctttatacattgaagagggaggcaggaaagagagaaccagagtggtggaggtgtcataaggacttgatctgacattgctgatgtagaagatggagaaatctttggtcaggaaccaagtaatgtgcgtggctgggaaaggcaaagaaagagagtctcactaaaagcctccagaaggaacacagacctgctgacactgattgtagctcagtgaggcccattttgaggtttgacttcaagaactgtaagacaatacatttgtattgttttaaaccaccaagtttatggtaatttcttatggcagcgaatagaaaactaatataatggtctatatcagtaatatatcatggacgcttgaaaagaatgtctattctgctaattttggttggggtgttctataaattttgattagatcctgtagaccgatggtgttgcttagttgttctataaccttgctgtctagttttatacattgttgaaagaggactgttgaggtctcctattgtaattgtggatttgtctcttcttatggttctgtcagtctttgctttatgtgttttgaacatctgttgttttgtgcatacacatttaggaatgctatatcttcttggtggattggcacttttaacattatgtaatgcccctctgtatccctattaatttatttgctctgatgtctactttatctgatattaatataaccactcctgttttttttaatttttagttatttatttagagaccagattatgagactgtcattataataatattaagtcttctaatccatgaacacagatgtctttgcatatatttctgtctttaatttctttcattaatgctttgtagttttcattgtacaagtcttttgtctccttggttaaatttattcctatgtattttattctttgagacgctactgtaaatggaattatattcttaatttttctaattgttaattttttagtgtatagaaatgcaactgttttttttgtgttggttttgtgtcctgtaacttctaaattcatttattaggtctaataatattttttgtgaattttagggattttctgcatgttaagttcatgtcattggcaaatagagataattttacttcttcctttacaatttaagtttacattttattttctttacttgttaaattgctgtggctagaacttccaatactgtgttgaatagaagtggtaaagcttctagactttaataattgagtatgatattagctgtgtgtttttcatatatgacctttatcatgttgaggtagcaatcttctattcatagtttattgtttgttttaatatgaaatgtgttgaatttcatcaaatgaaatgtgtagaatgacttcgcataaatcgagatgagtatgtttctttcttactttctgtctttctctctctctctgtcccttcctccctccctacctccttctcccccctctttctttctttcttccctttcttccttttcttccctttcttttctgtcttctgactgggtctcactctgtcacctagatcaccaaggctggagtgcagtggtgtgatcatagctccctgcaggctcgaactccttggctcaaatgatccttctgcttcagtctcccaagtagctgggaagatgcacgtgaccatgacaggcttccctttgtttttattaaacgatgtataatatcgactgattctctctctgtgtctctttctctctctgttttttttttttttttgagatggagtcttgctctgtcgcccaggctggagtgcagtgacacgatcttggctcactgcaacctccacctcctgggttcaagcggttctcctgcytcagcctcctgagtagctgggactatatgcatgtgccaccatgcccagctaatttttgtatttttagtagagacagggattcaccattttgcttaggctggtcttgaactcctgacttcaggtgatccgcctgccttggcctcccaaagtgctggggttacaagtgtgagccaccatacctggccaagatgttcgtttttttttgtagtgtttttctctagctttggtatctgaatattttagaagggtttgagaagtattggtgttattgttttttaaatttttggtagaattcaacagtgaaaccacctggtccagggcttttatttttatttttattttttttggttgggaggattttttttttgaaatggagtttcgctcttgttgcctaggctggagtgcaatagcacgatctcggctcactgcaacttccacctcctggtttccagcaattcttctgcctcagcctcccaagtagctgggattacaggcatgcgctaccacgcccggctaattttgtatttttagtagagatggggtttcaccttgttggtcaggctggtctcgaactcctgacctcaagtgatccacccgcctcagcctcccaaagtgctgggattgcaggcatgagccactgtgcctggcccggttgggaggattttgattactgattcaatctcctaatggcattcatttattcagtttttctgtttctttgttattcagtttttgtaggttgtgtgttacaaggaatttgtccttttgatctaggcaatccaattggttggcatgcaattgtttatagtattctcttataatcctattgattcatgtaaaattggtagtaatgtcctctcatttatttctttttaaaaaaatttaatttttttaatttttgtgggtacataataggtatatatacttatggggtacatgagatattttgatacaggcatacaatggttaataatcacatcagggtaaatgaggtattcaatcatgtcaagcatttatcatttatttgtactgtaaaccaattatactcttttagttattttaaaatatacaataaattgttgttgactatagttacactgttgtgctattcagtactagattttattcattctaactatatcgttgtacccattaaccattcttactctcttccctcactccccactacccttgtcagcttctggtaatcatccttcaactctccatcttcatgagttcaattgttttaatttttagctcccaccaataagtgagaacatgtgaaatttgtctttctgtgcctggcttatttcacttaacacaatctccagttccatccattgttgttggaaatgacaggatttcattcttttttatggttgaatggagtactattcagccataaaaaaagaatgattagatctcatttgtggtatttgtgaatgacgtggtatatgtaccactttttctttatccattcatctgttgatggacacttagagtgctataagaaacatgggagtgtagatatctattcggtatgctgatttcctttcttttgggtatatacctagcagtgggattgcaggatcatacggcagctcaatttttagtttattaaggaagctccaaactgttctacatagtggttgtactaatttacattcccaccaacagtgtacgagggttcccctttttccacatactcgccagcatttattattgcctgccttttggataaaagccttcctttcctttctttcttatttatttatttatttatttgagatagggttttgctttgtcatccagcccacaatgcagttgtaggatcatcacgcactgcaacatcgagctcctgggctcacgtaatactcctgccttagcctcccaagtagctgggactacaggcatgtaccaccacacccagctaatttttattttttggtggatatgagtctcactctgttgcccagattggtcttgagctccttgactcaagtaatcctcctgccttggcctctctaaatgttgggattataagcatgagccaccgtgctcggtccctaattttattcctgattttaataatttgtgtcatctctattttttcctattcagtctagctaaaagtttgtcaattttgttgatctctttaatcttttggcttcattgattttccttattgtttttctattgtctattttattgatctggggactattttttattttctttcttctactatcttatgtttagttttctctttttcaagtttcttaaggtgtaaagttagattactgattcaagatatttcttcatttttaatgtaagcatttacagctataaatctccctttcagcactgcttttactgcatgccatacgtcttgaaaattatgttgtgtttttggtttcatttatctcaagatacttgctattttatcttgtgatttcttctttgacttattggttgtttaagagtgagttattggccgggagcacaggttcacacctgtaatcccagcattttggaaggccgaggcatgtgggattgcttgagctcaagagtttcagaccagtctgggcaacatagtgggaacccgtctctacaaaaaaaaaaaaaaaaaaaaaaaattagccgagcctagtggtacatgccagtagtcccagctacttgggaggctgaggtgggaggattgcttgaggctgcagtgagctgagattgtgccagtatactccagctggggcaacagaatgagaccctgtctcaaaaaaaaaaaaaaaaatagaatataatttcatgtgtttgtgaattttcctgttttcttatattattaatttctagtttaatttcatttttatcagaaaaaatattttgcatgactttaagcttttaaaatgtattaacatttgttttgtggcctaacatgttgtctgtcctggagaaattttcatgtgcatttcaaaaaatgtgtgttttattgttgtgggatggagtatcctttatatatctgtttgttccagttggcttatattgttgttcaagtacacaaattccttactgatcttctgtctggttgtttcatccattattgtatctattatagtataactatctgtttcttccttcggttttatcagtgtttgcttcaccagctaggcacggtggctcacgcctgtaatcccaacactttgggaggccgaggtgggcgcatcacttgaggtcaggagctcgagaccagcttggtcaacatggtgaaaccccgtctctactaaaaatacaaaaatgagccaggtgcgatggcgggtgcttataatcccagttactcgggaggctgaggcaggagaatcgattaaacccaggaggcggaggttgcagtgagcccagattgcatcactgcactccagcctgggtgacagagcgagactccatctcaaaacaaacaaacaaacaaagacatacctttgcttcatgtattctggggatttcatgtttgttgcttgtatgtttgtaattgctgtgtattctacgtgaattgcccttttaaatatatattatccattttgtttgatattcccattttgttctttttctttcttttttgggagcggggacagggtcttgctctgttgcctagcctggagtgctgtggcactatcatagcttactgcaagccttgacctcccaggctgaagccatcctccagcctcaacttccctccaaccaccttagctggggactacaggcatgcaccaccattcctggtgattttaaataattttttttttgaaggggtagagacaacttctcacaatgttgcccaggctggtctcgaactcttggtttcaagcagtctgcttgccttggcctctcacagtgctggaattacaggcatgagccatggcacctggcctcccccatgccttttattcccttatttgggttttcctatcagtgcctcttttcctagccttatcttctattttttcttttatattttgcagctgtttttctccctgtgctgtgctctggatgatttcttcagatctgttttctagtttgctactagtatgttgatggttattttctcttagcaagtaaaaactaataatccattttttggcagtgttgttgttgagcaaatggctgtcattctgattcttgtttcttttgagataatctgtgactggtatatggattctaatttttactatttttttgaatatttaaattattcatatttaaaaattactttttggagtgtaatataatcctagatcttacagaagagaacccacttatttgccttgactgctgcctggctctcatattggtttcctagtgtggtttataattttcaactgtgaagttctgggtggcagttgtttctttgggattcccttatgtgccctgggttatagaggtgttcttatggggcattttttttttcctcttcttagagcttgcgtggtgctggttcaggattagttttaaaattaacttttagaaacctttgtgagcagtataaacttgaactctaattagcaaaagcttgtggttctggataactttattttaccacaatgggagactctctagtgtattcctacagtgtcatatgccagtagacctcatgaagggacctcattccaagctcccakctcctaagtaatgtcccttygcctgctgataaaattccaactaccacatatagtcaattcttgttattcatggtagttatgctctgtaaagtcaatgtaaacatttagttagtgaatactgaaccatttctcctagaggaaatacagggttaggtacctgtgagcctctccacgttttcagcagccatcaatacataaacttgttttacctggtttctgtttaaagaccccatattttatcatatatatagttgattcattaacattgaattcatggctaacagcactagaagctgtggctgaacgaagcttatctagcacctacttgttttctctgtaaggatgtctcagccttctttcctttaggaccaccagatagtacttcagcactatgctaaggggccatgttaaacagctaacccatcaacaagaagtagaaaaatgtgacaaatgtggcactaaatagaccaggaaaaggacaattgttttatagtatgagagmtgaaacaagaaggcagtatcccccttttcaagctcagaatgtatatattggtgactcacatttttcatagctatttgcatgtccatgaatgagtgggcaaaatgtcgtaagtattgattttggtgttgcaagtacattttattgactaggcaaatttgcaaatatagaatccgtaaataatgagaactgagtatatctagttctaatctctctactgcctcagctgctgctctctgttatggctttgaatttgttcttcatttctagtacttgggagcttctttttcttgctttctcagtttgctatgtattttaaaaatacacacatgtttgttgcccttttacccagtatttttatgtatttggattaggaggaagatattttggttaaatcaatctgatttatagagtagctacttcatttactcattttaaaaaggaaaaacatatactcaagagtgttaaagagaagagaccttgaggattatcttgtttattggttcttaacatgggtttcttagggcatctggaactgtagagattgtacagaagtttatgttacatatatctttctgggaagaaagtattttttatattctcaaaggggtctataaccctttaaaaatgcaagaaccaggctgggcgcagtggctcacacttgtaatcccaacactttgggaggccaagacaggaagattgcttgagcacaggagtttgagatcggcctcctcaatatagtgtgaccctgtctctacaagaaaaaaataaaaaaataaatagccaggtgtcatggcgcacagctgtagtcccagccactcaggaggctgacgtgggaggatcacttgagcccaggaggttgaggctgcagtgagctgagatcatgccactgcactccagcctgggcatccgagctagaccctgtctcaaaaaacaaaaaaacaagtgcgagaaccactgtcctagtctagtttcacttcaaatttataggctaactgcgtatatcctcattagttcatatcagtctagttaatagcaacgttagccaaattttaaaataaaaataactacatttagaaagtgatttattttcttttcttttttcttttcttttcttttcttttttcttttcgtgagatggggtctcactctgtcacccaggctgcagtgcagtggcacagtctcagctcactgcaacctctgactcctgagctcaagtgatcctcccatcttagcctcctgagtagctagaaccacaggcacacaccaccacgcctgcctgattttttgtatttttggtagagacggggtttcaccatgttggccaggctggtctcgaactcctgagctcaagtgatctgcctgcctcagcctcccaaagtgctgggattacaggcgttagccactgccgcacccagccaatttattttttgtgaaagaacttcaccatgacatcttattttaatccccccacaagccaatgaggtatatgatattatgtttctttcacaactgtaggaactaaagggaagccacagtaactggtaagtagtagcatttttttgtttttgattaattgaggcccagggaggcaagttaacttgcccaaactcatgaaactgatttgttccagaggcaagactaaaactcctgtcttagtgatatttccactacctcattttgctttggaaaagcacataaccttaccaggtggtaatgtgatgagtcattgaaactaataaattcataagtataaagggatgcatgtgttaagagaacattttttatttcaaactgaaagtagtcaaaaccacaaagcctaggaatccctcgggcatttttattgtgtaatctgctttagaattagagttgcatccatgaagttttgagtcatattgaaacttagctacctaagtttcttcccagttaaaaactaggtgcaaatggagttatacacaatacaggtaaatatatatacctgtacttgtagataacgttttatacatgttttcctgttctatacatgttgcattgtagtttgtctcctctataagtggaaactaattaggacttgagcttcattatttccttttcttgatacaccctttttccactccctgggttgatcagtacctttggcactaatatctcagaacaattttctataggttatccttatgcagcttttatggcataatggattactggcacaattcacatggagtttcgtatatccattcgctataaattcctttttttttttttttgttgacatagggtctcgctctgtcacccaggctgaagtgcaatggcatgtgatctcacctcactgcaacctctgcctcccgggctcaagcaattctcctgcctcagcctcctgagtagctgggactacaggtgcacaccaccatgctcggctattattattattattattttttttttggtagagacagggtctcacaatgttgcctaggctgctcttgaactcctgagcttcaggcaatccgcatgcctcagcttcccaaagtgctgggattacaggcgtgagccaccacatctgacccactctataaattcctaatgtaatacagctatagtaatgaaactgtaagctgtgctaaatttttgcaacatttatttaatattcctgggaccactgaaatggtagtaaactgcttatatattaaagtggattttggggctgggtgcagtggctcatacctgtaatcccatcactttgggtggccaaagtgggaggatcacttgaagccaggacttcaagaccaacctgggaaacaaagcaagggtctgtctctacaaaaaattttagaaattagctgggtggagtggtgtgtgtttgtagtcttagctatgtgggaggctgaggtgggaggatcacttgagcccgggaggtcaaggctgcagtgagctgcaatcatgccactgcactccagcctgggtgacacaatgagaccctgtttcaaaaaaagaagatgaatttggggaaaaagtagatttaatttttcggacagcttccatctattaaattagacctttagaaattaaaaagttgatttactcttttaaagtcatacattcatttggctaacattgacgacctactttatactggacattattttagattttgagattatggataagaaaagcttttcttttctctgaagcagctcatgtattttccttctccttcattcttgctccccttctttgtatctcccaacttcccattccagttagttactgattcctccccaatctttcgataaagtttgttataatctaatgcctagaatctttttctaacatttgctccagtaacgagtagtagtcagctccagtaatgaagagctcattatctttacctggcttccccctaaaagcagagagagcttgatgcagaggcttgggagcagaggtagtttaagtggaagcaagagtgagggacaaaggaaatgatcaatgcagggagtggaaaagaagtgaaatgggaaaggaggaaaagccaatatttggatgcattattgagttggccaatgctcagacaactagtttaatcatgctgtagcctctgaagggccttatgaaatatgactgagaactatccagctggggactgaagagtggaagaatttattcagcagctccctcaccactgtatgttttaattggttctttcaaaattatttccattgttttattgatattttctctttggtgagacattgttctcagtctttccttagttcttaggcatggtgtcccgttgagcatggactattgtttcctgtgtcttagtctgtctcataattttttgttgaaaagtgaacatataaaatcatgtggcaactctggaaattagatttttcccttccccagggtggttgtttgttattgtatgcttatttattgactttttggactaattctataaagtgtgtattctttgttgttagaagccactgaagcctctggtaggtttgcttagtgggcagctaatgattgaacaatgatttaatttaaatactttgaaccaatagccttccagcttttgctgctggtcattgtgtgaattgggatatgctttcaacgacattcacctagtcagatgaccattatgccttatgtttctcttcctgcttgtgcagaacctcaaggctaagcaagaggtgagagattaggaacttcttaagtctttcatgggcctatgaatagcctggaacatgcacatattcttttttatgacccatgtctttctagattttacattgcaacttttcaaagcccccatgggcaggccattgtccattaaaaattattatgattattattttgagatggggtctctctctgttactcaggcttcagtgcagtggtatgatcactgctcgctacagtctcgacctcttgccacttcagcctcctgagtagctttgaccacaggcatacactacgtcacccggctattttttatttttattttttctagagatggggttctcactatgttactcaggctagtctcgaactcttgggctcaagccatcctccagcctcagcctcccaaagtgctgggattataggaatgagccaccaagcctggcgtgtcttgattttatttaattaattattattatttttttttaccaagtgttttggtcagcctcttgttaatttcagcttgtcacactgcttcaggtcaccataatcttaaactatttcagatgattgtttttgacaaattccccaatagcagtgttgttttcacagaatgaacttaaagtcagaacaaactaagacaaattttgagtatagagcttataggacatattaaaccggatggcaattttctgggggtagggccttgtgaaacttcaaccacattctgccttctctagtggctgctaagctgttgattttcacagctgttgtagctgtatgactgtgggttttcagtgttactgcagagatggagatggtgctttgattagcataccttaatataccaaaaaggtcactgttcttatagagattcagtctttttaaaattaaataaacagtattcagattgctaagccctttgttaatttaaagaatgctaagccctttgttaatttaaagaatattcgcaatacatttatctggcaaaagactcgtttccagaatacataaagaaatcttatagtttagtcataagacaactcaattataaaatgggcaagagatttgaacagacccttcttgaaaaaaagatacgcaaataataaatatatgacatttatatcattaatcaccagaaaaatgcaaattaaaactagtgagatactattacacacccattagaatgactaaaatgaaaataaataaataaataaccaggtgttggcaagtatgtggatcatctgaaattatcctacagaatgcaaaatggtataatcatgtttgaaaaaaaatggtcatttattttataaaagattgataaacatttttatttgatacatatttgtatgtatttatgggatacagtgtgatatttcaatatgtgtatataatgtgtaatgatcaaatcagagtaattagcatgacctaaaatatttatcatttctttgtctgggcaacattcaaaatcctgttttctaactatttgaatgtatacaataaaatattgttaactatagtcacactgcattgcaatagaaagtggaactttttcttctgtctagccataattttgtatacattaaccaactcttctttgtttctttgagacaggcctaaccaactcctctttatcccctgctcctccctacccttccaagcctctagtaaccactactctattctctacttctatgagatcaacttttttagctctcacatacgagtaagagcatgtggtatttatctttcttgtccctggcttattttagttaacataatgtcttcaaggctcatccgtgttgccatgaatgccaggattcatgctttttaattgctgaataatatttcactgtgtatatatattacattttctttctttcttttttttttttgagatgaaatttcacttttgttgttcaggctggagtgcaatggcgtgatctcggctctctgcaacctccgcctcctgggttcaagcgatcctcctgcctcagcctctcaagtagctgggattacaggcatgcaccaccacacctggctaattttgtatttttttagtagagatggagttttaccatgttggtcaggctggtctcaaactcctgaccttaagtgatccacccgtcttggcctcccaaagtgctgggattacaggcgtgagccactgtgcctggcccattttctttactcatttatatattgatgaacacttaggtcgattccatattttggcattgtgaataggtgctgcaataaaaatgatgcagatatctctttgatatactgcttttggggtcttttgtgattccagataaattgtagcatttgttttgatatttctgtgaagaatgccctttgcattttgttagggattgcactgaagtatagattgttttgggtagtgtgttcattttaacaatattaacttctaaaattattgaacatcggatgtcttttccttatttttgtgcatcctattcactttccttcttcagtgttttatagttttccatgtgtagatcttttacttccttggtcaaatttattcctaggtattttatttttttgtagctattgcaaatgtgattgctttcttttttaaaatttttatatttttaagatacagggtctcactctcacctagacaggagtgcaatagcatgatcacagctcagtgtagccttgaactcctgggctcaatcagtcctctcgcctcagcctctcaagtagctaggactacaggcttgcaccaccacacatagctaatttaaagaaaatttttttgtgtggagacagggtttcactatattgcccaggctgatctcaaactcctgacctcaagcaatcctccttccttggcctcccaaagctctgagattaaaggcatgagccactgcaacccgtcgtgattgctttttaaatttcttttttttcttttttctttttttttttgagatagagtctctttgtgttgcccaggctggagtgcagtggcaggatctcagctcactgaaatctctgcctctcgggttcaagtggttctcctgcttcagcctcccaagtagctgggactacaggtgcatgccaccatgcctggctaatttttgtatttttagtagagatggggtttcaccatgttggccagtctggtttcgaactcctgacctcaagtaatctgcccgcgttggcctcccaaagtgcttaattataggcatgagctactgcgcctggctcttgatttatttttagctaaatgtggcactcgggttatgtatacttaccaatttaccatgtaacccatgcattggagaaatgaaaacatacgccctgaagaggcttgtgcatgaattttctttgaaactttattcacaatggtgaaaaactgaaacaaacactgatgtccatgaagaaatgataaataaacacattgtggtatatttacataatggagtgttacttagcaacaaaaacaaaaattactgatacaagcgataacgtggatgaattttaaaacattgtgcagacctaaatgagtccgatacaaaggagtctattttatatgattctattttcatgaaactctcgaaaagtattgtgatgaaaaacaggtgtctacactaattaatcaatcttgttcatattctgtctcattcccttaaagttcaaagtgcctaaaaagcactatccaactacattctataatgtgtaagggaaaggtgaagtaaagacattgtggaagacacatacataaataaggtgatggagagaggactctgaaagctggactgaaaaatattgacatagtggcagaatggacggggatggggaagataaaatgatgagttcacattgtttggagtgatgtagtgaatttaaaatgatgaagaattaaatgtgtcacacacgacaagcatttctaggttatctatggattctttgtagtctagaagtcatccacttcacttgtttatctaaaatatatgagtcttttccaggacttttctcagcacaagggacaaatgtatgggaacttggaccttgtttcaagaagagctgtgaatttatgcttgttcttttttttttttttttttttttgagatggagtctcgctctggcacccaggctggagttcagtggcatgatctcggctcgctgcaacctccacctcccaggttcaagtgattctcctgtctcaaccccccaagtagctgggactacagaagcccaccaccacagctggctaatttttgtatttttagtaaagatgggatttcaccaagttggccaagctggtctcgaactcctgacctcaggtgatctgcccgcctcagtgtcccaaagtactgggattacaggcgtgagccaccacacccggctgcttgttcatatttttgaatggaatttgtgtgcattgtttcattttttgttcatttgattctaaggtgaggacagtatttcctacttttatgtagttgggagcagtaaatggaaatgtttgtggaaagctcctcataaaatttcaaggccttttgtagatatagtgttttaaaggcccagagtctggagaaaagaagagataggtacaaataatgaaaagggagactagatgcaacttcttccttattccatgcctttattttcaaaatactataaatgttgaatattatagtatttgtggtttctgaaattttgagataattttaagaagaggaataattaataactgttccttccttggctcaaataatatttaggaaatactagtaggtgtggaagagcaacacaataaatgtttttatttaatttccctgagcataacagagagcagatggggaattctgggcctgcccttttttactgttagccaaggagagcagaaaaaataaattgttttccagacatggagccagttttgtgttctcgttgctgatgtactgtgaaaggatttgaagggtgtgcatgcacttgtcacattcatgtggcttagatttgtagtggaaaatgttattctagattgtcaaaattgtgagaagccatgctaacctggtctgtgtaaaaatgtcattattattgttattattactattttcagtgattcgttcaaagagttaagacttaaaattctgataataagtatttctgaaaatgagacaaagacaaaatgctaataaaatttttggcttataatttgtttcagccaaatgcttgaacttgttttattgtgtttttgcttaacgatgtcagcttttcattaaaaggactcagtgtggttgcttgccttgtctccattttccttggtctgagagcaaatactcaggctcagtaagtccatgcatatgataggtttgaaaatgcaggatggaggaggrtgatgaaactagggagagaaagaagaaatcggaaaagagagccaaaaataaccaacaagcttaagctttcctagaacatggtctaacaggttagctttgttggtaagatcagtgtgcctcaaagttaaggagtatatgaatgccctggggcttggataaaaatgtaatttctgatttgttaagtccagggtagggcttggcaatgtgcatttccttccacctcccaggcgatgatgatgctgctggccttagaaccactcttggagtgcaacaagggtcaaaagttgggttggacctcttggtgggggcatatttaaaaaatctcaataaagataacttctcaaaagtatagctaaacatgatttaattttataccaacttatacactaaaatatattctaaaattcaaaatcattgaccaaaaataaaagcatttgtttggccatgtcaccctgattgttttcattcgttgctttcttaggycaggtctcttgataaatactctgtgaacaagttaaggastcttcgtcttccagatagcatcctaacccaggctgtcatctggttaacatgtaaaatgtccaggtggtacctgtatcatcatggatagggctctggagaagcagacagaccacctggcttctatttccagctttgccaccaagctctgggactttgaactccacacgtataaaatggaaagcatctagtgtattgcccataataggggtttaggaaatgtgtaaggagaccctcttaagagtatatctaagtagtttcatgtcttccatgctttgagtggaacaggtcagagaggagaggtgttgaggataaaaacatgtcccgtaacttttaaggactttactgagatgccccatcctttcttcttgtgattttagttgttcaaactttcttctactgcatatctaatcttttgttttatttcattaaatgctagttgcaacctgctcagagcacttacctttggttttcttttatctgctcttayagagatgaggaaatagatcaaagcatagcattgttgaacatttctcttgttacccttcctttgcagattattcttctgctgttcagaaattttcccagacgctgcagtcatttcagtttgatttcattggagacactctgactgatgatgaaattaacatcggtaagtcttcagctacatgtggtcatatacctgttgaggcagccctgagaccatgtagtctttttgatttgtggatacagagcacttggacatcttcatccactgtggtccaatgccaaggccctgggaggttgattaggaaggatcaggaaactttccctgccagtcccatttcctcctcacacgacagcaatcaaaagatacccttaaacttctactgagatttttgactcagacagtctgcaagcgaccttttctttaaagcatagttattttcctaaaggatatattaaaagggggacttttttggtttatttcccaaaatggttggagttagattcttctaaggaatcaaatttccctagaaagtgttaaattagcatttgtgtgtctacaacttatcaggaacaggttgcttagcatctctcttgggaattggatttaacaactcactctattagttgtataatcttggagaagatatttctgtctctgagtctcatcttgtcctctgttaaaatggggttaatatctatcaaagatgttaaaaagaggaggttgaatagtagaagtcaaaagaagtttgcgtttgtattatttgttatgaaggtaaagaggagaggttaacaaacccctgggcctattccagctcaccacctgcttttgtaaataaagttttattggaacatacccatactcatttatttaagcgttttctatgggtatttttgtggcacaagaatagcactgagtagttagtgaccaccactggatggtcctcaaagcctaaaatcgttatcttctggccatttaagaaaaagtttgctgattcctgagttaaagggttagtgtagagcatttgctagatgagaacactgaaccaaagagctattatgaatgatctattgttactggaacaagttagtaacacagttatatttattagccctggaactaaaatgtgaaaatgtattattattaataaatgcctattatagtcaattttaataatatataaaagtataagttacttatgataggaagatattcctgcacagaaatagtatsttggacatacttttatattatcctttaagtctttttctctacatatatctgttttctttgtatgcaatgtagttcatattaaatatataatattatctttctaaccaaatattttattataagcattttcccatgtaatttaagatttttcacaagttttatgggtggtttgtatggccttgttttgttcactactgttttcccagcacataaaggagtgcctggcatacagtagatgttcaatgaaatgttggtaaatgaatgagtaatggatacattcaaatttcattattatgagagctatacttcatttaatatttagctattcttggaaatatagcttatttccatttttcactattataagtaatatttcaatgaacattttttagatttagattggtgaccattttggttaaatgtgactgtgtaactagtgagtcagatatttgtatttgtattattttcttattcactccattttattttacttcagtaaatctatccaggtccaagtgcatgactatttaaaagttaacattatgggctctggaatcaagtaacccaagtttgaactctacctctacatcttaatagctctgtaaccttggcaagtaacttcacctctctaagtgttaaattttcttatcttgtaaaatggggatgagataatgccaagtgtgcatagtgtctaaatgaatgttaggtatttcaacattattattaatataagatatttttgtacttctttttaaaaataactgctacttgcctatcagttggaagattgggagatacatggtacatgaaattatataaatggctcctttttctggtataagggtctgattttgaacaggtgcctattgataccaaagccaccaacagatctgagacttttctcatgtcttcctttatgttgaactttgagccttaattctcttaatcccatgaacctcactgcaaatgtcaatgagtgctatgcaggaaaaagggtgtgtgagcctgggcaaaatgacttataaacaaaagaaaaatgactccttggtgatgccaggttcctgtgggggtctgtggggctccatcagagctgctgattatgacatctttgctgcttttttaaaaaaagaaagaaagacagggtcttgctctgtttacccagactggtcttgaactcctgggctcaagctatcctcccaccaccttggtctcccaaagctctgtgattacagrcatcagctaccacacccrgtcttttgcttcttttttttttttttttttttttaagatggagtcttgctctgttccccaggctggagatcagtgggctcactgcaacctctgcctcccgggttcaagtgattctcctgcctgagcctcccgagtagctgggattacaggcacccgccatgatgcctggctaatttttgtatttttaatagatacacggtttcaccacgttggccaggctggtctcgaacacctgacctcaagtgatccaacccatcttggcctcccaaagtgttgagattacaggcatgagccatagtgcccggcctttttgcttcttaatgtatgatttataataactctttaactcagtgatcatttgcctgccaatttcagaagctcctacttatcatttgaacactgcttttaaggatgctgacttaatgaactgactttcattattgaggaccaaagagaggttttgaaaattcattggcctgtcatggtcattgtccttgttgaatctcattttgaaagctgggaattgtggtggtagtgagaggaagagccagtactccaacagctgaggctgaggctctctggaggcttcgagaaaaaaatactggggaccctactgggaggctattgttgggaaagagcagttgctttggaagctgagaacgcagagtgtgccatgccctcctattgccaatactgctggccctgagtcaatacatcttgtttcactggaaaaaaaaattgcttaaagcacactttggatggaattgtgatacccttttggatttcacattatatgtgcagagggccttctcattaaaaatttttcattattggctccaaaaggtcactcagtagcattgtaggtactcgttatttagcagaaatgacagtgcttcctagagctcatggagaaagcctgaggattctgaagagttcctccccctgacgatcagctctaggacttaccctgaatagtttatgtctaacagggacaagtgggaggccatgtgtcattgatctgaccgtgacttttttcactgctttagagttagacatctatgccttcttggcattgccttgtctttacctctatgtctctgtaaccaaaggaaatcccaggtgtctaagaagtcttgtgtctgcttagatttgagttttatatgttagctatgggatcttggtaacattaattgagcttgttgagcatctgttttccacatcagtatagtgggggagtataatccacctcacaaggtcatgaggagcaaatcagataatacttatatcagagagtgtctgtaaatcatttagctcagtgtctggcatatagttggtgctcaataattcattgttattgattctactaggaacactatagaaggtaatttgtggaaaacagtgttggtttgaaattatatttcccaaattaaccaaaggaaaatataggattgtaaaatgtccatgttggcaggraccttaaatagtatttagttcattatttctcgtataacttcatatccgagtcacctgaggatctcgtttatcctgtcacaggacctaccttatacctaaagaatcagaatttctatagcggagcccagggccttgatttttacatagtctttataacatcagcgagcattttgtaaccccaggacagatctcaagcttttccaaactgtgctccttggatcctcagtgtctcccgtctttcatgatcaaatgaaacagcggtttatattgggctttcatgtaagaatttgcttgaaaaatgggatttgtagattaaacgagagaaacagacacttttagagtgctcccaaatagcagatgtcattgtaagcactttatatagactaatgagagaaagagagacagaatagtagcaagtttatccctcaattcaacagatggagaaactgagatccagaggtagggatgtgattgtggaaggtaccacacagctacatagtaccagatttactattagagcctgaatctcctaaggcccaattgattcattcaataacattttattgagcatctgctataaagcttgtcctcatggacttcccaatcatacaagttttggcataggcaaatgacttgcaatgtcaccatagcaccatgagctagaaagaggcctgtttgccacataggcttaagagaatatgcttactttttttttttttttttttttttttttttgtgatagagtctcactcttgtcacccaggctggagtgcagtggcgtgatctcgactcactgcaacctccgcctcccgggttcaagagattctcctgcctcggcctcccgagtagctgggattacaggcatgcgtaaatacatgcccggctattttttgtagttttagtagagactgggtttcaccatgttggcccggctggtcttgaactcctgacctcaggtaatccgcctaccctggcctcccaaagtgctgggattacaggcgtgaaccactgcacccggccaggttactcttttctcaggatcccttatatgtatttttgttcattagtaaataggtagcgtgtccactaaatgacataaacaagggattcagagacatagaacacatcttcctgccttcaaggagctcatagtctattaaaggaggtggataactaaataggcaatggtaacacaatgtgataaggactatggtagaggtaagcacatggtagcccctaattcagactggtgtgtatatgtattgggggacgggatgatgcggagaataaacatggaagccttctcagagaagtgatatctgagtcagttccagggttaaggtgaaacaaggcaggtggctagggctcagatttaaggaggcacttactctcagggttgtgcaagtacaggctggcacttgagagtgaatatacctccttaaagtttacagcctgggtacctgggaattatttggtgaggatcttcagagggcctcgtattttaacttcaaatttcaatcttgtcatcagcagagcatggcatccattaggtgaaccctgatagcatagttcttttattctgtgcatctaccttgctacatcttttccagaaaatgtcacccatggggttttagtgggttgtttgtttatgcctgggggaataaaagtcatgttctaaatctcagactgtaaatcacatttccaccccagttatgctaacatatttaaagaaacacctttgtggaccaagaagattgatttaaggtcagacttctagatggaaagttccatcagccacccattactggtttctgagacatgagggtttaacattgtcagtcccctgatcctgatttttgtttaatgtgaatattattcattgctaaacaactcacagcagatcataaacctcttggttgagataaagaagggactaagaaatagtctcttgagggcttttgttggtatttttttctacaaaaccagttgaagtatcttttgagaagtggtggcaaatgtcagttgttttagagtcctggaggtcaggcatcttaaaagaggaatggctaaaatgaaaaaagaagcactaatgtaaaagattgtatttaagtaaagagccaggagttgaattctgaaggttcagtgattttcatgagattggtggggggaaaatcttttggttatacatcttgaagctcttaagctcatatgtcagttggtgacattgttcacaatattgattatctttcatataggggcatgcatgaaccaaatattttgccagactttcttagcacaggcaatagcttttctggggaaagttctagcccaatgcaccttctgctgtggtgataagcccttagaggtttatatcaagttattgggcttgagtgcatagggcttcttctcagatcctgaggaaaagagaaaatacaaggtaatcagaagtctctattgggatctgggccgtcaggttttagttctccatgactcgaagtcatatgagaaggtgataattgggctgggtacggtgcctcatgcctgtaatctcagcactttggaaggcaaatgtgagtgactcacttgagcctaggagctgattctaaatgctttcagggaagcatcagattaaaacataaaaacctatgtgtagatgagaaaggacttaaaatggcagtggccaacttattactgatcattttcaaaagtggaagacttgatgaaattttattaccagaagaataatgcaactgaaaaatacatgggatttatgtggcatataaaacaaaagaaatatcaatccataaaaagattttacaaaaaatctataatcataataacactattttcaaggaagagtgaatattatatttataaaaattggtaaacaacctttatgaagaaaaaagtcttcagacataacataataattctgacataatataccatgaacatagcaagcttatagttagaatataccaagaatatatcaataatatcaagtaaagctgggctcagcgatgcatacctgtaatcccaggtactcaggaggctgaggtgggaggattgattgaacaacccccagccacccaaaagaatatcaagtaaagagattgagaaatcttaataaaacatactgtggaaagcaagaacattgatcgttctctaagaacttcctgtatagcattcaatttctgaaatatgtacattggtaacgtttagcccatttaagctagggaagtctgaacatctcttttgatttcatggtgcttcctgtgcaactcagacgataaaacaaaaagcaccaaaactatgcactggacaattaaggaagttattgccatagggagaacctttattaatgaggaacatctcaaagaaatggaagaaaattggggtattgtagaggcaggtaaacaagggagtcacctgcaagtcttatgggaggcatgaagaagaatggagattgatgctatatatgaggtgcaaagtctatatatagactttgcagtctaaccatttttcagaacacagaaggatgtgggatgtcttaacactggctgctttcttggagccctggtctcagttccacactcagtggtccgggattcacaaagcagggcacaacccagtgtcctttcaaagctcccaggccctctgaggttccactggggaatttgagtgaagaagatggcactcatgcagagtgaggagactgctgaacatgagccccctattctcataggctttttgtacctttttgcccatttcccttctgactgatctggagactgactgctggttaagtgccagccagggtcaagtaagtggtacaaaatgatcccaagacgttcctatttgttgagagatctagcaaagtgaatgtcattttctcaggagcatcatttggcaggcccaggcttcaggcctgtctgccatttactctttctccctcattaaggtctcttggactccagtaatctttcactctgagctctcttctctatcctgttcctgccaccatattgtatccatagcaatgacccttatatcttggctcacttttcttcatggggatatggtaggatttagaaacatggtcttggatttggctggacctgagttcagactctgacctgtttatttactgactacatgatcttaggcagttttcattaaaaaaagtaataattgagtttattggtatctttgcattataatataaacatgctttattataaaaatatggaaatgaacaaaaagattattattagcttccgtatactgagtacctactgtgtgcctactgctttgtgtacactatctaattctcagagcaattttaaggaggtgaatgaggctaatggaggttaagaaacttgcccaggatcacatagctaataagtagcttaagtgggattttttttttttttaatcagggtttggctctgtcacctaggctggagtgcagtggcaggactgtggctcactgcagccttgacctcccaggctcatttgattttcccatctcagcctcctgagcagccagaaagcacacctcacctggctaatttttgtcgcttttttttccctttctttcttttttttttgagatggagtcttgctctgtcacccaggctggagtgcagaggcacgatctcagttcactgcaacctctacctcccaggttcaagcaattctcctgcctcagcctcctgggtaggtgggattacaggtgctcaccaccacccctggctaatttttgtatttttggtagagatggggtttcaccatgttggccaggcttgtctcaaactcctgatctcaagtgatccacctgcctcggcctcccaaagtgttgggattgcaggtgtgagccacagcacctggccctaatttttgtagcttttttcgtagagttgaatttcatcatgttgcccagactggtcgtgaactcctgagctcaagcgatctgcctacctcggctttccaaagtgaagggattataggcatgagccaccatgcccagctttaagtaggtctttaaatcatttcatttttgactttaaaatttatacatatatgcactccataaccgtgttaatgtcatagtaaataatcaataaatagttaagcctgagagctagatttaattaaaaaaaaaagaatcaattattttgatgtatttttttcttggcttttttgggggtcgaaacaattttctgcatatagctgtacttgtgtacaattgttgcatacagatttttatattctgtttttaaatagtgtgacactctagctattttgtcatgtacagaaaattttgtgtaatttcctttttaatagcttcaataatagtccattaagtggacatacttaataatttcccaatcattggacattttatgtgttttcaattattcatcatcagcaataatgttgaatgcctacctttggatataaaggtttatccctctgtattcagaattagttctttttgtttgtttgtttgttttttgtagagatggggggtctcacttttgtagagatggctcactgttgccatcaggcatttgagcaatcctcctgccttggcctcccaaagtgttgagattacaggtattttccaccatgaccatgccatgattaggttttaggtatggtttcccagatacgaatttacaatgtaaaagggtatagataattttaagctgtttgatccacatttgtcaatttttacaattgtttggaagacagtgcataacactgtaatttatatgaccttgctaaattaaacctcagttttctcatcactgaaattgtaatgatgaataataaaacacttgagaaacatctaccatattgcttttcccatctcacttttccgaattttttgtaatttctttgaaattttccaaggataatgttctcttgctgtggtctttttttaaaaagaaaattcttggattggtaaacattattgaggaattttgcagtaagttttataagccctgctttgtggtggtgttgcggcaggggatgttgctattattgatgatggtgttgttgtttgttatggttatgcagggctgttttcttccatttcttagccaattttcttagtcctcagtcctagtatctgaagagagggcaaaaggactctaatgactttggctccttaatgactattctctcccacactctgtaatggacagtctgatctcctcactaaagcttttattgccttcccattaattctacagagccgtctgcagggttagtttttagaagatgctgtaattaattatccatgatatttggttaaaaatagatccgtaagaggctttataggacctcaagattctgagtcagaaataacccttgtccaaaccttccgcttttgcctttttcttttgtcttttttttctttttctttttctttttgagatgaagtttcactcttgtcccccaggctggagtgcagtggcacgatcttggctcactgcaacctctgcctcctgggttcaagcaattctcctgcctcagccttccgagtagctgggattacaggtgtctgcttccacgctcggctaatttttgtatttttagtagagacgggggtctcacgatgttggccaggctggtcttgaacgtctgacctcaggtgatccatcctccttggcctcccaaagtgctgggattacaggtgtgagccactgtgcctggttctgcttttgcccttttcttgatttgctatagatatgaccaagggagagtgaatatgaggatatttggagaagaaaacaccatttgtggggccagttggagggacagtgaaaacaatgtgacatagtgctttcactatgactggggactgtagatagaacattgaaatggggtcctcttttgactgttcagctagctgtgtgaccttgaacaagtcagttccaatctctgggcctcagttttctcaggaataaaatgacatagttggactaagatagatgatctgtaaaagtcttaacctttttagaaagcaagtgattacaatcttagaatcaagaggctatcttgactttgctacatgcttcttgccctgtgccacatacttctctaggcatttgcagtcttccgatcaagcaataaatgtactcatagggctttttcaggccacatattcagcaatgaggtttttcttgactcagcaacttaattttaaagtgatttaacaattactgaagctgtatgttaattgaaagtaaggatcaagaagctctgaccaggttaccacggtgggaatagttgaaaaatgacctccaaaaattcgatctttcataaaagcagcaaaaacactggcagaaatttccaaaatcaacttttttaaaactccaaaaacgaaccaaaattttgcaacaaaacagtgcatgtttattaaataaaaatggctgaatagttgagaaaacactgagctctatgacattttaatttgccatgttcctattcctttctgcagttccatagtagctttgaaaactaacgtctgtataatcatgcaatgtgtgcaaaccaccattctagcagccatgggtgagggtagaatgggtgtgaagttactcaaaatttgagaaatatcactcacagggcttatgttatttgagttgactcagagtttactctttaaatggttgttgttgttgttttactagcgcattttctttcttttgtgcattttttttttttttttgagacagaactcctgacctcaagcaatcctcctgccttggcctcacaagcaatcctcctgccttggcctctgagattaaaggcatgagtcactgcaacccacttgtgattgttttttttttttttttaatttcttttcttttccttccttccttcttcctttctttcttcttttccccttcccttcccttctcttctcttttcttttctcccttcccttcccttccctccttccttctttcctttcttcccttccccttctcctccctccctcccttttctttctttctttctttctttctttctttccttctttcttccttccttccttcctttctctctctctttcttttttttcttcctttctttttctttctccttccttccttccttcctttcttcctttcttaatttcttttccttccttcctgccttccttccttctttctctctctctctttctctctctctcatccaggctgtagtgcagtagtggcatcttggcttactgaagcctctgcctcccgatttcaagcaatattcctgcctcagcctcctgagtagctggaattacaggcacctgccaccatgcccagctaatttttgtatttttagtagagacaagtttctccacgttggccaggctggtctcaaacttctggtctcaagcagtccacctgcctgagcctcccagagtactaggattacaggtgtgagccaccacacctgcccctagggcattttctaaaaccattcagtggcagttgtttagtactacagtttccacagacaacaaaaagaataaagtagcaaataagaagctgaacaataaaccaaacaggacaaaatggagaatgaattatccttggagagctttgaagagctgtgagatattcctggaaatctaggagtcatgcacatgagaggggctttgtacatacccagcgtttgtatctgtctagaagatacaaacaaggagattagacttgagacatctaatctcccacttctggctgaccttcagctctttgcaaggaggagtgaaggctaaggcacagttgtaaactgtctggctgaatgttgaaggcacaccccacaatacacagagagcccttcagcaaaggcttggagatatttgttcaaaccatttaaagaaatctctgtccaatcacttgttgaccagtaagcttactgaccagagactttagtggtttcatatgacaaagaatgcagactatagaatgagtccatgaagccaatgtaacaacaagcaaccacaagaacaacaagctctggggaaagagaggagttctgatttccaaagttgccacactatttagaatgttaacttttaaaaaattatgagacatgcaaagaaatagtaaaatatgacccttgaacaagggaaaaaaagcaattaatagaacctgcccccgaggaagcccttacattagattttctagacaaagagtttcaattacctatttaaatatatttaaattaataaatgagaccatgtctaaagaacttaagaaatgaatgagaacagtgtctcacaaaatagacaatatcaataaagagatagattttttttaaaggaatcaactgaaacttgcagttggaagttgcagtataataactgaaatgaaaaacttactactgggggttcagcaccatattgtactgggaaaataaatgaccagcaaatttaaagacaagtgaattgagatcattcaatctgagggaaataaagaataatgattgagaaaaatgaacagaacctcagatacctgtgggatatcatcaagcataagagcatatacagaatgagaacctcagaagaagagagtgagacaggaaagaaagaatatttgaagaaataatggccaagaaattggcaaatttggtgaaaaacatgaatctgcacatccaagaagttaaatttagagatacatgcctaaccatatgagtctaatgaaagaaaataacagagataatcttgtaaaaaataagagaaaaatgaaagaagagaaatgaatgaaaacagtcacaacatactaaatcttatgggatgctgctaaaacagtgtttggaaggaaatttgtagcttcaaattcctatgttaaaaaagaacaaagatatcaaatcaataaccaaactttccaacttaagacacttgaaaaacaagagcaaactaaagaaacaaaagtaaagaaataataaagactaaagaggaaataaatgaaatggagaacagaaaaagaatataataataaggcagccttgtcaaaataacaagacagtcattgaaaccaaacatctgttcttcataaagttaaacaaaattgacaaacccttagctagactgaccgtgagactacttgaattactaaaatcaggaatgaaataggggacattactactaatcctagagaaataaaactgattataatgaaatactaaatatagttgaccctcaaacaatatgggttcaaaacgcagaggtccagttacaggcagactttttctctttgatttggatagaaaaatacagtatttgtgggatgtgaaattcacacacatggagggccaacttttcatatgtacgtacattcacataaaacttgttcacaaatgttcatggttgcataaaccagattcagaggtcacatgtgtttccatttatgagaaatgtctagagtaggcaagttcatggaaatagaaaatagattagtggttatctgggtgttgggaggaagtggtaatggggtgtaatgctaatggggtttgggtttcttttgggggtgatgaaaatgttctgcaactgtacagtggtgatagttgcacaactttgtgaatatactaaaagcccgaattgtacactttaaaatggtgcattttattatgtctcagtccatttgtgtcaccataaaggaatacccaatgctaggtgatttatgaagaagagaggtttatttggctcatggttctgcaggctgtataggaagcatggcatcagcatctgcttctggtgagcacctcaggaagcttccagtggtggcagaagaagaaagggagtcagtgtgtcacacctcacctccaacattggggatcaaatttcaacatgagattttgaggagatagatacccaaactatattatatggtgatatcaattcagtgataataataagcacctaataaagatattgtcacaattaaaccctcaagcagaaggcttggcacatttaatgtccatgaaatttagtcttttcctttaaatgtttgaatatgatatttgtcacatttcctttagaggtaaactgatcgtgtctggaaaaatgccaattaaaatctctgactcttttcttagcataaagtatttggggacagaaggtcaataaacatttccattttttcctgtttactctttctgagtatggtgtttatcttttctatgctacggttgagctctgaatgaatttagtgttttcaaaggtgatctccctgggtatttgcagcaacttaatcctcagaagaagaaagaaatgtcattgccttgcatcctgtgttgactccaaaattcatttccttgacaccaggaatgctggacttgttcagttgttttaaggaggaaactcaatttttgattaaaaatattagtatagacaaatttgtttttccaggctttcattcagatgccagtcgagaatatacttcctgcttctggagagaagttgaggaatttgaataggcactaaagactatttagcttaacttacttttttttgtatataaagacattgaatttctgagaaaggaagtgatttgcccagtcatcctgccagtaagtggcacaattggcactagaagagtagaaagtttgggagggtggaaagggtaatgtttattatttactttgtgttgacactacattcaccatgcggtttagtttttatcagcaatagtctctggttggtcagtagtggaacagggatccaaactcgtttcagggttctatagctgccaattaattacacagcaaacctcttgccccttccctaatcttttagcttgtctatgaaataagagaaattctagctactcctgagtggctgtaaggattaaataaaatattaaagtgtatggggattgataaaagaggaaagaaaagaaaagaaacattcaacaggtgctgaacacctgcttttgtcctccgatttgacaccttcctctagtggccatgtgggcatagggcactggtccctacttcctgttgcacagatctctatccatttgtctgtcaagcaccatgattaatttgttttacatttgattctctccttccagctgaatccttcaaggaatttgctgaattgctcaacgaggtagaaaatgagaggatgatgatggtaagtcactaacgctgtcactgaagctgagttcatgggtgatataggggatttttcctttcctttatgcttggattgatcctatactattttgatttctgtcagatagcttcttggtgctataaaaatagttaggtaatagatctggttattatgtctcaagcttccaccctgagagtttggcattagatagagggaaattaacgtgcaaatcccatctgtgttcatttcagtgaaaaataatttcagtggatattaaactgggcctttgaacatgttgacagaaattgaggtctttagtgtttttagccaaattatccatttgttaatctttaatttgtggagtagttttacttttatagagaaaatcagtagaaaataaagatagaactcatataccacctttctctctcccattcagttttccctattattaaacatcatgtgaatgtgatacatttgttataattgatgagccaatattgaaacaatattattaactaaagttcatagtttacattagaatttactcttggtattatacattttatagatttgacaaatatataatgacatgtatccaccattacagtgtcaccatacagaatagattcatggccgtgaacatttcttttgtccaatctattcatccttctcttccttctccagtcctgaaaccctgacaaccactgatctttctttttattgtgttttgccttttccagaatgtttatagtagatatcaaacagtatgtagccatttcagattggcgtatttgacttagcaatatgcattttattttcctgtcatttatttttatcattaagtaatatcccattgtatgatttaccacagtttgtccactcacctactgagggacatcttggttattttggcaattataaggaaaactattataaacagttgtatgtaggtttttgtgttgatacaaatttccaactgatttggttaaataataaggagtgtaattgctggagtgtaaattgtcagggtatgtttaattttgtaagaaattgccaaccaacttccaaaatagctgtgccatttcgcataaccagcaatgaatcagagatcctgttgctccatgtcctcgccagctccatgttcttaccagcatttgctgttgtcagtgttctggattttagccattctcacggatgtgtagtggtatctcattactgttgtaatttgcaactccctaatcacatatcatgcagagcatctttccatatgcttaactgccatcggtatatcctttctggtgaggtatttgttcagttcttttgcctattattaaattgattttcttttgttaagttttaagagttctttgtatattttagattccagacctttatccaataggcatttgcaaagattttctcctcgtctgtggcttgtctttttattttcttaatagtctcttttgcattgcataggtttttaattttaatgaagtccaacttacacatttttgctttaatggatcatacttttggtgttatatctaaaaagtcttttccaaatccaaggtcacccagattttctcctatgttatatttttggaattttttagctttttgttttacatttaggtcaatgattcattttgaattaatttttatgaaggatataaggtctgtgtctagattcactgttttgcatgtggatatccagttgctccaacactgttttttgaaaatactattctttctccttgaattaccttttgtcctttatcaaagatcacttgactatatttatatgggtctgtatctgggctctctatttctgttgcattgatctatttatctattctttcacaaataccacactatcttcattactttagcatggtagtaattgcactgtagtaaaaagcattgaagtcaggtataagcttaagaatcagtttgttcatatccacaaaataacttgctgggattttgactgggattgcttttaagatcctagagatatctttttgattttgattaggatttgcttttaagctaccagggaaaaactgatatcttaaaaatattgacttttcctaattataaacgtgggttatctctccatttatttatatcttttttgatttttttcatcagagttttgtagtttccttatatagatattttatgtattttgctagatttctacttaagtgtttcatttttatgaagtctaattattttaacagcctaaaaataatctttttgtgtggtccttagaccggcagtaccatcatgaccagcaccagcagaaaattattggaaatactggtccttgtacccatcccagacttattggggacttaaatgttgaaatgtatgcgttgatcaatattcatttttattaggggcatgatggtaagatgggaattctgttttacttttctccatcagatgactttttgtgggcttctcagttttgttaaagctatttattccaacagccagaactaatttacctataaaatccctttcttttcaacagtgtggtactgacttctcaaaatactgctcatagaatctagactcctagagaagtaggaatgaaggcaggacttggaggtaggggaattagagaattaaggctctaattctggatctgtcactaacttgttgacttcagattaattacttcatttttctgggctcctttttcttatttgtagagtgaggaaaataatccccatctcttatggttgtttaaagtgctccaaataacatagtaaacatggacgtgttttataaggggaaaatactgattatgtaagcatggtttttagttatctttagttactcacargattctgcttgtggaaatatgatttgggaattttcttagtttaaaatatttgcttttaaatgtactaagaagagaccaatatgtgtggtttccctggaccctcttagatggcccccttgctaatacacagtctactaaatgttcttctctgcccacagggtttgtggactgctgcctatgttgttttcaaaggcatttgcccccatttcattcagatagcactagaaagctcagctgtacttctctttagccctagttgtttctccatctcttttatttacccaataacaaagccctcacatattgaagtagtattcatcttttgagatgttgtttttctcacccttcctgctgatactttgccacatgactgactcattttcttctgtctttaattatgttgtgcccttttgtcccaacaacttttcaatcgtatattgagtgtttgctccctatttcccacttaattccaggaatgctgagatggttaggcttaatgagtgcctttcaccccatgccaggaattcattgcttgattataacttttccatttcctggctttgtagcaaaaggacccctctaccccagtctggataatttagtgggtcttatattgcattttatcctttgtaaaagaagagtccaaagtaagctttagaataacagtaagaaagttcacagcactcaagcatggaaattgcctgtgtctggtcatctccataaatgaatataaattggggaaggaattatgatggggagaagtgaggaagggcatccctgtgatgttctcaaaagtatactgttggggctgggtgcggtggctcacgcttttaatcctagctctttgggaggctgaggcaggcagatcgcttgaggccaggagttcaagagcagcctggtcaacatggtgaaatcccgtctctactaaaaatacaaaaattagctgggcgttatcgtgcatctctagtcccagctactcgggaggctgaggtgggaggatcacctgaacctgaggaggtcaaggctgcagtgagccatgatcatgccmctgtactacagcctgggcgagtaaggccctgccaaaaaaaaaaaaaaaaaaaaaaaaaaaaaaaaaaaagagcgggggagggccttgaaaagtctgaattgcacacttcttatatgattatgaagcttgcctagattcctttctgactctgaaggggcctctgttggcaatgtgcaaggtctgtttttgaagacggccaaaagtgacctaaagaggcccccataatatttcagcctgtctttagtgctctttttttaaaaaaaaattttttttattttattttttgtgacggagtctccctctgttgcccaggctggagtgcagtggcgtgatttcggctcactgcagcctccgcctcctgggttcaagtgattctcctgcctcagcctcctgagtagctgggactacaggcacccaccaccatgcccagctaatttttgtatttttagtagagatggggttttgccatgttggccaggctagcctggaactcctggcctcagctgatccacccgccttggcctcccaaagtgctgggattacaggcgcaagccactgcgcctggcccagtgctctcttttgatatttcatttaccatcaaagattcctgagcagtcctgcaatactggactgaatatcatctctattctgctcaacaccttcagtgttactttggcctttattcaataggattctgatgatagaaactcactaatgagtttaggatgtcactcgttatggtgaagagtctacctgaggtagcaggtgggagtttttgtccccagtgagctcacacaatgaatgcagtgattagaaaagagattaaaggccaaatttacttcaaaggggagtcattgctagagttctaaggggtttaagaataaaatggagtgaaaaagaaaaaagaggaaatcctcaatgtgacttttttctacattcctaagtctctattctgaccagaaaatagtataataaccaatgagtgtcatagagaggaaaagattcagagtatctgtttgtgctgtaggagactgggagcagtgttgccaaagtgattaagggaaaatgatgtcctgcaattctagtaaagcatggactatttttcagactgaactggggtcaaacatgtaaaagtcagtggccttatggaccctgtgagagaagttgctgacacacttgcttatgcaggacaatcccctttggagcatgaaaagccagcaactctgccctcctgggggttcctgaatatgcaagggcccagctccatacagtgctttagaaagtagtatgtacacttcttattcaaaggaaaacttcctcaatgtttcacagttggccacttcttaggtattacatttatttatttatttatttgtttttgagactgagtcttactctgtcacccaggctggagagcagtggcacagtcttggctcactgcaacctccgcctcctgggttcaagtgattctcctgcctcagcctcccgagtagctgggattacaggcatgtgccacctcgcccggctagttttttgtatttgtagcagagacggggtttcaccattttgaccaggctggtctcgaacccctgaccttaggtgattcacctgcctcggcttcccaaagtgctaggattacaggtgtgagccactgcacctggcctgtattacatttttttaaactgcaaattgtctttctaattatctattgcttcataacaactttttctaatattagtggctgaaaccagggtccccaacccctagcctgcagggcaccagtctgtggcctgttaggagcctgaccacacagcaggaggtgagcagcaggatagggagcattactgcttgagctctgcctgctatcagatcagtggcagcattagattctcataggagcaaaccctgttgtgaactgggcatgcaggatctaggttgcatgctgtttatgacaatctaatgcctgatgatctgaggttgaatagtttcatcctgaaaccatctccacctccccctaccctgggtccattgaaaaattgtcttccatgattctgctccctggtgccaaaaaggttgcagattactggcttaaactaaaactaattatttgtaattattttttgggttaggcattcagacgggtcagctgggcgattcttctgctccaaatgatggcatttacctggcagatgagttgatatggagggtccaaaatggttttcctaatgtttggcaccttccagtggggatggcaggaagggcggattcagctggtatgagacattgactagaatttggcctcttctgtttggtaatctcagggtaattaaacttcttatgtactgtctcaaggctcctagtgggagtattccaagagaactgggagagaactggtgctggccttttatgacctagcttcaaatgtcacagagtgttacttctggagtactctatttgttcaaaatattaacaagcccactcacattcaaggtagaggggacatagacctcacctctcaatggaaggtatgtcagagtttgtggccatgttttaaagcttccacaatagtaaaggagaaaaatgactttctgtactggacctatgacaccaataacttaatttgtgggtatttttagtagaagaagtcttattttcaattaaggagagtcactggtgtaatttttttttgataccataattgttagtggagctttgatttcctaagcaaccaaaatgaatctttctatgaatcagacctgcatagagaagtctttactaggggctcttgcagggtggaatttatagactttcctgcctttggcaaatgagcacactcagagataaagagaatgttaagtgtcgtactgggaggtaggttatagtacgattaggactcaatggggtttcatagatccagtagaagagaagagatgtgatgagaatcagacagggtctggaaatgttagcaggcaagaggtctgattttgtaaaaatcagcaaactttgggaagggtttcatgattttttaagtctaggcttgtagcaaacaagttttagaaagccaactataaaagcactggtgatcaggagacatagagaatgactctgttctcaaggaaaacattttttttcttgcctagttttatatttttttttgctgggtgctggctgtcctggatgatagcattaggagctgcagtagatcagaatgtcagggttcaccaagatgttctcatacaaaggctggcagtgccattttaggagttttcccatttagttgaaccttgaatcatacctatacacagaacaagaggcccaaattacctgaaagacacgtataacctatgcactaatgccccacaactttccacacttttggggaggtaggttaaaaattgcttcttagattggagaactcagatcttgtcaaaactggctttttcctctgttgtctatttttgttatgaagatatatcttgtcttactgacacctatgtctcatatgacaaggaaacttgtcttttagttttctgtcttgtaattaataaaaattaatgcaatgattcccaaaatgcagccctttagatgccttctctagggtcttccattttagtgattctaactctcaccatggaggcacaaaccccacttgttgccttgaacatatacaatctcataagaggtttatatgaagaaaaagctttgtatacctttacctgcccaaagaacaaggggtcttctttgattttgatgttttcatatctccagaacatatttattattgccaatattaatagtccctgaacaggccattcctattagcttctgagcatttatatttaggtaatttgaaagcctagtctagtgttttctgcgatgctgtaatgcactccatattctgaaggaaatgttctggttttatggcacaggcaggactgtaaatgttttatcctaatgctatcactgcacactcatttgcctctgatgaaatgatttgcacttgctgcaattgtccttttcttgtatttgccattctctttctcttctctttttcacctgtccttcaggtctcctgtgtcctctgctggacatcacttcagatatttatcgattaaaaactcaggtcagactatcattaaagttacagagaaatgcccctcttattctttctcccatttcttctcaatgcatttgatttttcagaaacaatatagaaacaaacagtaacaaaacccaacaaatcagcaaaccatttaacattttgcaggttggtatataaatgaaaatgtagtaacaaggaatcttgtatctgaaccttgttaacctagaaattgttttgtttgtttttcctttttgtctaggtacacaatgctagtgatttgctgattaaacccttggaaaatttccggaaggaacaaataggcttcaccaaggtacattttctgtatatgcataagattttttaaaatagcaatcgaatagttgtatgggctactmttcttcactttacaaagatatgcaccaatctgctggtgctttgctcttggcctagtcagcctcctaaactgtgcaaaataaatgtttgttgtttatgtcaccctgtctatggcattctgttatagtagcctcagctaacatgacaaagggggtggggaggtgggtgattagtttctatgagaaaatgatcacgaaagagagtaagaaaatctagaattggcctctgactttgtggccaacaggctctgtatctgtgcataagtttcttcttcttttggtgtttttgttgttttgtctggaaaactagctagctatcatgtatcaactgcctgctatattgagcactaggctaggtgctttacgttcattctttaatcacaaggactttgtgtgcttctggcattttccccatttcacaaatgaggtaactgagccttggacaagataaataacatgaccaaagttatatagctggtgatatagtttggatctgtgtccccacctaaatttcatgttcagttgtaattcccagtgttggaggtggggcccagtgggaggtgattgcatcatgggggtggatccttcatgaatggttcagtactatcccctcgatgctgttctcctagtggtgagtgagttctcatcacatctggttgtttgaaagtatgtagcaactcccccacttcttgctcctgctctggccatgtaagatgtacctgctttcctttcaccttctgccatgattttgtttcctgagacttcaccaaaggagaagctgctgtacttcctgtacagcttgcagaactgtgagcccattaaatctcttttctttataaattacccagtctcaggtatttctttatagcagtgctagaacagactgatgtggttagtaagtgatagtggcctggatttagacctaaaggtctttttagctttacgttccatactctttacattaagctatgctgtctagatctttgctgtctattatggtaactactatctatttaaataaaattaaattaacaactcagctcctcattctttctagccacatttcaagtgctcagcagtcacttgtgtctagtagctactgtgttggacagtgcagataaaatacatttccatcattgtgcaaagttccgttggacaatactgagtgccagttaatttcattcttttcagcttgaccatcacatggatctctgtgattctccaatgtctgttgaagggatgttaataattttcatttttaatcttttcagctaggtgtaggtctgtttcatgagctctcaatgtgtatccaccatgtagcaaaggtagtttcttctaccagggctaaaatacagcatcttgtccaagcatctagttttcttaggactaagagcataccaaccagtagatattatttggaatatgatgacaatcagtttggatcaagaatttgaaaacagcaagtttttctttttttaaaagacactttcttgccaactcagcctcccaaagtgctggtattacaggcatgagccaccatgcctggccatgaaagtaccaaattttgagaagaaagagcaaattagtggttgagctcccactacctgctatcatcagattgacatgggcattgttagaaatgactggtgttcaagcaaagtgagttcccctcatagcccagcaatacttgtttcactggagtctcattaacatcaatacttagttgggagaggatatgattgaagaatagaagtatatttaaaattacaactgaggataaaaatacttaaccacttgtgaaacaatttgatttactttcattcccttataagaataacactaggaaagtaaggatatgctaccatggttgccctcatattatctgagcaaatggaaatgaatttgtattatgtgcagtcatgcgtcgcctaatgttgttctgagaaatgcatcattacatgttttcatggttgtgtgaacttcataggagtttgcttaacacaaacctcgatggtctagcctaatacacaactaggctatatggtatagcctattgctcctaggctacaaacttgtacgggtgttaactgtactgaataatataggcagttataacccaatggtaagtatttgtttatctaaacatataaagcatacatataaaaatmctgtattataatcttataggactgtcattgtatatgcggttcattgtttactaaaacattgttttgtggtgcatgactgcacttcctatggcccatgcctgcactgagggttttacatatgctttcttccttaattctcacagcaaacctgtgaggtaggatttttaatatccattgtctcaatgaagaaagtgagtctcagaaaggttaaatatgtatctatcttttttcatacttctttaccagtaaggccaacctgcatatctacaaagaagaccaacttagtatgagtcatgtctccaataaactatctagaattccaatagtcaaaatgaagcttataggctacccctgtgtgttatcaatttattgccaatcaattccaagcctctcaatacctgctctgtgataatggacagattttctttaagcatctttcctttatagtgagcacactcttaaactttctcagtagagggagctggagggacgttgcaggaggagggggatctcttgaagtttccagctgaggcgggggtggggcagggtggggaggacagctgatggaactctgacccagccacccacccagacacatggtgcctcaatctccttgaagccttcatgaccatgctgtccctcagcttccttctgtagaccccctaccccacatggcccacttgctggctgaagagttatcatgcagctattaccctctctgcagggccctcatacattgagcttgcaccctagggggttctcaccaaacaaggctggccccgttgagctcacctgcaactcagttttcccaccttctctttataccttctccgctggtcactgttggcctgcttttttgtaatctggtgagttgcctcctgcttacatagtaactatgaaccaccgggccaaatcagcaaacattctgctatccggagtgttaaattactccttttctttttttgtgagacagggtgggtctcactctgtcacccatactgaggtgcagtggcagaatcatggctcacttcagcctcaacctccctgggctcaggtgatcctctcacctcagcctctcaagttgctgggactacaggcacataccaccatgcctggctaattttttttttttttttgtaatttctgtagagatagggtttcgccatgttgcccagactggtctcgaatgcctgagctcaagcagccctcctggcttggcctcccaaagtgttagaattacaggcgtgagctaccacgccccaccaaattactgcttttcaagtgaggtctgaaccccattaaaatttctccttatttgagtacttttccttaaacttagagtaccatatagagttttcttatatgtcaattatttgtaaggttttctatctcctgattggacttagcctggtatacccagcactgctgctagctggctttgtgagttcactggttgtgataggtgctatattaggcccttactcatacatatccagttctcatttgaacctcagaacaatcttgcaaaagttattatcccccattaacaggtggggacactaagttcagtgaggtgtagcctctaaggtcactcagtagcttggatatgaattgagatctggttgtaagtctagggctcatttcactttgcaggaaacagcacttctctccgaaccttagttttctcatggctcatgacaacaagaacaatggacaaatattccaaatctgatcttctgttagtttgagattctttttttttaattattattataatttaagttctagggtacatgtgcacaacgtgcaggtttgttacatatgtatacatgtgccatgttggtgtgctgcacccattaactcgtcatttacattaggtatatctcctaatgctatccctcccccctccccccaccccacaacaggccccagtgtgtgatgttccccttcctgtgtccatgtgttctcattgttcaattcccacctatgagtgagaacatgtggtgtttggttttttgtccttgtgataatttgctgagaataatggtttccagcttcatccatgtccccacaaaggacatgaactcatccttttttatggctacatagtattccatggtgtatatgtgccacattttcttagtccagtctatcattgatggacatttgggttggttccaagtctttgctattgtgaatagtgccgcaataaacatatgtgtgcatgtgtctttatagcagcatgacttataatcctttgggtatatacccagtaatgggatggctgggtgaaatggtatttctagttctagatccctgaggaattgccacactgacttccacaagggttgaactagtttacagtcccaccaacagtgtaaaagtgttcctatttctccacatcctctccagcacctgttgtttcctgactttttaatgattgccattctaactggtgtgagatggtatctcattgtggttttgatttgcatttctctgatgaccagtgacgatgagcattttttcctgtgtctgttgactgcataaatgtcttcttttgagaagcatctgttcatattctttgcccactttttgatggggttgtttgtttttttcttgtaaatttgtttgagttcattgtagattctggatattagccctttgtcagatgagtagactgcaaaatttttctcccattctgtaggttgcctgttcgctctgatggtagtttcttttgctgtgcagcagctcttgagtttaattagatcccatttgtcaattttggcttttgttgccattgcttttggtgttttagacatgaagtccttgcccatgcctatgtcctgaatggtattgcctgagttttcttctagggtttttatggttttaggtctaacatgtaagtctttaatccatcttgaattaatttttgtataaggtgtaaggaagggatccagtttcagctttctacatatggctagccagttttcccagcaccatttattaaatagggaatcgtttccccatttcttgtttttgtcaggtttgtcaaagatcatatggttgtatatatgtggcattatttctgagggctctgttctgttccattggtctatatctctgttttggtaccaataccatgctgttttggttactgaagccttgtagtatagtttgaagtcaggtagcatgatgcctccagctttgttcttttggcttaggattgacttggcgatgtgggctcttttttggttccatatgaacttcaaagtagttttttccaattctgtgaagaaagtctttggtagcttgatggagatggcattgaatctataaattaccttgggcagtatggccattttcacgatattgattcttcctacccatgaggatggaatgttcttccatttatttgtattctctttgatttcattgagcagtggtttctagttctccttgaagaggtccttcatgtcccttgtaagttggattcctaggtattttattctctttgaagcaattgtgaatgggagttcactcatgatttggctctctgtctgttattggtgcataagaatgcttatgatttttgcacattgattttgtatcctgagactttgctgaagttgcctatcagctaaaggagattttgggctaagacagtgcggttttttaggtatacaatcgtgtcatctgcaaacagggacaatttgacttcctcttttcctaattgaataccctttatttccttctcctgcctgattgcccttgccagaacttccaaaactatgttgaataggagtggtgagagagggcatccctgtcttgtgccagttttcaaagggaatgcttccagtttttgcccattcagtatgatattgtctgtgggtttgtcatagatagctcttattattttgagatacgtcccatcaatgcctaatttattgagagtctttagcatgaagcgttgttgaattttgtcaaaggccttttctgcatctattgagataatcatatggtttttgtcattggttctgtttatatgctggattacgtttattgatttgcatatgttgaaccagccttgcatcccagggatgaagcccacttgatcatgatagataagctttttgatgtgctgctggattcggtttgccagtattttactgaggatttttgcatttacgttcatcagggatattggtctaaaattctctttttttgttgtgtctctgcctggctttggtatcagaatgatgctggcctcataaaatgagttagggaggattccttcttttttattgactggaatagtttcagaaggaatggtacgagctgctccttgtacctctgtattctgtacctctgtattctgtattctgtacctctgtattctgtacctctgtattctgtagaattcggctgtgaatgcatctgctcctggactttttttggttggtaagctattaattattgcctcaatttcagacctgttactggtctattcagagattcaactccttcctggtttagtcttgggagggtatatgtgtcgaggaatttatccatttcttctagattttctagtttatttgcatagaggtgtttatagtattctctgatggtagtttgtatttctgtgggatcggtggtgatatcccctttatcattttttgttgcatctatttgatacttctctcttttattctttattagtcttgctagcggtctatcagttttgttgatcttttcaaaaaaccagctcctggattcattgatttctttgaagcattttttgtgtctctgtttccttcagttctgctctgatcttcattaactatttgttgccttctgctggcttttgaatgtgtttgctcttgcttctctagttcttttaattgtgatgttaaggtatcaattttagatctttcctgctttctcttgtgggcatttagtgctatcagtttccctctacacactgctttgaatgtgtcccagagattctggtatgttgcgtctttgttctcattggtttcaaagaacatctttatttctgccttcatttcgttatgtacccagtagtcattcgggagcaggtcgttcagtttccatgtagttgagcggttttgagtgagtttcttaatcctgagttctagtttgattgcactgtggtctgagagatagtttgttataatttctgttcttttacatgtgctgaggagtgctttacttccaactatgtggtcaattttggagtaggtgtggtgtggtgctgagaagaatgtatattctgttgatttggggtggggagttctgtagatgtctattaggtctgcttgctgcagagctgagttcaattcctggatatccttgttaactttctgtctctttgatctgtctaatgttgacagtggagtgttaaagtctcccattattattgtgtgggagtctaagtctctttctcgatctctaaggacttgctttatgaatctgtgtgctcctgtattgggtgcatatatatttaggatagttagctcttcttgttaaattgatccctttaccattatgtaatggccttctttgtctcttttgatctttgttggtttaaagtctgttttatcagagactaggattgcaaaccctgcttttttttgctttccatgtgcttgggagatcttcttccatccctttattttgagcctatgtgtgtctctgcacgagagatgggtctcctgaatacagcacactgatgggtcttgactctttatccaatttgccagtctgtgtcttttaattgcagcatttagcccattcacattaaggttaatattgttacgtgtaaatttgatcctgtcattacgatgttagctagtgattttgctcgttagttgatgcagtttcttcctagcattgatagtctttacaatttggcatgtttttgcagtggctggtaccggttgttcctttccatgtttagtgcttccttcaggagctcttgtaggggaggcctggtggtgacaaaatctctcagcatttgcttgtctgtaaaggattttatttctcctttactcatgaagcttagtttggctggatatgaaattctgggttgagaattcttttccttaagaatgttgaatattggcccccactctcttttggcttctagagtttctgccgagcgatcagctgttagtctgagggacttccctttgtgggtaacccgacctttctttctggctgcccttaacattttttccttcatgtgaactttggtgaatctgacaattatgtgtcttggagttgctcttctcgaggagtatctttgtggcgttctctgtatttcctgaatgtgaatgttggcctgccttgctagattggggaagttctcctggataatatcctgcagagtgttttccaacttggttccattctccccgtcactttcaggtacaccaatcagacgtagatttggtcttttcacatagtcccatatttcttggaggctttgtttgtttctttttattcttttttctctaaacctctcttctcacttcatttcattcatttgatcttccgtcactgataccctttcttccacttgatcgaattggctacagaggcttgtgcattcatcatgtagttcttgtgccttgactttcagctccttcaggtcctttaaggagttctctgcattggttattctagttagccattcatctaattttttttcaaggtttttaacttctttgccatgggttcaaacttcctcctttagctcggagtagtttgatcatctgaagccttcttctctcaactcgtcaaagtcattcttcatccatctttgttctgatgctggtgaggagctgcattcctttggaggaggagaggtgctctgagttttagagtttccagtttttcttctctgttttttccccatctttgtggttttatctacctttggtctttgatgattttgacgtacagatggggttttggtgtggatgtcctttctgtttgttagttttccttgtaacagtcaggaccctcagcttcaggtctgttggagtttgttggaggtccactccagaccctgtttgcctggtttcggcagcagaggttgcagaacagcagatattgacaaacatcaaatgttgctgcctgatcattcctctggaagttttgtctcagaggagtacctggctgtgtgaggtgtcagtctgtccctactgggggatgcctcccagttaggctacttgggggtcagggacccacttgaggaggcagtctgtctgttctcagatctccagctgcgtgctgggaaaactgctagtctcttcaaagctgtcagacagggacatttaagtctgcagaagattctgctgccttttgtttggcaataccctgcccccagaggtggagtctacagaggcaggcaggcctycttgagctgcggtgggctccacccagtttgagcttcccggctgctttgtttacctactcaagcataggggcaatggcgggcgcccctcccccagcctcgctgctgccttgcagtttgatctcagactgctgtgctagcagtgagtgaggctctgtgggcgtaggaccctccaagccatgcatgggatataatctcctggtgtgtcgtttgctaagaccgttggaaaagcacagtattagggtgggagtgacccgattttccaggggctgtctgtcactcctttctttgactaggaaagggaattccctgaccccttgcacttcccgggtgaggcaatgcctcgccctgctttggctcatgcttggtgcactgcacccactgtcctgcacccactttctgacactccccagtgagatgaacccagtacctcagttggaaatgcagaaatcacccatcttctacgtcgcacacactgggagctgtagactggagctgttcctattgggccatcttggctttaccctgatttgcatttctctaatggccagtgatgatgagcattttttcatgtgtcttttggctgcataaatgtcttctcttgagaagtgtctgttcatatcctttgctcactttttgatggggttgtttgtttttttcttgtaaatttgtttgagttctttgtagattctagatattagccctttgtcagatgagtagattgcaaaaattttctcccattctgtagggtgcctgttcactctgatgataggtccttttgctgtgcagaagctctttagtttaattagatcccatttgtcaattttgtcttttgttgccattgcttttggtgttttagacatgaagtccttgcccatgcctatgtcctgaatggtattgcctaggttttcttctagggtttttatggttttaggtctaacatgtaagtctttaatccatcttgaattaatttttgtataagatgtaaggaagggatccagtttcagctgcctacatatgggtagccagttttcccagcacctagtttgagattctgagggtaattaactaaatatttgtccgctgagtactagaaatacagtacacagaactcgttgcactgtaagtggaaaatataccctaaaatatactctggattttgaagacagtttgaaaaaatagaaaatattaacatttaattttgattatatgtttaagtgataatatttgaccacttatttattttttctttttgaaatgtgactactaaacattttaaaattacgtgtggcttgcattatctttctattggataacactgacctagacaaagaaattacatttgataggtagctcctgcccatttggtagatagttcatgggctttatcaggctttagaatcaagaggaggaagtatttgatgaaaattcatatacagatagttatttaattaattaaattagttaacatatataaagttcttagtacagtacctggcaaataatatgcactaaataagtttctttcatcaattatatgtgctaaaaaattttctttcatcactgtaattcttgttagtactggtaatagaatagggaggatagaaagtgctccatgaaactgtccgattgacgatggacttactgtgaattaaaaatcaaaaaagaactgagaagttaatgaatgaggcaggaacagagggataggggtgttgaacattgagtgtttcccaagtggctactggcatatgaagaggtttcatattactaggtctcccagtatgtgtctctggctttgcaggatgtgggaggatatctctttgtcatagaagtggaggttcgtagggaggaaggatgaaagcaatgaaggaaggaacaaaataacacagagaatgctctgaactaatagtgaacacattccatataaactcatcctgttattcaagcaggattaacttcttcaagtggcattgatgcttcaagtggcactttaccttggatgtgttttctatagtggaatttgggggcaacatgtcttttataacagaactctattggttaaaaatatttgtaaaccacctccttatggttaaaccagatagatcttcctgttttcaattaaataggttatgtctttcaacttctgtatggagttggtatatttatgcaatgagatggacatttgttcctttcctttcctgtcctgtcctgtcctgtcctgtcctgtcctgtcctgtcctgtcctttcctttcttgtcctgtcctgtcctgtcctgtcctttccgttctgtcggactttcgctcttgttgcccaggctggagtgcaatgacgtgatctcagctcaccgcaacctccgcctcccgggttcaagcgcttcttttccctcagccttccaagtagcttgaattacaggcatgtgccaccacacctacctaattttatttgtatttttagtagagatggggtttctccatgttggtcaggctggtctcgaactcctgacctcaggtgatccacccaccttggcctcccaaagttctgggattataggggtgagccaccacgcccagctggacatttgttttttttctaactttaatgtgtgatctgcagtttcatcagactaaccctatttcacaatccttactttttgagaaaataattaatgctaacttttccattttaaaaattaaaattttataacagatatatgcatagacatatttttaaaaataaaatagtaatacagagtccacaaagaaaatcaaaagtcttctcatgtttatccactactcagaggtatccactgttaaccatttatgtttcattcttagttatttttatattttaaaatgcttatattgctatgttttattttagtttaaaaattatttctccatgctgagaatacaggagatcattgctcacacttcccccttactttccctcttcttccactctttgataattataagaccattttacttcttgtactgcttacttctgttattttaaataatatacttaaactcttatttcttatttcatcaacttttgactctagctttgtaagatgaagatattagcacttctgtcttgcttaacccttttagccctcaactcccatcaaccacaccttcatttttcattttaggggttataacattactattctagtctggaaccttaatgtaatcttattgatattattaatagacttatttgacagtggcaaaaagaagtggacaatccaggatttgaacccaagttctttggctgcgagtccatgaattttgacatatcttatattgggttaatgtaagagttaatttctggagccaacgatagatgaaggatgattcctttctttgcccctttttcctaatttcttctctactatgtttaaagttctttgagcagccacactctagatttctttttggttcactcctatccctcccacctctcaaaattcccaacacatgcaaagtttgtgcatccttccccatgtgtacactttatcacttgatttgcagaactgttctcaccactattcgccttcctataatcatgcaacttccccgcctccccccaccgacttctctgacccaagattaarggaggacaagcaagtcttagtccagctctgtttataatgggtctttcatcccgcagtgtagaatgctagactgtccagtagggatggcagaataaagactcagtcatcccctctagccttatgacagggagggtatttgtaccctttgattcatattttttgggtcttgtcagagttgcccacagtatgatgttttcagttctttttcaagggtgcccttgccagagaggaacagccactgaattgagcttttttgtggtttctggtgggaccagggccaaattgtctgactaagacatctgagtctgcatttaacccacttcatggagagtgggagctagtgtggaagctatgatatagtgtgttctcacccaagagatggcaggcaagagggcattgatgacaggacatgggattgtcagtcttaatgatgtttctcatccatgtacagttatcacagaaagaactttaagaaaaggacctgttctggaggtagatgagactgaaaacgtatcaaagatggcacaaacctgacagtgtagatgaagacaaaggtgttagtgttggtctgcattccaaaggccagtgcttgctctgggaaagaggggaaggaaacatcagcaaaccacccattgatagatccaaataatttgaatttccatgtttgggtttcaatggctaccagagtgcattagcagggaagatcaagtggccaaggtgctaaagaattaagctatgtgacagtaatccgtaagtgatttccaagtctgtagcaaacattttataagccttacaataataactaccatgtactaggtacttggtttatgtcctttcaattattattatttgtatcctacagatgtggaagtcaagacccataatggccaaataacttgtagaaggacacatagttattaacagaagctagtttaaaacagatttttgttactccagggactgtgctctttctactaccctgcactctgaaccctgctttgtggggctcgtatcagaagattaaaaaaaagattaataatgcctgtcaccagttcaatggatatatacattgtggcaaattgtcattattctatagcaatgagaacaaatgaactagagctgttgttcaccgtaacatagatgaatctgagaaatacaaggttgagttaaaaaaaaacagtcacgaaagattacctgctatatgagtccatttctataaagtgcaaaaacaggtaaaactaagtgatgatgttagaagccaggttagtggttacctccaagagtcggggtgttactgaaaaaaaaaaaagaatcacaaaggggctttcaagggttcaggtaatattttgttgttttgaccttgggtgctgatgacatgggtgtgttcagtttgtgaaaattttttgacatttgtatagtgtatttttcagagtatatgttataatttcaaaaaatggaaaagaacattagaaaaccttaatatctcctttgtagcaccttccaccagcaatccgtgtttcttcatacatggagacaatggctttatgggtttatcctcctgattatcctcatatatggaccttcttcctctatgatgactttccttcccttttatctcataggtgaatttccctaagcagtatatagtattgttttacataatatactggttaagacagtggactctggagccagactacctgggtttgcatcttggctcttcaacttagtagctggtgagtgtaggcaagtcacttaacttctttttgccttagtttcattatctataatatgggataaattatagtacttaccacatagagttgtggggataaaatgccttattatgtgtaaaatgctcagaatagtttggtacatatagtacataacatacaaatgtttgctactactgattttcatatttataaaaaaggaatgatctgcaggtgctcttttatatattgctttttttctcatgatttcttaaacaattatcttttttttgagacaaggctttgctttgttgcccagggtggagtacagtggcacaatcacagctcactatagccttaaactcccaggctcaagcaatcttcccattgcagccacccgagtagctgaaactataggcatgtaccaccaaacctcacaaatttttaatatttttgttgagatgaggtctccctgtattgcccagactggtctcgaactcctggtctcaagtgatcctccagccttggcctcccaaagtgtttggattgtgaggcattgtgccaggctcattctcttattgatggatgagtcatttgcttccattttttatgtgagtgcaaacaatactcctgtgacagtgatttacatgtctccttgtgcatatttcaactcttctcctgggtatatacttagaaatagaatttctatgttgtagaatctatgcatttttactagatgtgttgccaaattggtctacaaaatggttgtgtcaatttatatcatcactcatcactagcagtataaaagtgttttatttgctgcatatccaaggaaaatgagttagttcagaaagatgcaagagaatttgattcagcaagtgtgtattgtgtctctaatctgtatatagagaaggaagcagtcactggtggaagagaaatttgctgtacagacacagagcagctctacttaataccaaccacatatgtaaagtatctggcatagagtaaacccctttgctcaagcaatctgggaatgtacccacacagctgatgtggtaatgttattaccctcttacaaggtaatctatgtctgaaaaataatgtggcacatatacaccatggaatactatgcagccataaaaaatgatgagttcatgtcctttgtagggacacggatgaagctggaaaccatcattctcagcaaactatcgcaaggacaaaaaaccaaacactgcgtgttctgactcataggtgggaattgaacaatgagaacacacggacacaggaaggggaacatcacacacaggggcctgttgtggggtggggggttggaggaggggggaggggggaggggtagcattaggagatatacctaatgttaaatgacgagttaatgggtgcagcacaccaacatggcacatgtatacatatggaactaacctgcacgttgtacacatgtaccctaaaacttaaataaataaaaaaataaataaataaaagaataatggccacatttagcctgaagagtagagggtggaaagggaatattatcttgttgtcagtgacatagaatggaccatgacccaggatgaggtcatattttttccatctcccttgccatccttcactagagtagaagggaattgcatcaaagagcggagagacactagttttctcttcccgtctataaccaaagtgaaactgttatctgccccttctccctatcccggtgccctttctacttgaactatttgagagcatttttgtaattacaagggtgatctcgctgaaatgaggtttccttttgtgagcttgtaactcggttcctaatattagctggcttcaaagtcatgtctggagttgacaggagatacaggaaatcaagagcatgtatctccctaaattggattgtaatttggggattccctgtttttggaggaaatgtcaaatgttctatatctgagttttccactacaatagcttctagcaacgtgtagctactacatacttgaaaggttactagtgtaactgaaaaactgtattttaaattttagttgattttagttaatttaaggtaatgtagccacctgtggctattggtagctgtgtaggtctaataaatattttgttggtagaggaaggtaagggagctaatatttttttttcagtacctgctatgcattggggtctatactgccatctaatttttacagtaccctgtgaagattttatcccccattttacagaacaggaaaccagagctcagagaggatgacctacttgttcaaggtcacacaggctacaaaatggcagagccaggatttaaatacaggtctttctggtctctccaattccaaagtccattctctttatcctgaacagggtggtataattttgttcttgctacttggcttcagccatatgccagaaaagcttaaaattgaatgccttctaacagtaattccatattcttaactgttaatttgcattagcaaatgggtttctggaagctctaataaatgcataccttgcagatattgtgtgttcagttccagaccattgtaatgaagtgaatagtgcaataaaatgagtcacaaaaattttgctttccaagtgcataaaagagttacatttacaccgtactgtagtctattaaaggttcaatagcattatgtctttttttttgtctttttttttttttaattttttttgagatggagtctcgctctgtcacccaggctggagtgccatagtgcagtctcagctcactgcaacctccgcctcccgggttcaagcagttctcctgactcagcctcccgagtagctgggattacaggagtgtgccaccacacccagctaatttttgtaattttagtagagacggggtttcaccatgttggccaggctggtctcaaactgctgacctcaagtgatccacccacctcggcctcccaaagtgctgggattacagatgtgagccactgtgcctggccctcaatagcattatgtctaaaaacaaaatgtatatgtaaaattaaaaaacaaactttattgctaaaaaaatgatgctgacacagagacatgaagtcagcacatgctgttggaaaaatgatgctggtacacttgatccatgccaggttgacacaaaccttcaatttgtaaaaaattcagtaactgtgaagcataataaagcaaagcataataaaaatgaggtgtgcctgtatattaagattccagggactttggtaatgatataggagttaagaagaaatcacttaggcagatagtaagggtataggagtccttggtaagacttttctttttaatgaaaagcagcctcaaatcattttctaacaatgcgcagcctgtaaagtcgagctgcagacatagacaagcaagctgagagcttgcatgagtgaatgctggcaggaactagagactagatatgttcaagatggctcctccatcatcctttctctgccagccatgtgtacagtaagaagcagacaagatagtgcccgccaaggagaattcatttgtggaataagattagggcggtgagaccagccttccccttgctcctgatcaaaccaatctgtgagccctacctaaatcagacactacctcctcaagctggaccataaaatctggtgcattcgcagtgagcaggtcctttccttttggagacccccctctctctgtagagagagctgtttctctttctcctctcttctgcctgttaaacctctgctcctaagctcctcgtatgtgtccgtttcctaaattttcctggcaagagatgacaaaccccagacaacacagccacttcagtaatgactttctgtcctaggatatttgggaggaataataaatgcctaggaacaaagtgattgaatgagtcagttaggctttttgtatatttttagtcaaaaatcattataccatgtcttagggttcttcaaagagacagaacaaggggtgtgtgtgtgtgtgtgtgtgtgtttgtgtgtgtgtgtgtatgtagagcggggtttagtttaaggaattctcttatatgattgtacgggctggcaagttcaaaatctgtagggcaggctggcaagatggagactcagggaagagttgatgttgcatctcaaatccaaaggcattccctcttcctcttcctcagtcgtcttcctcagtctttttactcctgaggcctttgactgattagatgaggcccacatatccgcaagactactggtttaaatgttaatctcatctaaaaactatttctaagtaaatatctagactagtgtttgagcaaatgtttaggtaccgtggcatggccacaatgacacataaagttaatcatcaaacactatgagaacttttgttgttgatttaattactttccttttccgtattcacataacttttatttcagtatattgttataatttttgttgtgctattttagtagttattgttgctcatctcttactgtcgctaatttataaatttaactgtatcatatatatgtatgggtaagtgacttaagaactcttgaggcaggcagttagaagtttcagtcagtgtcctccaggtcttttctccgtggttctcttagacttcacctcagggtcataagatggctgtcacagctcaacatattacatactcacatgttagcatcccaagcagaaaggaagtgggggagctcttttttttttttttttttttcttgaggcagattctcgatctgcctcccagtctggagtggtgcagtcttggcttactgcaacctctgccttccaggctcaagcaattctcatgcctcagccccgcccaggtagttgagattgcaggcacatgccaccacgcctggctaatttttggattttttggcagagacggggtttcaccatgttgcccaggctggttgtgaactcctgacctcaggtgtttgggaagccgaggcttcccaaattgctgggattacaggtatgagccaccatgcccagccataaagggctcttttcacatggcatagtttgtcttttatccaagagaaaaatgtcttaccaaagttgccacctgactttccctaataactcattggcaatagcggagttgtgggcccactcctaggacaatatttaggaaaaagacataggagtactaaaattcccctttggcctgggaggggggctcacttttttttggagaacgttgcttgcctgcctgatatctgaagaaataggaagaaagaggatggctattgaattggcaatgaacagtgactgtcataatggccttttgagaatagagatgctggactctaaccaggagcctctggaatatattcaaagggcaggaaagagaaaaatactggttatctatctatagtactttaatataataatcacagaggcactttcaccatatcttgttttccaaagagagattgcctcaaagacccagagagggaatgtgacacctcctaggtcctacgggaagctagtggcagagcaaggaataatactcatattcttttgctaccttcatgctgcttgtaccacttttgttcctccagcaggtcttaagcactgttccacagtgagcaggtctatgcacacctacccctgaagtctaagaaagctgagaggcttaagaaagaagctgacatatccagtttctgagagagaaacatgtaatagatgtttacaaatagaagccatagtcttgggcagcagtgagacaagatggtggatccctgtgccgttaccccctagacgcagggcgtacataccacagggacggaatgtgtaggacaattgaagttgacctgcccggcaaaggcaagaatgctgtgtgaatctttctaagggcaggatctatggtcaaagttattctgatctacgggcaagactgataacagtagataaagtagaaatcttagaggcatttccagaacagaggttaatcagaagtcaatatagtagatttgcatccaagatggagttgctttagcttctacaggcactttaagaacatatttggcagtgatttctgcctatatgatgtaagcatattgtggtttaaaaattttaaaaaatttaactgaaattgacttattactatccatttatattgtagcttacatttagcagcagaagagaccttcaaagttattagtcccacctcactttacagttgggggaactgaggcttagaaggttaagtgactgacccaggagcatagatggttagcaggggagatgggatcagaacccaggtcgcctgattcctagtcagatgtaatcaccagttcttcagagatattccataaatataatattttgggcagagctgtatgagttttatttttgttcaaattatgctgagataaccttgtagacccaatgtcttggccctcatttaacccattcctgctttagccatttctcttcagaaagaatcagatgcacctttttgcatcacagtttccttatctgaaaaaaaatgaggataatgaactatatggtttattttacttataaagttctatgattaatacaagccaagactagagcctagctgagtctccagatttctgttttgaaaatcaaggggtgtatttttattttaataaactactaagccaatatttatccagacaacttagttaatataacttttttttttacttgcttgttttttaaccaaagtgggtgtttaaaaatttgtctttcaactggcactatgttgtcagtctcaccaggcacagcaatcttcgaggaggtccatcttccaaagccagacttcctctaaaaaaaaactccccaggaaactggcttctgctcacagtaggatatgcatgtccagaggattttttttcttatttacttatgtagcctctgtgtgtgtgagataaagctgcttctcacttccgttgacaattaggaagtggctggcattagtaggcaagtaaggggggaaaagccctgcaccccaaccagaattcaatagttaaaaggaaattgttatattgttttcaaagcatttactttcctctccttgattgtatcaaggaagatgccaattcatcatcatcattgctattcttatgaaacactcaatatgtattaaatatttatcatgcaatctcttttgagcctttcgacaactctatgatgcagtccctactgtaacatttattttgtgaggaaactgaggcaggaaaataagaactttaaacaagctggtgtttgagttcatgggtaaaccctctcattggaaaatgggaaattgttggtagatgatgttgcctgatgatatgtatggcgatttaatttgggctcagatttttagttctttaagacagtattattgccaggaaatacttttctgagaaccccagaaaaccttgcatattggttagatatcataagaataacataacaaagcatcccaaaattcagtggcataaagcaataagcatttatttctggctcacacatctatgggttggctgaggtagctttgttttttttcaattaggttcgatggggcttggctcaggccacaagttccatttaggtctgctgtatgtgtctcaatttttcagggatcagagggtcacctgaggcagattattctcaggatggtggcagaagtgcatggtgggtaagcagagacacgtgaggtctttcaaagctaggctcaaagccagcctaccattgcttccttacaaattcagttggccaaaacaaatcatatggccaagcccaacatcagtaaggaggtgaaatacattcttcctttagcagaactgcaaggtcacatggcagagtacatggatacagagaggtggggggaaatttgggaacaataattcaatctgccatgccttggctgaaaagtagtggcagtaggaagtcagaagatgagagctagaaaagatactctgatggagagtgagaggtgtagtgggaagatccttatggttaggagatctggttttgagtcctaactgtgacacttttttagtatgaccttgaacaagtcattttccttgatatttgagcattaagggtccatgtgatgtcttcatcttatattttcacttacctagataaggatgtagagtaaatgaatgcaatgattagtctatgttcaaacagctaggttgaatcagtaaagactggaactttgagttctttttccattcctcaatcttcattgctttagaagaatagttaatatttgaggaggggccaggtgcggtggctctcgcctgtaatcgcagcactttgggaggccaaggcaggtggatcacgaggtcaggagatcgagaccatcttggccaacatggtgaaatcccgtctctactaaaaatacaaaaattaactgggtgtggtggtgcgtgcctgtaatcccagctactcgggaggctaggtaggagaatcgcttgaacctgggaggtggagattgcagtgagccgagattgcgccattgtactccagcctggcaacagagtgagactccgtttccaaaaaaaaaaaaaaaaaaaaaaaacatttgaggaggggtgttgggagaggtttcagctctcctccttttctcatgaaattaaagctgttttactacaattcttctttccacattaccatgcttatctgttttccatttcttcaaagccctgaacaaggagaagtaggccaaaatcataataggaagaactgaagttcaggcagagtaagtgctttttgcatgtaactgtacttaaatgttatatattgttagggaaactggtaacattgctgtccccaaagatcttttagagaggcatctgttgctatgtgatgtgttaagtggagttattcctgaaagaagcacagtgggctagatatgactcatggcctcttctgtctttatgctattataacatatttatatgtgtttatttgtcagacattcatatcatgctcatatagtgccagatattcttctaagaagtctacaggtactaattcatttaatcctcaaaactatgagacagggagtcttacttatttctgttttacagattaaaataaacgcaaataccaaacacgaacaaggaacaacagcaacaaaaacctaaggcacagggaggtgacataactttggcacagtcaagcactagaaaggagcagagctggtacttgaacccaggttatgtgattccagagtccacgcctttagccacgtggcacataggcatcagaactgagcaggccaactctgctacttactagttctgtgacatggagtgaagtacttcactcctctgagccttgttttcaactctaaaatgtgaacaataattatatcagcctcacagggttattgtgaggattcaatgagatagtgcataaaaccatgcttggcattgaaacattagttctatttccgtgaaatacttctatacattttaaagatgactttataagtcttccttttaacttatagtttatgaactcttacaaggtttataatccttggcttgattgatttatctgtatgactgattccttagcagtctgtaagacaatttggccttgccatttctgtctaacataggaaaagagcaatgaggcaatttcccttggggcggagattaagagccagtgaccccatgtatcttggctgtctgagaagttgctgaactgtgccatctcctttttccacatttatccttaccttaaaaatagtcatgaatctgaattttgtatatagtgttgaaggtgaatctgacattatagtttttagagttctcattcattatgctcgttattttttctcttgacaccccagcaagaatttaggaaacctttgctggagtgcccttgtgaagaaaggccttagtttgttacatgccaaagtaccatgtcctgctgacaagaagcgttctcctcctatacaaagagtgatacagtattcactcagagctcacagccctgcctgttccgcatgctgggatcctcggggactggtgcaagtgggtggaggaggttatataagctcacatctccttccaagtgggaagaggcgagggacaacagctgtcagctccacagctggtcttgccagcccaagtgattccaactttatttgatcagagaagaaggcttctcagtacacagaggggagatttgctgatccagagccaatgttttaaaactttggcaatttgtgctaacttcctctggctaggacagatgcttattggctctggctgcctggacatggtgttctcgaggcattttgtgtcatcctgaattgggcccagccagctgctcatctataggagattctcaaggaatggtgcaaagctcattacccttagacttttggttgggcagttgctcttgcatcagtatccatttcattacattaaactaaaagaataaaataagttctcaaaaggcagatataaaacacagcaatctccataggccatttttttatttttaattttttggggtacatagtaggtatatacatttatggagtacatgagatgttttgatacaggcatgcaatgcataataatcacatcagggtaaatggggtattcatcacctcaagcatttatcctttgtgttacaaacagtccaattatactctttattttaaaatgtataattaagttattattgactatattcactctgtattgctatccgatagtaggtcttattcattcgttctaattttttatactcatttaccatccccacctccccatcatccctccactacctttcccagcctctggtaagcatctttctataccctatgtccatgagttcaattgttttgatttttagatcccacaaataagtgagaacatgtgatgtttgtctttctgtgcctagcttatttcacttaatataatgatctccagttctatccatgttgttgcaagtgactagatctcattcttttttatggctgaataattactccactgtgtacacatactacattttctttatccattcatctgttgatggacatttaggttgcttccaaatcttagctattgtaaacagtgctgcaacaaacattggagtacagatatctctttgatacactgatttcctttctttggggtatgtacccagcagtgggattgctggatcttatagtagttcaatttttagttttgtaaggaacctccaaactgttctccatagtggttgtactaatttacatgcccaccaacagtgtacctcagttcccttttctccacatcctccctagcatttgttattgcctgtcttttggatataagccattttaactgggtgagatgatatctcattatagttttgatttgcattgctttgatcaatgatgttgagcatcttttcatatgcccgtttgccatttgtatgtctttttttttttgagaaatgtctattcaaatcttttgcccatttttggtccagttttcttttctgcttcaataggaaagcactgagttcaatgcatcacaattgctgtgttctccctcctccagcagccagagatgttctctgaaacatgctgctgctgccaggagttggcagggtgktggtgtctgcaattctggactgttttatctatctcctcagtgtcctttcggcgatatgaagttacaaccaggtactttgtactatgagtgcttacatgatttttggttctgatgaaggtatttttttctgtgtagatagttgttaacttggtgtcactgcagtggagggggacaatcggtggagccttctatttcgacatcttgctctgcatctttccacaataattggcaatttattcttttaaaattttgagatgagtggagtgcagtagcgtgatctcagctcattgcaacctcccacctcagccttcagagtagctggaaatacaggcacaccccaccatgcccagctaatttttgtgtgtttttttttttttttgtagagactgggttttgccatgttacccaggctggtctcaaactcctgggctcaagcaatcctcccgccttggcctcccaaagtgctgatattacaggcatgagccactgcgctccacctggcaatttattcttgatttactgtaactctgggaaggacatggctagcacataacttaatgtcaacatttctttttacaactgaaaggaatattgggcttttgggatgcatctcttgtccttggtggactataagggtgttgaaagccagttgtaatggcctgtcctctgtagattcccctcagaactaagtctatgcctgttacaagcttagttactatatttatagctagcacagataagaaatctatgtgatggaatattaaatttatgcctgacaagcaaaactatagtaaagagaaaatttgcctacggccttaaatactttggagacagacaaatttacaaggacagtatgtgaggtcggggttataatatgatcgtgtacacagagagagtacaggaaggactgcaaacaaagataggatatggggatattgaggaagacttagagaagacaccactgagaagatgatacatcttcttgtatggaatcttgaaggacgatttgaaattagccagtgaagtggagtgtgaggtacaaggatgctaagtggagggctcagcttgtacaaagaaagttttcaaagtacgcgttgccatctcatgagggatcatgtatatcctctcaaggtgagtatacttagtcctgtagttgatatggaacgctttgcagcaggggaatgtagtaaattttagatagtttaacccacctcttactggttttttgcattgggtaagatatttaatcttcctgaggtttagtttcttcatttgtaaaacagtactactaaagtttattatacagcaactttgatcattaaatgggggtcaaatatctagactatgcatagtatattagagctactcagaaaataacagattctcttctctttatactcatgtttgatttcctgtattacattatattttaatttagcaagtgtatcttgagcacccattttcgcctatttcaatgctaggccctagggatggagttgaataagataccgtccttgactttatggagctacaagttatgtaaactaactattctaaccacaagaccatggtttcttgtctcctctgtgccactgggcaaccatcgacccactcattttctagccttctgcaaaactcctctttatcctcacctatctttgcctttttatctctcatcccagaaaacatcctggcccttctcctgcccatagatgatctcttcatttgggttttttatcccactccttgtattttcttattttttctccctccatatagcaacacacttaaatccctcttgcattaaaaacagagccccattcttactgtcaaggcctggaaggactacagcataacagttttggctaaatgatgatagtcaacacattgtagcaataggaactcaagagttgacattattttaaaacggaggtatggtacctcaggatggttttttagcagggagcaaggtgcttagttcagtggtggtaggaaggggataatggcaagtgtcaaagttgtccataaccggccaggcacagtggctcacgcctgtaattcccgtactttgagaggccgaggtgggtggatcacctgagggcaggagtttgagaccagcctggccaacatggtgaaaccccgtctctactaaaaagacaaaaattagccaggcctggtggcattgcacctgtaattccagctactcgggaggctgaggcaggagaataacttgaacctgggaggcagaggttgtggtgagcggagattgcaccattgcactccagcctgggtgacaagagtgaaactccaactcaaaaattcataaataaataaataataaataaagattttccataaccaaatatgatccagttatagagggcatgactatcaatggagggtgtgattcacacaaaattcatctggcactcaagtggtatgcaaggtagagactgggaattctgaaccagatagaagtcctgatgtttcaaatgggacacaaagtcagagtcaggctggtagccacattgacatgacagtaaatctagtgtatggggctggagttcttaatctaccctgtctcattgtagacttggtctcagcaactagagccaaggtagacctatatgagcaaattaagtagactccactcttgaaagaagaaacgagtctgctaaatgccttactatttaaataaggaaatctttgagaaagtatgttttatatagaggaaatcatatgaacaaaaagcacagtatgaaaaagtgtggcatatttggggaacatatagtaatctggtgtgattagaatatacatgtttcatacaaggagtgcaagaggtgaaactggagagtagattggcgtgagactgcagggccttgaatacgaggctaaagagtttatacttggtactgagttaagtctactagtactgtcttatacctggtgtctgtgggatctcatttaggggtgtgctgtgtccttaaagcatttccttagtgcctttccttataaaatatatggtggtttcttcacaaggttatctacttctacattgggaatattgagagtcagaaggttaagatttttgtttaaggtaatgtaagtagtaaatggaaaatgcagaatttgaacgtggtttagtgccctttcctagtatataacctagtatattgtcgaggttagaagtaagggctttagagtcaattatgggtttgaatctccatttcttttacttctattagcttgtgcaactttggaacagttcgttttctgaggctcaggctcattcctcttctgtaaaattgggataagaatagtaacattcacaggcttgtatgaggattcaaagaggtaatgcatatcaagtgcttaacataacaacttacaaataatactcaataagtggtaactatttctagtattacattaaagttatattggaaaaatgtgtttttacttgaaaaagttaactcagaatatgtagaataaaaggagttgatccagtattctgatgttatagtcatatttggataggaattcatgcttgttctgcactgaggttgcaaatttgcttcatgtgttcattcactgattcactaaacagatgttaatttggccacactctgtacctgacaccattccttgtacaatgaacaggacagatgaagtctctgcttatgtagaccttacattttagtggtgtgccagagggtgggaggcagatgttaaacaaataattagataaataatttcagattgcaacaaatgcaataaatgctttgaagacaataaaatcggtgattcgatgttacttgtgggggtggagttggtctagggcaactttagaaggagtcataatggacagcctctgaaaatgtgacacttcaggtgtgacctgaacattgaaaagaagccagtcatgagaaaaattggagaaagagtgttctagtcatggcaagcgcacaaaggtcctgaggtaggaacaagcttagtggtttgtctaaggaactaaaagaaggccattgtgtctgaagtgaacactgatgagagagtgttctggcccaggccagatcataggggattttgtaggtcatagtaacaactatggattttatcccaagcacagtgtggagtcctggaagtttttaactgtggggaatgatatgatcaatttatatgtttttgataataataatagcttttgtttattggacagatacagtgataagcacattacatgcatatatttcatcagtcttcacataacccagtaaaatatgatgttatttttgtgattattttagagattaagaaatctgaagcttagtaaggttaattttttaaaggtcacaaaattattgttatttatagaaccaagatttgagtttgagtttatctgatcctaagcctacatggcttttattaagctaaaatatatataacaggccaggcatggtggcccacacctgtaatcccagcactttgggaggccaagacgggcggattactcgaggtcaggagtttgagacctgcctggccaacatggtgaaaccctgtctctaccaaaaatacaaaaattagctgggcgtgatggtgggtgcctgtaatcccagctactcaggaggctgaggcaagagaattgcttgaacctgggaggtggaggttgcagtgagctgagatcgtgccactgcactccagcctgggtgacagaacgagactccaggtcaaaataaatacataaataaaatacatataacaacattggctattttaatcattttaagtgtgtaattcagaaatattgattgtattaaaaatgatatgcaaccatcaccatcaaatatttccaaaacccttttatcaccccaagcagaaactctgtacccggtaaggaatgactccccattttccccagccctggtaaagtctaatttactttctgtcttctctatgaattttcttattctagccaagcttgctggctcatgactgtaatcctagcactttgggaggccgagatgggcagatcatgtgaggtcaggagtttgagacctcagccaacatggtaaaaccccgtctgcactaaaaatacaaaaattagccaggtgtggtggcacatgcctgtagtcctagctacgtgggaggctgaggcaggaaaatcacttgaacccaggaggcaaaggttgcagtgagccaagatcgcaccactgcactccaggctgggcaacacagtaagactccatcttaaaaaaaaaaagaattttcttattctagatatgtcatataaatgaattcatactatatttctctttttgtgtctgacctatttgaattagcataatgttttccaggttcattcatgttgtagcatgtatcagaagttccttcatttttatgggttaataatattccatctagtgtatataccacatattttttgtccatttatcaattgatagacatttgggttttttccaccttttggccattgtaaatactacagggaacattggtcaccaagtatctgcttgagtccctgttatctattattttgggtatatactttggagggaaattgcctggttatatggtaattctgtgtttaaatttttgagaacatgacaaaatatttacctgggtgcctgtaccattttactttcccatcagcagttcacaagagttccaatttcttcacatcctcaagaacacttattttccacatatataattttcatttctaatttttttatagacaggatctcagcctgtcacccaggctggagtgcagtggcatgataatagctcactgcagccttgcattcctgggctcaagagatcctcccgcctcagcttcctgactagctaggaatacaggcatgtgctactgcatccagcttttttttttttttttttttttgtagagatgggggtctcaccatgctggtctcaaactcctggcttcaagcgatccttctgctttagcctcccaaagctctgggattacaggctattttctgtattttttattttagatatcctaataactgtgaagtcatatttcattgtgattttgatttgcatttccaataactaatgatgttgagtatcttttcatgtattcgttggctatttctatatcttgtgatatggccatatgtctattcaagttttgctcatttattttcttattgttgagttttttctttttttgagatggagttttgctcttgttgcccagactggagtgcaatgacgcgatctcggctcactgcaacctccgcctcccaagttcaggtgattctcctgcctcagcctcccaggtagctgggattacaggcattcaccaccacacccagctaattttttgtatttttaatagagacagggtttcaccatgttggccgggctagtcttggactcctgacctcaggtgatctgactgcctcagcctcccaaagtcctgggattacaggtgtgagccaccgtgcccagcctcttattgttgagttttaagagttcattttatgttttgcatactagacctttgtcaaatatatatgcataattgtgtataattttatataaatgtgatcatatagcgttctgttttgtaactttttttaatactcactaatatcatggatacccctgtaggtcaataaatgttctcttacaatttgtaatgactcataatgttccattacataaatgaattataatttagtttgtttttatttctttgttccactttgctattattaataatggtatagcaaacattttcgtgaaacatgaactgaagcagatagaacagcaatttcattggaactttttaacatttgcctttctgaaactgataataattgcccaggaaaaataagtgacaatatcaaaatcttaacaatacaataagtttgagctattttatttacatagaatacacagaactttgtatccaagaaacagggatacatgttcttttgggtacacagacaacattaagaaatataaactatgcatcaggctataaaggaagcctcaaaaattcaaaagattctatatcacatagagtatgttttctaaccataagaaaataaaattaaaaattaatgataaaacattccatatttgggaactaacaaaatggcaaatattctttgggttaaaaaaataaatatattttatgatgaaatgacaatgaagtcagtatatatccacatttgtgggacacagttcattatgtagaaaggaagttcattgctttagatatattgatcaacaaataagaaagattaaaaacaaatgtattgagcatttaaattaaaaaaattgataacaacaacaaaacctacccgaagtgacaaaacagctggacatataagacttaagggcagaagtgaaataaattaaaaaacaactataacaataaaaaatggtagaggtaattaacaaagccaaaaattagttattgaaaggattaacaaggtagactggtaggaaaatgcaaacaaacacagtagagaatatagagtaaaataaatgaaatattacagacacaacagatttgttaaaaagacgaaagaattataacacatttgaaaaaaaagagatgaggttaattcctagaaaaatgtaaatggccaaaagttggcaaaaggaaagagggagactgagtagacggatatatattaaagatattgaaatggaattcatacttcccctccccttcactccctcagaaaaagtggtccccaaaaattttaaccttagaaatgagtcggttcaaatcctttcattactagtgtaaaggagaaaaacatgtgcttattgtaatcaaattagaattgcaggaaaattaagtaaataatatttatatgataacctatagcaaacattatactaaatggagaaactttaaatatgttcatcttacgatggagaacaagagaaagatacccatttgtctactattgtttaacccagtactggagagccccactaatactgttagaatgaaaattggccgggcgcagtggctcatgccgataatcccaacactttgggaggccgaggcgagcagatcacctgaggtcaggagtttgagatctgcctggccaacatggcaaaaacccatctccactaaaaatacaaaaaattagccagacatggtggctggtgcctgtagttccagctacttgggaggctgaggcaggagaattgcttgaacccgggaggcagaggttgcagtgagccgagattgcgccactgcactccagcctgggagtgagactccttctaaagaaaaaaaaaaaaaatagaaaaggaaagaaaattaaataagtgcacaaagatgggaaggaaagatttaaaattggttactatttgaaaaacattacaaaacagcatggtgttatttgcagatgatataattatataactgggaaaatcagcagcatcagtaaactttataaggactaataagaaattcaccagattggcaatgacacgagtaatttgccaaagttaatattatttttaatacgtgcaataagtaaccagtaaatgtgataagtaatattgatacgggaggggggcaggcaagtgctaggaagagaaaggcccggtccctggctagggctccacccctgggcctgtgcccacggacctaggtgaggacaggcatttctgttttcatgccaaaatgttgcattttccaagaccaccctggcccgccatgcccccatcctttgcctataaaaaccccaagaccctagagggcagagacacaagtggttggacatcgagaggaacacacaggcggaagaacacagccgcagacaccagcagataccaggaggacaccggcagacaccaggaggacaccggcagacaccaggaggacaccggcagacaccagcagatgccagcaggacaccggcagaaccagcagttgccagcaggtcatctatggmgggaagacgctgagttcagccgagggcggtcagaggagaggcaggagagctcggcggctgagcggcctgactcctggggaaaaccaacttcccactccatcctccttctggctccccatccatctgctgagagctatttccatcattcagtaaaaccttgcactcattctccaatcccatgtatgatctgatttttccggtacaccacggcaagaacccgggatacagaaagccctctctccttgtgataaggcagagggtctaatttagctgattaacacgagctgcctatagacaacaaaactaaaagagcacactgtaacgcacgcccactggggcttaaggagctgtaagcatttgcccctagatgctgccttggggttaaagcccacatgccccacaacctgcccatctgcatgcgccccctagaggtttgagcagaggggcaccgaagaagcgagccacagcccagtctcatgccctgtgaaggggataagggaacttttcccgtttcaatatcattcacattagcaataacaactaaaatatgcagaaattattttcaaaagaaatacacaagatctctattgggaaaaacattaaaatctagtaaaggacatggaagaaaatataaataaattctagacctttcctcttttcaaatggatttcgttaatattatacagatgttaattctcctctaattaatctataaattaaagtttagttgggtttttagcttaatatgcacaaatagctaagttaaccttaaaaaaaaaaagacaaaagaagggagattttctctaccaggcagcacacatattacaaagtcagtggagtgaaaacagtcggatattggtcctcaaacagaaggctagtcaaacagaatagatagctgaagttcaaactcacatattaatttaatataaaataaaaatcgcactccaaattaatggggagtggaaaaattcataggtgattataggaataatgaatctctatatagagaaatataaagctggattcctacgtaacatcacaaacaatgctgaattccaggcggatgaagggcctagaagtgaaaggcaaaactcaaaggttgtttctgtcctgtgtatatacccttttctgataaatatatggaacaaactaggaattcaagggaacttcttcaacctgattgatggcagctgtaaccaaaactagaagttaacatcacacataagggaaagactaaaatcttttcctctatggtaaagaacaaaataaggatgtctacgttcttcactttgattcaacattgcactggaggttctagttagcataattagccaaaattggaaagaagtaaatctatctctatttgcagatgacttcatgttgtatatagaaaatcctaaggaacacacacacacaaacacatacacacacacacagaactaatgaaggagttcaacaacattgtgtaggatacaagatcagtatataaaaataaattttatttctatctactttggaataaaattgtatgtctattgacattaataatgtgaacattaagaaaacaatctgatttaatcaaaatgattaaaatacttaggtataaatttaacaaaagatgtgcaagacttatatgctgaaaactacaaaacatcattgaaagaaattaaagaagccctaaatcaatagaaagacaagctgtgttcatgaattgaaagccttaatattgttaagatggcattactcatcaagttgatctacagattcaatgcaagccctatcagaattccagctggccatttcacacaaattggtaagatgatcctaatatccacatagaaatggaaaggaccagaatagaaaaaaatgtcaaaggcaaatttttaaatttcaaaacttactacaggccgggcgttgtggctcacgcctgtaattccaacactttgggaggctgaggtgggtggattacctgaggtcaggagttcgagaccagcctggtcaacatggtgaaaccccgtgtctactaaaaatacaaaattagctgggtgtagtggcacatgcctgtaatctcagttacttgggagggtgaggcaggagaatctcttgaacccagcaggtggaggttgctgtgagccgagatcgcactgctgcactccagcctgggcaacaagagtgaaactccatctcaaaacaaaacaaaagaaaacttactacaaagccacagtaatcaagatagtgtggtgctgacataaagatagacatatagatcaatagaataaagagtccagaaacaaacatttatggttcactaataatttacaaggatattaaaagcaatcagttgggaaagaatactcttttgaataaatggtgctgggactaccggatatttacttgcaaaagaataaaggaaacatagtacatccatacagccaaataatattcagtcataaaaaggagtggagtaccgatacatgctacaatatggatgacccttggaaacattatgtaagtttaagaagccagtcaccaaaggccataatgcagattccagttaatatgaaagatgtagaataggaaaatccatagagatgaatgtagactgtggctttttgaaggtgggtggaagggggaatggaaaatgattactaatgtgattaagatttctttttggggtgatgaaaatattttggaattagataacagcagtggttgcacagctttgtgaatatgctaaaaaccactgaattgtacactttaaaaggatgagttttatgatatgagaattatatttcagtttttaatttaaaaattgaatttgaaggagaaagtattccacagaatcttatcggtccttggtgaaggcagtaaggttttctggcccatgcttttctcaaataattggtactttaaattgattcaacagctggaggaacagtttgtccttcctatgttttgtgtgaaaatgtctacctcctgtgttttggtatctgagttagggttgggctatggaacttctcgagttgtattcctaagacgtcttgattatttataagccccatgaatgttattccacccatgataatctgggctacatggactgtgatcttggatgttagttcagcttatttgaaccttaatttcctttacaatatctgcttctcagtgttgtaaagtctaaatgagataatagactttaagtgtctatcatagtgcctggcctgatgtaggccttggttaatgaatgttagcttcctccctacacgtttcccttcattaaaaaaaaatagtaaaaagcacatttctttctttcttccctgtccaccccgcctgaaacagagtcttgctctctcacctaggctggaatgcagtggcacaatctcggctcactgtaacctccacctcccaggttcaagcaattctcctgcctcagcctcccaagtagctgggattacaggcgtgcaccaccaagcccagctaattttttttctcttttttttttttttgtatttttagtagagatggggtttcaccatgttggctaggctggtctcgaactcctgacctcaggtgatccgcccgcctcggcctcccaaagtgctggcattacaggcatgagccactgtgcccggccaaaagcacatttcttatatgtcacaggtcactcagctctgccctagcttcctgcccagcaacagattgcttgtagcaataaaccatgggtgatttttttttctttgatccgtgtgtcccctgctgtgcctcttctactacctggcacattgcaggtgctcagtgattttggatttcgcatgagacagcacaagccatttacattgattttccagcatgatgctaagagaatagtagagtgtcagcattagtctgtgacaaaggaacattgttagtgctactttagatgctgtgtttcttccagttgtgctgagtagcagagaacttaattaaatttcatactcgagaagagtaaaggctgagtccttcatctgccacaaatctttacaacccttgctttctagttaaactttccaggattttttttctctgtttttaatatcagctttttggagtgaagtgcttaaataataccaagtaatttattaaaaagagacaatcccaggttcctatttctttggaaatgttytacttattattagctgtctaagtgcattgtagattaaccttttcatgacaaatatttacttccatttgtgttatgtcttcttcctttgtaagaaaatttgaatgagtggttaatctatgtgaaaaatattggagggaagaaaatatatctactgcacaggcccttttaaggtatcattctctaaggagcagcttccatagctttcagctgtaaaaatagggactgccatttctgcaggcagaatggtttggggttatatttcaggaagctgaaactgctgagaccaatacaaagttaattctccgttgcttttttttccttccaggagctagagggattgaccacctgaaacctgacactatctccttcattctcctttctaagcagacagagttacaactacagacatttaatctttgcccttctttcccacctttaggagcggaaaaagaaatttgaaaaggatggtgagaggttttattctttactggatcggcacttacacctgtcttcaaaaaagaaagaatctcagttacaagaggtatgttcacaaagcctgcccctgccttccattgctagctatgccttagaaacagtgtgaattttgtactgcaaggcttttcccataccccgtctcagcagggaacctcatgtgatagtagcacttgtagtcaaaactgtggcctgagactcagaagccctgaatactaagccagctcttccactaactcagggtgtgaccttggataggatacttctttctttgcctcattccattatctgtaagaagaggagtcgagagtccctttcaattgcaagtccaaaatccatgcgaggataaagttaaactagtgttgtatttggtagaaatcaggaacagatcttctacttttttccctgagagattccacaacctttttttttttttttttttttggtgaggggttaggggaatgttctgttttgggactactgcttacctgggacttgcagtgccttcagttcaaataagctaccattcggtgagaccctaccacatgccatgaactgtactggatgcaacatggctacagaaacaatgagacatgattcctgcccttctgcagcttactgttgggctactaaataagaaaacacattactcttatacaaatagattttttttacatactttaatgtgtatatggtgcttttgttgggagtgggaaatgagaatagaagacttatgtttggatgtggggaatttcctttgtggaagaatgttgcccttccaatttgacgtggtcattaaaatataggtaaagtgtttgacaggtgaaaatggataaatggacctttcaaacagagaccaatggcccaaggatggaaggaacataagtagaattctattttaggaatctcaaactggcataggttgtagggtgaattagatcagggagagactagaagcaggataaacagtttaggaaactattgatctaggaaacgatctaggggaaagtgacagagccgtaagagaggcactagggaaggaaaagaaggaataaactgattgagaatttttctaatggaaggaggggtctatatgttcaatgaaagattcagtaataatggagattttaaagattcaagtatgaaaagagatatctgatggaataatatcataggcaggagctgtcatcttgtccatggtcacacagattgtggcagagctggagctcatctcctgataactggtttcatagatatccatcacatcatctgaggtgcttgaaggtaataggtcaagagcctcagtgtggccgagtgcagtggctcatgcctgtaatcccagcattttgggcggccaaggcaggtggatctcttgaggtcaagagtttgcaaccagcctggccaacatggcaaaaccccagctctactaaaaatacaaaattaaccgggcatagtggcacatgtctgtaatctcaattacttaggagactgaggaagaagaatcgcttgaacccgggaggcggaggttgcagtgagctgagatcactccattgcactccagcctgggtgacaagaacgaaactctgtctcaaaaaaaaaaaaaaaagccttagttgtggatggagttagtattgcaaaggagaaggactactttccttccataaactagaattgagtctgggatcttctatcattttccttttgcccacttttgtttttttccttttctatctattctgtgtcgcggtttctatgcagaaaacagtcaacaggcctgagactgctatgcttagaaagacctgtttacaaaattagcccttggaatggcatctgggaacttcactgttaaacagctcccaacattgatttagaagtttcccttaatgggtaagaatggctgactgtgccaagcctggctctgcaaataatgtagcttatgtcgaacacctttttcttctggtactcttgaattttggttgtgctgggcagagtgtgcctgtgtaactagccccgcagtaaaaccctaagctactcattctcttatgagcttccctgactgataacattttctctgtgttgttacaacttgttgaaggaagaattaaatgtgtcttgggtgacaccaccgtgagagatcttttggaagcttktacctagcttcctctgcattttgccccaggcaccttttctctttgctcagtcggctgtgtacgctttcactgaaataaatcttagctgtgagtactactatgttgagtactttgagtcctgctcaaaaaagatttattaaagaattattaaaattggggtggtcttctggaccctggacacaatccaaactattggagacttttgctaggacaccttctggagtgttctaggtgtttggtgctatatctagatgtccttttattacttattcaataaaaaaatgagcagggcaatcttgagttagtcactttcaaaaaatttagatttcatctttagagaagttttaggtttacagaaaattaaatagtaagtacagagttctcatatgcccttactccctcacacagtttctcatttcctcttttaggatcatcttgcatttgtgtgatacatttgttagaattgaggagccaatgtattaaacattctatgggttttgaaaaacatatgataacatatatccagcattaccatattgtacaggacagtttcgctgccttgaacatccctggactttatccctccctccttctacctctacctctgacaccactgatctttttatggactccatacttttgccttttccaaaatgtcatatagttggtatcatatggtttgtaaccttttttgattggcttcttgtagttagcaagatgcatttaaggtttctccatatcttttcttgacttgataactcacttctttttagggctgaataatatgccattgtctggttgtaccacggttggtttatccatttgcctattgaaggacttcttcgtttcttctgaattttggcagttattaaagctgcgataaaaaattgtgtgcaggcttttagggatatacattttgatgttgtttgagtcaataccaaataatacaactgctatcatatggtaagattttatctagtgtcgtaagaaactgccaaactgtcttccaaattgactgtagcagtttttatttccatgaacaatgaatgatagctccggttgctccacatccttgtcactattctgcgttgtaccattaaaagtaatggcagaaatcacagttccttttgcaccaacctaatatgtacatggaatatctttccatttattttgacctttgatttttttcatcagtgttttgtagttctcctcttaaatatcttgtctttttgtgcctggcttatttgacttaacaaaataactttcagttccatccatgttgttgcaaatgacgggatctcatttttttcattcttttatttctgatgccacttctttgtgtatttactctcttacttatttaaygtggctaaaatattaacaattttattgatttttttcaaagaaccagctttttggttttgttgatttcctgttgttaatttcgttgatatcttcatcttcttttttttattatactttaaattataaggtacatgtgcacaacgtgcaggtttgttacatatgtagacatgtgccatgttggtgtgctgcacccattaactcatcatttacattaggtctatctcctaatgctatcccacccccctccccccaccccacgtcaagctccagtgtgtgatgttccccaccctgtatccaagtattctcattgttcaattcccacctatgagtgaaaacatgtagtatttggttttctgtccttgcgatagtttgctcagaatgatggtttccagcttcatccatgtccctacaaaggacatgaactcatcattttttatagctgcatagtattccatggtgtatgtatgccacattttcttaatccagtctatcattgatggatatttgggttggttccaartctctgctattgtgaatagtgccacaataagcatatgtgtgcatgtgtctttatagcagcatgatttataatcctttggatatatacccagtaatgggatggctgggtcaaatagtatttctagttctagatccttgaggaatcaccacactgccttccacaatggttgaactagtttacactcccaccaacagtgtaaaagtgttcctatttctccacatcctctccagcacctgttgtttcctgactttttaatgattgccattctaactggtgtgagatggtatctcattgtggttttgatttgcatttctctgatgaccagtgacgatgagcattttttcctgtgtctgttgactgcataaatgtcttcttttgagaagcatctgttcatattctttgcccactttttgatggggttgtttgattttttcttgtaaatttgtttaagttctttgtagattctggatattcgccctttgtcagatgggtagattgtaaaaattttctctcattctgtaggttgcctgtgcactctgacagtagtttcttttgctgtgcagaagctctttagtttaattagatcccatttgtcaattttggcttttgttgccattgcttttggtgttttagacatgaagtccttgcccatgcctatgtcctgaatggtattgcctaggttttcttctagggtttttatggttttaggtctaacatttaagtctttaatccttcttgaattaatttttgtataaggtgtaaggaagggatccagtttcagctttctacatatggctagccagttttcccagcaccatttattaaaaagggaatcgtttccccattgcttgtttttgtcaggtttctcaaagatcagatggttgtagatgtgtagtattatttctgagggatctattctgttccattggtctatctctctgttttggtaccagtaccatgctgttttggttactgtagccttgtagtatagtttgaaatcaggtagcatgatgcctccagctttgctcttttggcttaggattgtcttggcaatgtgggctcttttttggttccatatgaactttaaagtagttttttccaactctgtgaagaaagtcattggtagcttgatggagatggcattgaatctataaattaccttgagcagtatggccattttcacgatattgattcttcctatccatgtgcatggaatgtacttccatttctttgtgtcctcttttattttgttgagcagtggtttgtagttctccttgaagaggtccttcacatcccttgtaagttggattgctaggtattttcttctctttgaagccattgtgaatgggagttcactcatgatttggctctctgtttgtctgttattggtgtataggaatgcttgtgacttttgcacgttgattttgtatcctgagactttgctgaagttgcttatcagtttaaggagatttggggctgagatgatggggttttctaaatattcaatcatgtcatctgcaaacagggacaatttgacttcctcatttcctaattgaataccctttatttctttctcctgcttgattgccctggccagaacttccaacactatgttgaataggagtggtgagagagggcatccctgtcttgtgccagttttcaaagggaatgcttccagtttttgcccattcagtgagatattggctgtgggtttgccataaatagctcttattattttgagatacatcctatcaatacctagtttgtttagagtttttagcatgaatggctgttgaattttgtcataggccttttctgcatctattgagataatcatgtggtttttgtctttggtyctgtttatatgctggattacatttattgatttgtgtatgttgaacgagccttgcagcccagggatgaagccaacttgatcgtggtggataagctttttgatgtgctgctggattcagtttgccagtattttattgaggatttttacattgatgttcatcagggatattggtctaaaattctcttttttttttgttgtgtctctgccaggctttggtatcaggatgatgctggcttcataaaatgagttagggaggattccctctttttctatggattggaatagtttcagaaggaatggtaccagctcctccttgtacctctggtagaatttggctgtgaatccatctggtcctggactttttttggttggtaggctattaattattgcctcaatttcagagcctgttattagtctattcagggattcaacttcttcctggtttagtcttgggagggttcatgtgtccaggaatttatcatttcttctagattttctagtttatttgtgtagaggtgtttatggtattctctgatggtagcttatatttctgtgtgaaaggtggtgatatcccctttatcattttttattgcaactatttgattcttctctcttttcttctttattagtcttgctagcagtctatcaattctgctgatcttttcaaaaaaccatctcctggattcattgattttttgaaggtttttttttgtgtctcttatctccttcagttctgctctgatcttagttatttcttcccttctgctagcttttgaatgtgtttgctcttgcttctctagttcttttaattgtgatgttagggtgtcaattttagatctttcctgctttctcttgtgggcatttagtgctataaatttccctctacacactgctctaactgtgtcccagagattctggtatgttttgtcttgttctcgttggtttcaaagaacatctttatttttgccttcatttcgttatatacccagtagtcattcaggagcagattgttcagtttccatgtagttgagcggttttgagtgagtttcttaatcctgagttctagtttgattgcactgtggtctgagagacagtttgttataatttctgttcttttacatgtgctgaggactgctttacttccaactatatggtcaatttttaataagtgcgatgtggtgctgagaacaatgtatattctgttgatttggggtggagagttctgtagatgtctattaggtccgcttggtgcagagctgagttcagttcctggatctccttgttaactttctgtctcgttgatctgtttaatgttgacagtggggtgtcaaagtctcccgttattattttgtgggagtctaggtctctttctcggtctctaaggacttgctttatgaatctgtgtgctcctgtattgggtgcatatatatttaggatagttagctcttcttgttgaattgattcctttaccattatgtaatggccttctttgtctcttttgatctttgttggtttaaaatctgttttatcagagcctaggattgcaacccatgcctttttttgttttccatttgcttggtagatcttcctccatccctttattttgagcctgtgtgtgtctctgcacgtgagatgggtctcctgaatacagcacactgatgggtctcctgaatacagcacaatgatgggacttgactctttatccaactttccagtctgtgtcttttaattggagcatttagcccatttacatttaaggttaatattgttatgtgtgaatttgatcctgtgattatgatgttcgctggttattttgctcgttagttgatgcagtttcttcctagccttgatggtctttacaatttggcatgtttttgcagtggctggtactggttgttcctttccatgtttagtgcttcctttaggagctcttgtaaggcaggactggtagtgacagaatctctcagcatttgcttgtctgtaaagtattttatttcgcctttacttatgaagcttagtttggctagttatgaaattctgggttgaaaattcttttcattaagaaagttgaatattggcccctactctcttctggcttgtagagtttctgccgagaaatcagctgttagtctgatgggcttccctttgtgggtaacctgacctttctctctggctgcccttaacattttttccttcatttcaactttggtgaatctgacaattatgtgtcttggagttgctcttctcaagcagtatctttgtggcattctctgtatttcctgaatgtgaatgttggcctgccttgctagattggggaagttctcctggataatatcctgcagagtgttttccaacttggttccattctcgccgtcactttcaggtacacaaatcaggcgtagatttggtcttttcccatagtcccatatttcttggaggctttgctcgtttctttttattcttttttctctaaacttctcttctcacttcatttcattcatttcatcttccatcactgataccgtttcttccatttgatcgaatcggctactgaagcttgtgcatgtgtcatgtagttctcatgccttggttttcagctgcatcaggtcatttaaggtcttctctatgctgtttattctagttagccattcgtcttatcttttttcaaggtttttagcttctttgcgttgggtttgagcatcctcctttagcttggagaagtttgttattaccgatcatctgaagccttcttctctcaactcatcaaagtcattctccatgcagctttcttccattgctggtgaggagctacgttcctttggaggagaagaggtgctctgatttttagaattttcagcttttctgctctggtttctccccatctttgtggttttatctacctttggtctttgatgatggtgacgcacagatggggttttggtgtggatgtcctttctgtttgttagttttccttctaacagtcaggaccatcagctgcaggtctgttggagtttgctagaggtccactgcagatcctgtttgcctgggtatcaccagcagagtctgcagaacagcaaatattgcagaatggcaaatgttgctgcccgatccgtcctctggaagcttcatctcagaggggcacccagctgtatgagttgtcagttggcccctactgggaggtttctcccagttaggctactcaggggtcagggacccacttaaggaggcagtctgtccgttctcagatctcaaactccgtgctgggagaaccactactctcttgaaagctgtgagacagggacatttaagtctgcagaggtttctgctgccttttgttcagctatgccctgcccccagaggtggagtctacagaggcaggcaggtctccttgagctgtggtgggctccacccaattcgagcttcccagctgctttgtttacctactcaagcctcagtaatggcggacgaccctcccccagcctcgctgctgccttgcagttcgctctcagactgctgtgcttgcagtaagagaggctccgtgagcttgggaccctctgcaccatgcatggtatataatctcctggtgtgccatttgctaagaccgttggaaaagcgcagtattagggtgggagtgtcccgattttccaggtactgtctgtcacagcttcccttggccaggaaagggaattccgcaaccccttgcgcttccagggtgaggcgatgccctgccctgcttcggctgacactctgtgggctgcacccactgtccaacaagccgcagtgagatgaactcagtagctcagttagaaatgcagaaatcacccatcttctgtgtcgctcacactgggagctgtagactggagctgttcctattcagccatcttggaaccttcagtcgatatcttctttaatgtttattttttcttattttctgcttactttggatgtgatttattcttctatttctagtttcctaagaaggaagcttacattattaataagagatctttcttctattctattatatgcatttcattctataaatatttctctaagcactgcttttgttgcccacaaatattaaattgtgttttcatttttatttaattcaaaatgtcttaacatttcttattttattttatttattttttgtagaattgaggtcttaccatgttgcccaggcgagtttcaaactccaggtttcaagtgatcttcccgccttgccctcctaaattgctgagattacaggtgtttgccatgatgcccagccttacttttctttgcgtctttgactcaggtttcatttataaatgtactgtttaatctccaattatttggggcattttcagcttttaaaaattgatttctggtataatttaattgtggtctaattgtatatttcataagatttctattcttttagatttcttcaggtgtattttatgtcccagaatgtggtctatcttggtgatttttctgtgtgactttgagatgaaagtgtattctgctgttgtatcaagtgttacaaagatgtcagttagattcagttgatcaatggtgctgttcaggtcaacaatgtccatacggattttctgctagctggatctgtccattactattagaggagtattgaagtctccaactctaatagtaggtgtgtctctccttgtaattctctcaatttttacctcatgtattttgatgctgtgttgttaggcacattcacattaagaattgttatgtcttcttagagtcttgccatctttattattatattatgatttgatatcataatatttttccttggtagttttctttgttctgaagtatgctttttatgaaattaatatagctactctagcattcttttgattaatgttagcatgatatatctttctttatacctttacttttaatctgtctttgttttctttacattttaattgttatttcaataggtttaggggtataagtgttttttggttacatggatgaattgtatagtggtgaagtctgggcttttagtgtacctgtcacccgaatagtgtacattataccgaacaatgggtaatttttcagccccctctcaccaccctttttctgagtctccaatgtccattataccactctgcatgtctctgcatactcagagcttagctcccactaataaatgggaatgtgaggtatttgatttgagttagttcacttggaataatggcctccagttccagtttctgtaaaagacattattttgttctgtttcatggctgagtagtattccattgtgtgtgagtgtgtgtgtgcacacatatatacctactatattttctttatccactaatcagttgatgggcacttagattgatttcctgtctttgcaattgtgaattgtgtgaagataaacataggagtgcaggtgtcttttctgatgtaatgacttcttttcctttaggtagattctcagtagtgagatcttggatcaaatagtagttctacttttagttatttgagagatctctatactgttttccatagagactgtatgaatttacattcctacccaaagtgaataagcattcccttttaaccacatctgcatcttttgttttttgactttttaataatggcctttctgagtggagtaaggtggtatctcattgtggttttaatttccattttctttttttttctttttatttatttttatttattttttctattatactttaagttttagggtacatgtgcacattgtgcaggttagttacatatgtatacatgtgccatgctggtgcgctgcacccactaactcatcatctagcattaggtatatctgccgatgctatccctcccccctccccccaccccacaacagtccccagagtgtgatactcctcttcctgtgtccatgtgatctcattgttcaattcccacctatgagtgagaatatgaggtgtttgcttttttgttcttgcgatagtttactgagaatgatgatttccaatttcatccatgtccctacaaaggacatgaactcacattttttatggctgcatastattccatagtgtatatgtgccacattttcttaatccagtctatcattgttggacatttgggttggttccaagtctttgctattgtgaataatgccgcaataaacatacgtgtgcatgtgtctttatagcagcatgatttatagtcctttgggtatatacccagtaatgggatgactgggtcaaatggtatttctagttctagatccctgaggaatcgccacactgacttccacaatggttgaactagtttacagtcccaccaacagtgtaaaagtgttcctatttctccacatcccctccagcacctgttgtttcctgactttttaatgattgccattctaactggtgtgagatggtatctcattgtggttttgatttgcatttctctgatggccagtgatgacgagcattttttcatgtgttttttggctgcataaatgtcttcttttgaggagtgtctgttcatgtccttcgcccactttttgatggggttgtttgtttttttcttgtaaatttgtttgagttcattgtagattctggatattagccctttgtcagatgagtaggttgcgaaaattttctcccattttgtaggttgcctgtttgctctgatggtagtttcttttgctgtgcagaagctctttagtttaattagatcccatttgtcaattttgtcttttgttgccattgcttttggtgttttagacatgaagtccttgcccatgcctatgtcctgaatggtaatrcctaggttttcttctagggtttttatggttttaggtctaacgtttaagtctttaatccatcttcaattgatttttgtataaggtgtaaggaagggatccagtttcagctttctacatatggctagccagttttcccagcaccatttattaaatagggaatcgttccccatttcttgtttttgtcaggtttgtcaaagatcagatagttgtaggtatgcggcattatttctgagggctctgttctgttccattggtctatctctctgttttggtaccagtaccatgctgttttggttactgtagctttgtagtatagtttgaagtcaggtagcgtgatgcctccagctttgttcttttggcttaggattgacttggcgatgcgggctcttttttggttccatatgaactttaaagtagttttttccaattctgtgaagaaagtcattgggagattgatggggatggcattgaatctgtaaattaccttgggcagtatggccattttcatgatattgattcttcctacccatgagcatggaatgttcttccatttgtttgtatcctcttttatttccttgagcagtggtttgtagttctccttgaagaggtccttcacatcccttgtaagttggattcctaggtattttattctctttgaagcaattgtgaatgggagttcactcatgatttggctctctgtctgttgttggtgtataagaatgcttgtgatttttgtacattgattttgtatcctgagactttgctgaagttgcttatcagcttaaggagattttgggctgaaacagtggggttttctagatatacaatcatgtcgtctgcaaacagggacaatttaacttcctcttttcctaattgaataccctttatttccttctcctgcctaattgccctggccagaacttccaacactatgttgaatagaagtggtgagagagggcatccctgtcttgtgccagttttcaaagggaatgcttccagtttttgcccattcagtatgatattggctgtgggtttgtcatagatagctcttattattttgaaatacgtcccatcaatacctaatttattgagagtttttagcatgaagggttgttgaattttgtcaaaggctttttctgcctctattgagataatcatgtggtttttgtctttggctctgtttatatgctggattacatttattgatttgcatatattgaaccagccttgcatcccagggatgaagcccacttgatcatggtggataagctttttgatgtgctgctggattcgttttgccagtattttattgaggatttttgcatcaatgttcatcaaggatattggtctaaaattctctttttttgttgtgtctctgccaggctttggtatcagaatgatgctggcctcatgaaatgagttagggaggattccctctttttctattgattggaatagtttcagaaggaatagtaccagttcctccttgtacctctggtagaattcggctgtgaatccatctggtcctggactctttttggttgctaagctattgattattgccacaatttcagctcctgttattggtctattcagagattcaacttcttcctggtttagtcttgggagagtgtatgtgtccaggaatttatccatttcttctagattttctagtttatttgcgtagaggtgtttgtagtattctctgatggtagtttgtatttctgtgggattggtggtgatatcccctttatcattttttattgcgtctatttgattcttctctctttttttctttattagtcttgctagcggtctatcaattttgttgatcctttcaaaaaaccagctcctggattcattaattttttgaagggttttttgtgtctctatttccttcagttctgctctgattttagttatttcttgccttctgctagcttttgaatgtgtttgctcttacttttctagttcttttaattgtgatgttagggtgacaattttggatctttcctgctttctcttgtgggcatttagtgctataaatttccctctacacactgctttgaatgcatcccagagattctggtatgttgtgtctttgttctcattggtttcaaagaacatctttatttctgccttcatttcgttatgtacccagtagtcattcaggagcaagttgttcagtttccatgtagttgagtggttttgagtgagattcgtaatcctgagttctagtttgattgcactgtggtctgagagatagtttgttataatttctgttcttttacatttgctgaggagagctttacttccaactatgtggtcaattttggaataggtgtggtgtggtgctgagaaaaatgtatattctgttgatttggggtggagagttctgtagatgtctattaggtccgcttggtacagagctgagttcaattcctgagtatccttgttgactttctgtctctttgatctgtctaatgttgacagtggggtgttaaagtctcccattattaatgtgtgggagtctaagtctctttgtaggtcactcaggacttgctttatgaatcttggtgctcctgtattgggtgcatatatatttaggatagttagctcttcttgttgaattgatccctttaccgttatgtaatggccttctttgtctcttttgatctttgttggtttaaagtctgttttatcagagactaggattgcaacccctgcctttttttgttttccatttgcttggtagatcttcctccatccttttattttgagcctatgtgtgtctctgcacgtgagatgggtttcctgaatacagcacactgatgggtcttgactctttatccaatttgccagtctgtgtcttttaattggagcatttagtccatttacatttaaagttaatattgttatgtgtgaatttgatcctgtcattatgatgttagctggttattttgctcgttagttgatggagtttcttcctagtctcgatggtctttacattttggcatgattttgcagcggctggtaccggttgttcctttccatgtttagtgcttccttcaggagctcttgtaaggcaggcctggtggtgacaaaatctctcagcatttgcttgtctgtaaagtattttatttctccttcacttatgaagcttagtttggctggatatgaaattctgggttgagaattcttttctttaagaatgttgaatattggcccccactctcttctggcttgtagggtttctgccgaaagatccgctgttagtctgatgggcttccctttgagggtaacccgacctttctctctggttgcccttaacattttttccttcatttcaactttggtgaatctgacaattatgtgtcttggagtcgctcttttcaaggagtatctttgtggcgttctctgtatttcctgaatctgaacgttggcctgccttgctagattggggaatttctcttggataatatcctgcagagtgttttccaacttggttccattctccccatccctttcaggtacaccaatcagacatagatttggtcttttcccatagtcccatatttcttggaggctttgctcatttctttttattcttttttctctaaacttcccttctcacttcatttcattcatttcatcttccatcgctgataccctttcttccagttgatcgcatcggctcctgaggcttctgcattcttcacgtagttctcgagccttggttttcagctccatcagctcctttaagcacttctctgtattggttattctagttatacattcttctaaatttttttcaaagttttcaacttctttgcctttggtttgaatgtcctcctgtagctcagagtaatttgatcatctgaagccttcttctctcagctcgtcaaagtcattctccatccagctttgttccgttgctggtgaggaactgtgttcctttggaggaggagaggcgctctgctttttagagtttccggtttttctgttctgttttttccccatctttgtggttttatctacttttggtgtttgatgatggtgatgtacagatgggtttttggtgtggatgtcctttctgtttgttagttttccttctaacagagaggaccctcagctgcaggtctgttggagtaccctgccgtgtgaggtgtcagtatgtccctgctggggggtgcctcccagttaggctgcttgggggtcaggggtcagggacccacttgaggaggcagtctgcccgttctcagatctccagctgcatgctgggagaaccactgccctcttcaaagctgtcagacagggacatttaagtctgcagaggttactgctgtctttttgtttgtctgtgccctgcccccagagatgaagcctacagaggcaggcaggcctccttgagctgtggtgggctccacccagttcgagcttcctggctgctttgtttacctaygcaagcctgggcaatggcgggcgcccctcccccagcctcgctgccgccttgcagtttgatctcagactgctgtgctagcaatcagcgagactgcgtgggcgtaggatcctccgagccaggtgcgggatataatctcgtggtgctccgttttttaagcccgtcggaaaagcgcagtattcgggtgggagtgacccgattttccaggtgccatccgtcacccctttctttgactcagaaagggaactcgctgaccccttgcgcttcccaagtgaggcaatgtctcgccctgcttcggctcgcgcacggtgcgcgcacccactgacctgcgcccaatgtctggcactccctagtgagatgaacccggtatgtcagatggaaatgcagaagtcacccgtcttctgcgtcgctcacgctgggagctgtagaccggagctgttcctattcggccatcttggctcctccccaatttctattttcttgatgattagtgatgttgagcattttttcatgttattggccatttgtgcatcttcttttgaaaaatgtctgttcatgtcgtttgcccacttttaaatgggatttttttttcttgctgatttgttggagttccttgtagattctggacactagccctttgtcagctgtacagtttgtgaatattttctcccattctgtaagttgcctatttactctgttgattatttatcttgttgtgcagaaagattttagtttaattaagtctcatttatttatttttgtttctgttgcatttgctttaggtgtcttagtaatttttttttattaggccaattcctagaagcatttttctgtgttttagtctagaagttttatggtttcaggtctaacatttttgtgtatcttatttaaaatgatatcttttaggtaacatagttggctcttaatttttgtgcactatgacagtctatcttttaatttttttagatcactgacgtttaaaagggtcatagataatggtgtaatagtatctactatattgtttaccatcttctacttattgtttttgtttttatttttgtctttcagtcttcttttgacttctcttttttaagagaatattttatatgatcttattttctgtcttctcttaccatgtaaattatacttcttctttttcattttttaatggttgccttagagcttgcaatatgcatttgtggttagtttatgtccacttttcaaattccagtaacgtagttatgggttgtacaggatcmacagactatttccaatttctccatttagtcccttataatggtactatcattctttttacttatttgtaagatacaatcaccaaatgtatcattacaattattattatagacaaattcttatctgttaggtccattaagaatttgaaaaataaaatatttaatcttcatttatttcttttctagtgctctttttttctttctttttaggtctatatttccgacatatcatttttcttctactggagatcttttgtcctttcttgcaagacaagtttagtggtgacaaagtgctttaatttttgtttgtttgaggaagtctttattttaccatcacttttgaaggataatttcacagtttacacattgttaagtagttaactttttttctttcaacaccttcaaatattttatagcactcttttctttctgcatggtttcttaagagaagtctgatataactctttatccttgccctgctgtatagtaagttgtttgtttttctctctagcttctttcaagattttctcttgtattttattttctgcagctttgaatatcatatacctacatggggattgtttggtatttatcctgattggtatttattagtatttattatattattgtatttattggtatttatcctgagctttctggatgtgggtttgatacctgtcttttattttggaaaattctcagtcattattgcttgaagtatttcttctgtttctgtctctttttcttctcctattggtactctgaaaatacgtatattaacatcttttgtaattgttcaccagttcctgaatattctactccatgtttgtcattctttttttctctttgcatttcagtttcccacattttttttgacatgtatttaagcttactggttctttcctcactcttgttcaatctactggtgaaccctttaaaagtagtcttcatttctgctacagtgtttttgatttctagtgttttctctgtatactctcttgcagttttcatctgcctgctactattacccatctgttcttaggtgctgtctgttttttatattagagcccttatcatattaattataattattttaaatttagttttatgtttcttttttgtttgtttctgagatggagtctcgctctgtcacccaggctggagtgcagtggcacgatctcggctcactgcagtcttcacctcccaggttcaagtgagcctcgtgcctcagcttctggagtagctgggactacaggagtacagcaccacacttggctagtttttgtatttttagtagagatagggtttctccatgttggccaagctggtcttgaactcctgacctcaggtgatctacccacctcggcctcccaaagtgctgggattacaggtgtgagctaccgcacttggcctacagtcttatatttctacaatgtctgccttacctacatttgattctgatgctccttttttctcttcagactgtgtttattgccttttaatatgccttgtagttcattgttgaaagctagcggtgatgttcagatgaaaggaactgagtgaaacaggtctttaatgtgaggttttgtgttgaactggctaggagctaggctgtgcttagtttgctgtagctgtcattgtctgactctaaaattttctctggcatcattgtttatgtgctcagattttaccatttcttgttaaataagacttgagacttgcagttctttctgttgtaatcccctcagtattggccatagtagcatgcttctgttcttgggctttggcccttgttaatttcttattctctgtattcatgtctctgtagtgtttgagggagcagattttcctctgacttcagttctctgttgaatataataaaatgtgtggattttacacttgttcagcttttttctttttgtcagggtggatgtaatgacttcaagctttttatgtgttggaccagaaactggaatcctgtatcagtcacttttttatctcttggctttaggttctctatttctaaaataaaaggtaacatcactagttggtggctaaatgctcatctagctctagcattctgttcaatccttaagtactgactttcatgaatgaatatcccaatatgtaatgtttgttttccttcttctacaggcagacctacaggtggacaaggagaggcacaattttttcgagtcctctcttgattatgtttatcaaatccaggaagttcaggagtccaagaagttcaatattgtggagcctgtaagttttctctgttgatgaatggtctaaaaatatttatcaaatgcctggtaaatgtacaaactttgatcataaaaacagaatcccaaagaacgtgaaggataatcagtggaaatgtctagaacgtagtctaacttacgtttttcttgttctttagtatactttttttctctctttccccccaacccttttctctctttttctatggctattttctttctctttcctttttttcctttctctttcctccccccttccggaatttctctacaactcttcctgttactttgtttccctcccttccttcttcttgygctttcagaagcttctgaaagtctttctcatataccagatactatgctagggactcatgtctcttgcagtcagtgacttctcattctactacttttacttctgtcttgtgtagttttttcccatttcacgttttttcattccatttacttcgttttgtgtagatttttccatttccatatatttgtttgagacagggtctcactgtcacccaaactggagtgcagtggtgctatctacaacctctgtctcctgggctcaagtgatcctcccacctcagcctcctgagtaactgggactacaggtgcatgcctccataccgagctaatattttgtatgtttttgtagagataaggtttcaccatgttgcccaggctggtctccaactcccgggcccaagtgatccccctgccttggcttcccaaagtgccaggattacaggcatgagctaccatacccagcccgtgtatttgatttttaatggggttgaaaatttacaccaatatatgttgtgtatcatttatatgtctttttctgcaaccctgtgaaacatttctaattttaaagttggtttagactcctttgatcttttagcattatgacagtcttcattaaagttaggtagaaaatcttgctttattcatttatctatttactttcattcattcaagaaatatttattgagcacctattgtttgtggttgctgaggatatatagaggaaagatgcagttcatttacatactgttcaaatgatgaatgtctttatatgagatctgaacaagctcagggttaataaatttgttaatagttctttttttctgaagctgagtcaagggtaaatgttcaacctgatatgaaaacagtgatgtgtagactggtttgtgtttgactgcgtttagcgctatactgggtaaacaccatggagttttttgttgttgttgtttgtttgtttgttttttgtttttttgagacagtctcactctgtcccaggctagagtgcagtgatgcaatcttggctcactgcaacctccgcctcccgggttcaagccattctcctgcctcagcctcccaagtagctgggattacaggcgtgcgccaccacggccagctaatttttgtatttttagtagagatgggatttcaccatgttggtcaggctggtctcaaactcctgacctcacgatctgcccgcctcggcctcccaaagtgcagggattacaggcataagccaccacacccagccacaccatggagttttttggtgagttcatgtttcttttatttagtttattagaagatgctggtgataaagttatttttacatgttttccctaggtcttggcctttcttcatagtctgttcatttctaacagcctgactgtggagctcacacaggatttcctcccatacaaacaacagctccaactcagtttacagaatgtgagtttgcatgtggatttttctcaccrgtctttccattccgattgaatttcagccctagcgaccttgattcttggaattctaggttactgcatcctagccaatttgttagaatatactggtgtggatcacaaayatttagtatatcagactgttcttgctcttccactttcacatctttcctgtttttgaggctgactgctgttcaaacccacccttccacacaccaacaccttcatctatgcaatatttattaagtattgctaatttgctgcatctctctcagatcaggacatagctataggcttatttgagcccaggccttaagctacttccctgctcagtcaaaacactctcactgtagactttattaccacaaacactcattttatcttctctttcttttctcagtacttattagtagagtcacataaattacttttaaaggttttctctaccttctttgtcatgctggttcttacagatgggcatgtaggcatagtgttcccatccttttcacatatattcctttacatgttcctttattcaacccacattaaacaaatgtttatggaaaaaatgaacataagctctgtgccaggcatgtgaaaggcactggacatgccatgaagatgcatgcaagtttttctgtcttgaaggaacatacagtttcttgtaggagacaaataaacagagataaattataatccattatgataagtgctataatagaatcaaggccaaaggtttttaaaaagttcagagcatttggctacctggtagagtcagagaaggcattactgagttggtgactttagaatgggtgttaaattgcatgaaatatatagatgtagttttagatgaaaaatgctggtaagttatagtgaaaataagccccccttggttgtttaggaggattgggatttacagttgttgttattattttttctttctatatactctccttgcagaaaggaactaggggctctcacattctccagaatttcctgatttacaacatcttcctactacaaccaagttaatcccatgaatcttcctctatatattacttgatatgtacaaatgtaacaataagcctttgaatgtgtacatatgggtgacttatttacaggataaacatgagccaactagatgggcagcacagatcacctttctcactaacatcatgtcataattttaagactgggtactaaaaacttatctgtagtgattttcatacccacatttcaacacatgtcttaccattgtgttttagttgtgtagatttaaatagatttattctcatcattaggttttggtatttgtgagtatgaaaacatagctactgttggcccttctcccaagagagcaccctctcgtatattttatgttcttggccagaatttgattcagtatcaactaggctgtaactttgagacacaatttggaagttgctatgagaatgctacctttgggaaccttgtctgccatctcccttgttgtaaagcagggtatcagtcatgttcagaattctaagattgcttatttattagggccttatgtgattcgtattagtaaaaagcctcccagttgttattttatgagtatattgctcgttatatttttgtttcctatgcagtctttaggaccgttagactctataaacttgttttccattcactatgccattcaccatttctttttttgctttgtggttgcacatgctgtaagcagggaaaactttgtactgagtctctgaccaagaaatactttttcatgataatgatgatgataataatgattttcatgatgatgtcttgacagacaagaaatcatttctccagtacccgggaagagatggaagaacttaagaaaaggatgaaagaagctccccagacatgcaaacttccaggacagccaactattgaaggctatctctatacacaagagaaatgtgtgtggggacataggggtatccattgggtttcaataagccaggaactactgccacttgtcggctgtgaattttgggcacccttactgttcatagacccctgatagctaaaattcccttggaacgcaggcagggaatactgaaaacaaaaaaaaaaaaaggagaaactgagaggaagttaaagatttgtcttacaaaggctgtgtagtgataagacctaaggttttctctgagattcaaaatgggtattatttgttctttaatccttctgattattcttttggaaaaaagggaagtagaggaaaggaagtagaaaaataatatttcttatacttattatgtaccagacatggtgctaagttcatttaaaacactgcctcatttaatctttgcaaccaatttatacccatacacataaggccactaaggctcagagacgtcaccatttgaaagtcacccaactaacaagtgtcaggactaaaattaaattcaggtctatgaaatgccaaagcccatgatcctactatagtaccctatgtcttcgtctgcattagggtcatatgtttgctcttttcttttctttttttaagacaggatcttgctctgttgtccaggttggagtgcaatggcaccatcatagctcactacagcctcatactcctgggctcaagcagccctcctacctcagcctcctgagtggctgcacctaaaggcacctaccactacacttggctaagttttgaattttttgtagagacaaggtctcactatgttgctcaggctcatggatgctcttatagcacttagtgaacatcatgattccagtgggaaagacagtatctgtttttcattggtgactaagtaaagtgggttaacttgtttagtcactgaatgttgcagagcattcaatctttcctaattcctcagtaacattatgcacacctgtatgtgtgatttgattttatttgccctttgaactatgacccaatactccccaaacctgttattcagtttttgcccagagttattatatctggggaataaacagaggacacacacccagaggctgccagtagcaaaaatcactgtaattcaaaaagcatgacactacggtagtgaaattatcacacttttctttgcatagagcagtttacttgtgatgattttcaaagatgtgttctcccacttgtcaggttcatctcttcaactgtgtgtcgcacaatttctcgatctcagtgctgttgacatttcaggctggataatttttagttctgggaagtggtcctgtgtattatagtatatttagaagcatccctggcctcctcactttgtgctcatagtaatctccaggtgtgacaacctaaaatgtctctaatgtattgccacatgtcccctgggaggccaaattacccctagttgagaaccactgctgtatgctgtgtgatccttctgtgcttcagtattctgatttgtcatatgggcataacattgctactcagttgaatgtatgcttaatgagcactgtttctgccagatactgtgcaatgcattggggacacccttgaaaaactgaatcaaccatgatttctttcaccaagaagtgtaaagtgatgggagagatagacaagtatatcaataattataatgaaatgtggtgataactgtatttggggcatatatctaaaggcttcacaaagaaagtgatatttgaactagaacttgaatgatgagtgggagtttgataggtaaagaaaaggaggaatggccgggcacagtggctcatgcctgtaatcccagcactttgggaggctgagacggcagatcactggaggtcaggagtttgagaccagcctggccaacatggtgaaaccccgtctctactaaaaatacaaaaattagctggatgtggtgatgcttgcctgtaatcctagctacttgggaggctgaggcaggggaatgacttgaacctgggaggtggagattttactcagccgagatggtgccattacactccagcctgggtgacagagtgagactctgtctcaaaaatgaataaaagaaagaaagaaagaatgaaagaaagaaaagaaaagaaagaaaggaaagaaaaaggaaagaaagaaaggaaagaaaggaaagaaagaaagagagagaaagaaagaaggaaaaggaggaagggaattccaggtatataccactgcatgagtaaaggcagggttgtggatagacatagttgatttgtagggcccttgtttgccaagaatagtcctgctttacccctgttgtcctgatgtaattattaataatactgcctcattcagtcttaaataagtcttggatttggactagaaattatatggctacctctttatgtgggaactaaaagtaattcattgagacaggaacatagaggtgaggtgccaaaagaaaaagctagaaaggtaagttttgatcatgttatcaagggcattgtaggcaggctaaggagtgtggagatagtgggaaagccgtggatggtttttaatgaggggaatgataaaaatagagatatattttaaaaataatctaggaaaagagtggagaatgaattggagtggagtgatcagagatggggacaatagggaaatcagagaaggccaatgaaataattaattggtgagatagtaaatttttgttttttaaaaatatgtttcataaaatataaatacaaaataagacactgggcccagcgctgtggctcatgcctgtaatcccagcactttgggaggctgaggcatgcagatcacgaggtcaggagatcaagaccatcctggctaacatggtgaaaccccatctctactaaaaaaaatacaaaragttagccrggcgtggtggtgggtgcctgtagtcccagctacttgggaggctgaggcaggagaatggtgtgaactggggaggtggagcttgcagtgagctgagattgcgccactgcactccagcctgggtgacagaacgagactctgtcaaaaaaaaaaaaaaaattaaaacaaaaacaacactgatagggttcttaactaattcggtgttaaaaaggaatggagaggaggagacagttaaaagagagatgtgtagagtcatgtacaggttagaaggggcataacccaatgaccaatgacatggaacagttatagagacagcaaagtaaatgacaatagtctccagcttctgggatatatggtgatacaatttatagggaacatggcagggagagtaggttttgagcaagccagaagcagctgtgggaagcagttggtgaaggttagaatctccctgtgtgcagtaggtaggtggctatggaaggagggcggtcagggcaagggcagggctggatctgaagtttgrctctgaagagcaatgtgtaaatagcttccatcttagggttgacttcctatacagctaaaatagttattctgtctgctcacttttacttgtccttgtaggggctttaggaatatcctgggtgaaatactattgccagtatgagaaagagaccaaaacactgaccatgacgcctatggagcagaagccaggtgctaagcaggtcagttcttgtttgcaccatatttttggaaatggatctatgactgtttctcagaaaagaatatatgttgacctagtatcaaatcatcaagttcatcactgttacgtgaggccatgactttatatgtacaccttggcctaagtttgagtcagatagcactgagttgagtgaaaaatttctctgttgattagagcaagccttttgaaagtgccggtagtctttcaaaccagttatttttacaagtgccagtcacattgtacagtcaactatgtaaaaatatggatgaattacttttaagaatgctctactcttggattctttaaaatagcaagttttaaaaatatgaattgaattccaaaattccttttttacaggagtgtgtttatggcccacagttggaataaccgatactcacattctatgtactactcaaatatctttaagcagttaatctctctttttctgccctccaaaccttctcttcacatcactgaaacactgacacagactaaactttaaccaccacttgaaacaaaactacgtttacattaaccttgagaaagacaccctgaatcctttatacgaaaacaacaacaacaacacaacagcacaacaacacaacaacacactcacacacactcacacacacagatacacacatgggggttccttaagataaaagctgatctttagacagattgtttatattctaaaagtagttcaatgtgcctctttcccctttaactggctctcagacagggtcttagtgcatgatttttaagcatttgcactctttacaaattgtttgttggaagtgcttcaagggttatttgttagcactgaaagtagtacatgaagacccaatttaggtagggaggaatttggagaaaaattgggacagtttctctcccttgctgatccttttcatggaagatctctcttgtgtggcttgctcatgttgaattagagaggatggaaatgtgctttcaggctactgaaatttttttggagtgagagtggtcttttaaccacaagatttagctccctgctttaatgtgctttggtgatgggatggacttgtaaaagatgttgtatcaaacagagtttctggaatcctcggctatgctttattattattgttattattattattattatttgcgatggagcttcactcttgtcgcccaggctggagtgcaatggcacaatctcggctcacagcaacctccacctcccgggttcaagcgattctcctgcctcagcctcttgagcagctggtattacaggtgtgcaccaccacacccagctaatttttgtatttttagtagagatggagtttcaccatgttggctaggctgatctcgaattcccgacctcaggtgatcctcccgccttggcctcccaaattgctgggattacacgtgtgagccacggtgccagttactgtgcttttatcatgggccagttactcattcaaaaccctcctcagtttccagtccgccagttgccaaagcacctttcagtgtggttccaataaattcatcctgtgttttagcactgatttgttccaagtcagtcagaacttagctgattaatctgactaggaagtgcttataagcaacactggcctgcagtctctttcttttatttttctacacacattacttttcaaataccggagaggaaagctccttttgtaggcagtaatttcatttaggcactttctctgaggctgctcagaggtgcttattgcaaactccaagacagagtcagcagataccactttcatatcctcctgacagatgccagcaagccctccttttagtttttctttccctcttctcttttcattgagtagctgcttgcaaaactgcaatggtggtggcctgagcatttttgatgtggtattccttatggaatggaaagaagaacttagttactcacaaggcagagggaggtggtgggggttacttggatttccccaaattggagttggaagtgatttcttcctgtcagttctctgtttcacttcttaatactagtttgtattttacaattataaattttacaaataaatgataccataataataagaacactacaaaagccactatttcttgaatacctgctgtgtgccggacactgagctagacccttctgtcatattcatgctcctcatttaccctcctagcagctatgtgaagtcagtgcccccaatttgtgtaggaagtgagaccaagttgaagatgcaggaattggccatctttctgactatggcacttactatagcgttggtcccactactttagcctgtcagctctcatctgtgttttcatggtcaattttctgatcatcttctcaaatgataatttattagatcttcatcccttccctgttaggaatttgtggtcagaagaaggagtactgcattctgaatcttcagacctgtgtttaaattttagctctgtgatctggtagcttttgaccttgagtaaattgcctaatgttactcagtcttagtttcctcatcagaaaagtggtaaggatgataaagtagttcataaacattcattgagcactaagtatttgcaagatactggaggtataaagatgaataaaacactgttcatgtctttgaagacttcctagtcaagtggtgaaattaaacataaaaacaggacattttaatattacgtgcaaagcacatagtgggcaatgtgttggtttgaagaaggatttttgaggaagtggaagctgaactgcagtttgyagaataagtaagagtttagtcagrcaaagcagatagacaaggtcattttgggtggagcgattaatataggcaaagtcatgcaatcatgaaatagcatgatatgtatgtgaaataagagtacttttgcattgtaggggcattaaacaggtgagcagtcactggagatgagattggaatggtgggcagggcctaggtccctgagctgcaatgtcattgaagctgaggacattgagaatttaaagagatagagtgagtctgtgactttgctcataactctcattttgaaagactaatgtgtgacatcccacatttaggggtaggaaggcatactgaaggattaatttagagttgagttgttayagtgcaggagcaaggaaagattggcctgcaagtggctgagtatgctgatgagcaagaagtattgggtaatgagccacgtgggccagtttgtatgtcatagtatctaggcacctgggcagtgttacctaacttgagataccacagtgggttttgttattcccatttaatagattgtgaagttaagacttagagatggaatatgatttatttatttatttatttttgagacagaatctcactttgtcacccaggctggagtgcagtggcacgatcttggcgcactgcagcctctgcctcccggtttcaagcgattctcctgcctcagcctcccaagtagctgggattacaggcgcccaccactgtgcctaatttttgtatttttagtagagacggggttttgccatgttgaccaggctggtctccaactcctgacctcaggtgatccacctgccttggcctcccaaagtgctgggattacaggcatgacctgctgtgttttggccagggtcacatagctggtaaatggcataactgagacaagaccctaggtcttaaactttctagtgtgttgctatttccactataccaatttggatgactttgggtatgctgctttacttctttaagtgtcacttctctataatggttgttaacaataaaagtggcttaaaaatacctagcataggctggacacagtggctcacgcctgtaatcccagcactttgggaggctgaggtgggtggrtcacgaggtcaggagttcgagaccaccctgaccaacatggtgaaatcccgtctctactaaaaatacaaaaattagccgggcatggtgcgcacctgtaatcccagctactcaggaggctgaggcaggagaatcgcttgaacccgggaggcggaggttgcagtgagctgatatcgcactactgtattctagtctgagtgacagagcaagactacgtctcaaaaaaaaaaaaatgtagcgtaatatatggcacatagtaagtgataaatgttacttctctttcctgtatcacatggtctctgttgagataagagagggaatctgaacaaggtgagactagaattttagtctgtggacacagtgggttttaattcccttaattacctacaggactaaagtgggccacactgtccttgctgcacatatgaaatatcaaatgctaccatgactaatacacacatttgctatttcctctacttttgcgctacctttggagcgattacatttgtgatttctgtcatcctaaagagtgtagagttgggagacagaaatgtttttctccctccttcatctgccactttaatggaagcttctttgctcagctaccctctgactttctaagggaggttttagacagccacttaccccgtcacaatttccctccccagaggcctcatgaaaattttattctgtacacttaatgccattcagtcagcccatttctcctacactccccttacatgatatgtattgagcttcctattaagtcttccgtcttgggaaagagtgctggatgactctgaacaatttctcctggtctcagccattgattcttggagcggggagaaaccatctgccatcttgctgcaaatactgtttgaagggacaagattctcagtgagtctacacattgctcctgctgccttgaccagacgccttccaagtgacactgaagacactgtaggaagcagaaacagcttctgtgtctttttttaaaaattgcctgttaattcttgtttcatatcaggggcccttggacttaacactgaagtactgtgtgagaaggaagacggagtctatcgacaagaggttctgttttgacatagaaactaatgaaaggtaagctgtgccgctgtgaattggcaatgtccccacgtgccagatgcttagcctgggtaggtcttttattttcctccgtcatcccacgttgatgacaatgagtaagtctattcaggactttgttgtgagtctattcaagccagctcttctggctgcccttcccagggatccctgctagacctggcccagtgctgcttttctctgtgcaagcttctatcagctttgcctcacttgctctgggaagaaaaagtctctcctgggatttaatttgctatcagatgtgcaaaaggtcaacatttggtgatcttgcaagaaggaaaggataacaaagctcattctttgttaaatctcctaatatcacataaaagaacaaatgaattggcacacatttttgagggagggaagatggggtggagggtcgtggtgttattagaaagtcatttccccccatttggtgcaaaaatgatgcagaccttccctactttacagatactcaatgaactggaaatagtgtgattatcacctttcagatcttacagctaaggcttgcacattttggacttcgttgtgtttgtttctccccagtgccctctttttttacttgaacctgagcagttttatcagaggagaattttaaccattaaaatttcaaatgaatgcatttggcattattgtggagaaagacatgctttatagttgggtggttgtaccaaaataaacagaataaatctgtttctagattttatctcaaccttttatttctagatgttagatacttagtaatagaatagaattttgcaaaatgatcagattgctagaaaggaacttgaagggtgaattacaatatcatgtgaacaaaactagcagtgactgggatcataacaatcagactaaatgatgagggcatttttaaaaaaattggggaataaaggacttagcttgtttcmttatttcaaaattgagagattattatttgaccctcacaatttcgatttgtgaatttatatcatttctttgttaaaaatggatgatcccaattgaggtggctctgaaagtacgtattgttgccagtaaccatgagactgtcactcattttcctgatagcctcagttccagtaggaaggggaaaattattgttggctgtggcttcccttttttgcaaataatatccccaactcaagcagttgcaaacagtttgtccccgtggttaggggctaggatgaatttatgtttcttgtacctggtgctatgcatggctcatgataagtactaaatttgatgtttatttttaagtgtttttttcttatcctagaatgctgaagaattttcgacactagaacccagggattaaagttttgatgcatctacacttttagttatcatatactgtgcactttacaaaacattccctcatttaatctacaccccccccattttaccagtgaggaaactgagacccacatatatttaactgacttgcccaactaaagtcacataggaaatggtgaggctgagctcaaaccctggtctgtaggtctccaaagcccatgctggtttctttttgtttgttttgagatggtgtctctctctcttgcccaggctggagtgcagtgttgcacaacctctacctcctgggctcaaacgagtctcctgcctcagcctcctgagtagctgggactacaggcgtgtgccaccatgtccagctaatttttgtatttttaatagaaatggggtttcaccatgttggccaggcttgacttgaactcctggcctcaagacatccacctgcctcggcctcccagagtgctgggattataggcgtgagccactatgcctggctccatgctgtttttaattttttatattgtctattataagcagaagaaacaagctgcaaagtagagcgttaaatataataatgaacaggtgctgaggcccctctctgcatgtggagtcttttgagtgacatgacatctgcttttctggctagtcagtctgatataaggaacagagtcaggcttcctagcaggcatcaggcagctgtactcacattccctggagcacagagcaaagggctcttggagccactttttctatgtcaggaagagaggataagattttttatttttttaacttttaattttttagagagagggtcttactctgttgcccaggttggtttgcagtggcacaggttcaagtgatcctcttgcgtgagcctcctgagtagctgggactgacaggtgtgcaccaccatatctggctaattttttattttttatagctatgggaccttgctatgttgcccaggctggtcttcaactcctggcttgcagtgattctcctgtgccagcctcccaaagtgctcatattacaggtgtgagtcactgcacctggttctaaatttaggctcttagcagtatttaaaatgacaggctcatagcaaggcagagcttgaaatgttttaataacagcaacaacaataattgtaataataataaaaacaattgctaacatttgccaagtacctcctttgtgacaggcactgttatcagccatttaagcgtataatttcctttagtcgtcaccacagtcacatgagggargtgatgttatttgaattttggtttgtgaatctgtatcatttttgtgttaacaatggatgaccccattcaagatggctgtggaagtatatattgttgccagtaaccacaagactgtcattaagaggtgctttaatgaagtaagagaaggtaggacaggaaccccatgattccagcaggtagaacaggattcctgtgatatcagtaatggaaaggacctcccagctcctgtgttccagaaccctttcagataaagaaactgaggtctagaaaggcctagttacttatccagggtggctgaactctcttggcattgcttttatcattctatgactctaggagaggtctcatcttatcacagaatttgtggaaggaacaatgttttcctaatggctcagcaagccaggagaatgcaaggagactttataccttgcataaagtatggttaatctcaaaattccagatgagtcmcaaagatctaaaaagaccataaagagcataacagcttgggatatctctgggtagttagtagtgtcttagtccatttgtgatgttatgacaaaatacctgagactcagtaatgtataaacaacagaaattcatttgtcacatttctagaagctggaagtccaagcagtttcagtgtctggtgagggcctggtctctgtttccaagatggcatcttgttgcagtgccctccagagagcaccaacaccgtgtcctcatatgtcagaagagatggaagggaatgaacctactctttcaagtttttgtaaaagggccctaatcccattcatgaggttctacccttatgactaactcacctcctaaaggtcccatttcttaatatcatcacattggtagttaactttcaacctatgaattttggggaatattcagaccacagcaggtagcctgcaaataaatagaataaaacagggttcgaagccgtgtgccaggcagaagaggccttatattgtagtaatgaagaatatggctgctggaccagactttctggatttaattcctgtctctagtagttccctgctatatgaccttggataattactctgtgcctcagtttccccttctgtgaaatagagatgattactgtaactgccttattatatatattaactgagttaatatacatagtttacttggaacaaaatttgtcacctagtaagcattcagtaaatattagttgtttttattagtcataaaattgcttattagccaaaacgcctcctccctgtgtcttagccagtactcatgttgttgaatttattgcaactcaaaatgtttcttggacatcgcaggtgctggaagaagcaaagccattttactgagagataatgtgcctctgatgttcatgctcattcctagagctcagacaaagtggctggcttccaacagagtaaggcagtgagagcctttgtttggttcaagcacaatggggccaatttaagtgtgcattatggaggcgtcttgacagttaccttcctatttcttgcaggatctgggcacaaggccaccaagataccacccccgcctccatggttcccaaagttactgttctstaaattgcctattgttttcttgagtaaaagagattttgaaaaattrgtattctgtaagcctatgcttgttcagtgtgacaaactccagggcagagagggaccctagatcacaagactccattctctcagttgaattttctgctttatacttaccatttttttccccctcaggccaggaaccatcactctgcaggccctttcagaagctaacagaaggctatggatggaagccatggatgggaaagaacctgtaagttacctgacactggggaaacctccccagcatatgccagtgtatgagtgccctctagtggtatcagtgggtctcagacaattaaatggtaatggattgtttagtctcagttttagagctgtaaggaattgtttccacatctcttagcaggtaaggcaactggagttccagaaaggttgagggacttttctgagaccaccctcagagaagacaccaaaaccgggcttagaatgcagatctctcagctccctgctctagtgttagactatgtagctatgcccatgagcttttcttcagaaagaatgaagccatttttcaggttataaaatcaatatgtgttaattaattaatatgtgttaatatgaaaaataattgccatagttataaataagcacttattaaacatttattcagaatgatttttctgcctcacccttataccaccaactcagcttattctctttgagggtacagctggtagcggagatggcattgccatcctgtatcacaagatgtaccgttccatttagaacacggttatgcaggaggacaagcaatcccttgaaagggttactgattatcatcaagcgaccaatagaaacagttggaaataattgaaaaacattctggtttcttagtggcatattaaataatatcagcttcctggtgttggaattccaaaagcttggatataggtactagttctgccattaaatggctatgtgactctgggcaaatcatttcacctctctgagattcagttttcttctcctcagtaaaagggctttaataatttctttctacctatctcacagggttgcttagaaaaaacagatggaagtcatcttgtaaaccacaatgtgctagccgatctgaatgatgggatacaaaactcctaagatccagcagtgttcagatacagtcttatttctttgctgtattcaagtgaaaaactggctaggagggaaaatgcattctaggtttttctttctatgtgtcctcagtatcctggagaatttagaggggtaactagatcccagattgcacttatagtaaactggaaggtagcaggagagacttggtattctgaagactgccatccagaaaatattccagcactgtcttccttctgtcaccttccagaaacctgctgctgaactctttcatgcttgtgacatttctgtaggcagatgctgggaagctcagcaaggcatttatctttcaattccctctcccaagtttgctctccctttaggttttcaagaatcaaaggatgcagatggctttctgtggagaatgatgtgagcacatgggcccactgaatgtggatccataccaacttgatcatggcagatttttccacaaatcccttgtttagaaaagtagcagaaaaggctggctggcacaaaaatatctcccactgaaatatctgtgggcatacacacatatgcagaacttattttaaggagaggctgttcaaacagactcttaacagatggcatatagagggctcatttcctgcaacctcacattactaatgttgttgctcctttactaaacactccagttcactagtcttacaaatctcatccatgcctttgcctaaactgtcaaagaagatcagggcttgaaggaatgtctactccaaccctgatcactttactgatataaattttgagatctggagaatggaaagggcatgcccaaaatttcctaagaggtagaggtagagccaggactagacttcaagagtcaacagtcttctttctggtctctcacatagctatcacagcacatactccaagacaacacagacaaatcttggtgtattcatggatctctttcagatggacatttgcctttccacagagaagtattcatcaaccagtctttgagggtgggagattggtgttaggaacatttaaattttataatgcccattagacaggtacatagccatgaggaaaacactttcctggtctcttgctttatcataaaaatgccccaggtgttacataagtaaatatctaagatggattagctaaaactgtagctatggtgaactgtgtgaaattcagtgtaattttcagggattgttcaagtattttctttctttcttccttccttccttccttccttccttccttccttccttccttccttccttccttccttcctttctttctctctctctctttctttctttcttttttttttgacagagtctcgctctgttgcccaggttggagtgcagtggtgtgatctcagctcactgcagcctccacctcctgggttcaagagattctcctgactcaacctcccaaacagctgggattacaggtgcacgccaccatgcctggctaatttttggatttttgtagagatggggtttcatgatgtttgccaggctggtcttaaactcctgacctcaagtgatctgcctgccttggcctcccaaattgctgggattacaggcatgagccaccacgcctggcctgttcaagtattttctagcaatcttggcaaagcaattatgtttagcccacttggctatctttttaacatcctggagtttctaatcatttttaatgcctatctggggaaagatatttaatattaygttctctgttttcctatattgattgacaatagccatggatctttctgtttatcttcttttgtagatctaccacagccctataacaaaacagcaagaaagtgagtcacttaagtttttggtctactagcattataaactgccagctgtccgattcatagtaaataccatcattaatgaygtgtactactaacgcaagtytgaatatggatgcctttgtgtgaaataaaattcagccatatattttttaaatgtgtctggtaattgaactaaggtagacrcttggtgttagcttacatcgtgggtagagaaacatatccttcctgttctggaagcatgatagaaattgtatttttaggctaacatttcacatatgactttgctcatgctgaaagcagacaattcaaagggctaaatataagtattttgtgttataagagttaaaatgttaaacctcccctgaaaaaatgactctttccatttaagggtgactagaaatgagcaactaaaaacccttagctctctcaatgcagtccctttgcatggtcattaaatgtttaataggtgacacctgttgcagcaggatctaactcttttcctttgcttgaaacagtggagctaaatgaagtgggcttcaagtttgtcaggaagtgcatcaatattattgagaccaaaggtaagatctgaaccatagtcttggcattgtctgaatctcgtcactctgattttatcctgggcaatttctctgaagtagcgttttaggaatgaagactgtttataaagcttgtgtagtagatgcaagctagaaaayttcagaaaattctaaactagtggtatgcaagcatatttggataatttggattcctgcttttaaagagcttataagtttataaagtattctcaaacagtacctggcactccttaagcagtgtcatgatggttctatcctaaatgatcaagagttcaatttctgccacagtacatactggtatgaaaattgatggggcagagccaaactcagggagatgtggaatcagcattcttcctggttgccgatactccctggtttccttctgaggatatttagactgtgggcaagtgtggtatgtgaatcaagtctctttgttctttgaaatgtttttttagtctttcttggtgcaggaaatggccttttgtttcacagctgccttactccagccctctcgtgatttatatcactgcttagaagcaacttgagggttgatccttcctcctttttcaattgaatgaacttctttctaagatggcagcaccattctcagctttctgctgccgcccaaactaagcatatgcttctatttactatagagtttgttttcttctcttcagattaatgagggtttggtacactccaaatgaaaggatggataatttggagagatgctgtaggactattcccctgttacagggaaggctggagaacttggagtatgtagtgtgaccccttcctatctgaattgacyctagtgtaccaaggggagatgacaactctagctatacaagtgaaattaacctgattttttcctccactagggatcaagacagaagggttgtaccgcactgtgggcagcaatattcaggttcagaagctgctgaatgccttttttggtaacaattttactttgataattcttattgggagtactttatgtgttacaaagaaatgtgactggaagagaaaggagacactgctaaaatgtggtagaatagttgaaaaaagtattttctaaagtaaaacatacacatacttgcccaccctgggcagagtcaatcgtaccttgaaaatggctgttatctctccttcctcgtatcccattcactccagaaaccctcagcaatacaacttctttccctacatctcaactggaactgtgtggccaggcttagtcggtatcttcttaccaaatccagtgaatacttttgagtttgtgycttacttgatctccttgttgaccactttctcttttttgaaactttctccttacatgacttcgtgacttccataacacatcagcactcttctgattcttctcacatcttttttttttttttttgagacagggtctagctctgtcgcctaggctggagtgcagtggcatgatcatggctcactgcatcctcaacctgagcctcctgggtagctgggactataggcgtgtgccactacaccaggctgatttttaatttttttgtagtgatggggtctcactrtattgcctaggctggtcttgaacttctggccttcaatcatcctcttgcctttgcctcccaaagtgctgggattacaggcatgagccacaatgcctgacctcttctaacatcttataggattccttttcaataacttgctgaacctttatctttctgttttttacaccttgactgtgtgtttcctacagttctatctttgttcttggtttacttctttttttttaatatgtttttctattgattgatttttttttattctggttatggctcacatttttgtttcttaaaaaacatttcttgtaatctttattggttgctggatgttgtgacttactgaatgtcttgattttgttgatttcttttaaagaggactgaattttgttttgtgggcagttatttgtggatcaatttgatttatttgagtcttctttttaagctttgttgggccagatataaagtatccacccccaggtaaggttgttgagctctttttccacatagctcactcttctctggtactgtgccttgctagttatagctgcttcaaccttcctaaactttgatccttatctcttcagctgagcaagacttccatgctcagcttgagttcccactccatctgctgcaatctaaaaagtgcttttaagaagcaagctgtggagaaggtagcagttatcttgtttgtatccctcttctcagagtcatagtcctgttttgtctgttgctcaataactacatgcaggagtttcctatatactgtccagttttctagttgttacagcaggaaggcaagtctgataccagttagtccaccatggctggcagtggtattctctctttatgctttttactagcacctctatgctgacaactcacaaaatctctgttccagacatcatctgatgagttctaaatgcaaatattcacttgcccactgcacttgtgcttctcagtcatattaaggtcatggcacatatcagaatgatcatctttatatagcatgctcgggtaaatggacatcactgaggcaagaagccctaaaggctgagggagtcaatattggagtctctgcacaagctctctttacatagatggttcacaggtatctacctgcatttctctccctgcaaacctacccttcttcctttcgtgggtggcagtgaagcatcttgtaagctgagttttcacagtgtcagagaacaaattgagtgtggaaaactgcagtttggataaaatacatattttttggtccttactgtgatgcatagctaatctctcacaagcctgcaggtctgacaaccaaccctactcacatttgaggatgttacagcactcagtcatagcaggtgtggtttttgaattccagattacatcattagtacctcatcatctgttttcattaatcaccttacattcttgacttttaaaaatttggattgcttattcctggtcaatttgcaacccatctcattagctaaggacactttttcatatgtaaatcagctgacatcgtggtccagcatattgaatctctgaaaaattattgaactcagatatttattcagataactattgaactattgaaaattctgtttccagtatcactcttatatctgttgtataataagctaaaaaatgccatgccaggcatcccactgattctcttatgggctttaataggactgaagtggctccttcaaatcacacacggcagtagaatttgattcaagtattaaggaaagtggtagagttggtgtatttcatttattcaaaaccatcctccaaatattaactctcataggaatatctaaaatatagaccaggaagttctagatataaatattgatagatgcaatataaaactgttaacttccttatttgtatatgaaagtggcaaccccgatccctgccccaaatgtatgaaactccagatgtggtgatgatcctcattcatttattcattgagcaaatatttgtgtgcctacccgggcatcaatcattgtgtttagggcagtggattgaaaagtgaacatattccctgtgttttccacctttgtggggcttacattctactgggaaactgtctctcagttacctttcaatgtctagttatgtggggagaccttccttctaagtttatttcatgtgatgtcctctggcgtgtctcactgggatcctcaaagctgtcttgcttcttttcaccctttcctgatctagtctcataccactaggggcttgttgccttggctgcatgtggacccatcatgatttatcctggagggtgaacatccattgccttttggttacgtaacatctctccctctttttttttttcttatgtctcatgctctgtgctagtcaaaaggatacttcttgttatttttttttacctaaacaaccctcagacttctttccctatgacatctcctataacttgtaactgtaggctttcttctatcgtttactaaagccttttcttcttcccctagacaaaagtttgtctttttgggaaataaaatatatcacagagtataaagtcaaaggcaatacattcataatcaatagttattttcaatcacgctgttggttggttggtcacattccttgcctacaccagatttttgtatgatgctttatgttaataggttttatgtgaggattagaatcttcactggtgctggatccattgtaagccaccttggcacagagaagccaatctgattatctcagggacaacttggaacctcgtgtaagagttctgtttcagaaggggaacatcacacactggggcctgttgtggggttgggggaggtgggagggatagcattaggagatatacctaatgtaaatgatgagttaatgggtgcagcacaccaagatggcacatgtatacatatgtaacaaacctgcacgttgtgcacatgtaccctagaacttaaagtataaaaaaaaaattaaaaaaaagtttaaatcataaaaaaagagttctgtttctctttcctttatcaagctataactatcttattaatgaaaatgycccccattgtcrttatagtcttaataatcatgttgtgctccagagactcttaagtatttcacaatggagcagatgggtgagatggggcatggacagcaatgagactggttgtatcagcaggggctcttgatagagttgagcctggttggcagccataaacaggaaagtgttgttctcacaatccccttaccatgccagaggcctatggatctaaacagaagaggacctgctgtaacgagtgaagtaacaagtcacttgtaagatgttatttatgttattttcatttcctgtttagatatttaaatttcttatttcatcattatggcattagaataagatacgtggacttctcagaaactaagtggaatacctaatatatatagacagataatagagtaggaatatgcatacagtcatttttccattttcataattaatgtgaattattcagcatctggagacttaactttagcattaaattcacatatattcggacaaatagataataaatacattaatcagaaatactttcaagttatgtgacctctttgtttgaatgagaaattcagagtcccctagcaaataaaacaaaaatataccacactccacttcaggagttgcagaacttgaactctatatgttaatctttaaagcaactgtatatgttaaccgtttttctgatactgtcgtatgatgtgatctttagctttccatacatatcaagatactttattcataaagccagatccttgtatatgtgtgtatatgtatacatgtatgtcataaatagattttatataggttcattaatcattactatacttactactttaaatacattgattattctcaaatcatgcttgctttgaaatagtaccactagagtttgaagtaatttatcaatggatatttactgttaccctttccaaattatttcctatttgcatttgactatgaaactgagttcaaaaacttttagaaataaagtttgtgatatgaatatttgttccttttctattattttctcaatatgtgaataattgatagcaaattcatctttagttctcacctgacataatgccatttcctagcattcttgtaagtatgtaaacagtaggataggaatttttctcttaaaggtattttaacttagcaaaaataatttcagttgttgacatatgaatctagcaatgctgttatcccacctgcttcctgctgcagggtttctgacttggggagagtctttcagctatgtcaccatgaatgaagatccaggggattgtttgtattagtttcctagtgctgctgtagtaaattatcacaaatttaatggcttaaaacaatacatatttggctgggcacggtggctcacacctgtaatccccgcactttgggaggccaaggcgggcggatcacgaggtcaggagatcgagaccatcctggctaacatggtgaaaccccatctctactaaaaatacaaaaaattagccgggtgtggtggcgggcacctgtagtcccagctaatcgggaggctgaggcaggagaatggcgtraacctgggaggcagagcttgcagtgagctgagatggcaccactgcactccagcctgggcgacagagcaagactccacctcaaacaagcaaacaaacaaacaaacaaacaaaaaaccaatacgaatktatcctcttatagttctggaggtcagtagcctaaaatcattcttctggagctaaaatcaaggtgtcagcaaggctactttttttttttttttggagaagacagtctgttcccttaccttttcagcttctaraactttccttgtctcatggtccactttaacaacaccaggcagagtccctctcatgctgccatcactctggttctttctcttctgccttcctcttctgctttaaaggacccttgtgattacattcattccacccagatcatcagaataatcttcctatctcaaggtcatctgattagtgaccttaaacctatctgtaaccttaattctcctttggcatgtgacttaacatattcccaggttcctgatattagtatgtggacacctttgggaaccagaaatctgcctactacatacactattccattcagagttttaggacactccctctgatgctgttaagtggaccccgaggtcattcttgattcttcctttttggaatctgtggtaagacctttaggcagtggttatcttattgacttatgactcattgtgacgttctcacttacttcctcaaaaggagcagaaataaattcctttcattggcatatgacatctgttagggagtgaatgtttgtacttcctcccccatttatatgttgaaagtgactccccagtattggtattggttttggaggtggggcctttgtggagtaatttgggttgaataagatcataaggatggggccttcatgaatgggataaatacccttataagaaggtgccagagggctagcttactctctttacaccatatgaagatgtaacctggaaaaggtccctcatcagaacccaaccatactggcacccttatcttagactttcagcttctagagctgtgacaaataaatttctgttgtttataagccactcagtctctggtaatttgttatagtagcctgaaatgactaagataccatgttttccaagatgtctcagctctttgccagccagagtatcatttacacttttctctggagaaacttgttctgtactcagtctgttcactttttttcctatggcacttctttttgccactagcttttttttttttttactgtaatattgtcaaacatgctgtatcccagagccagtttcaggtgatctgcctgaaatggattgtggacccagagcaaccaatttaccctcttgatttctgttggtaatactaggatccccagagcccccattttgagccaggttaggcagatgaactatgccctgagcatctcttatgtcctgcagtgttcattctttcattcattcaacatagtaatcttgagtacctcctaagtgccagatattgtatcaagtggtagggatgtaacagtgaagaatggggaaagaaatcaccagcctcctgcaacttagtgtctagcagcagctatagttcatagatacagtcacatatttttctcccaaaataaactctggaatatcccagatttgggattctgttgatcctcactggcagcataaggacatgaagcagtataggcaactggaaaagagaaaccatagtcttccccttggaaaaaagcagcctatttcttaaaccaagatctttcaccatcttaatgtaaagcatataaggagaatatattaactttgggagactgtaacagttttcctttttctgatgtgtaatgtataccttatttcatctgcttgaactccattggctttcaattttttccaggtcttattgtttatcttctgccttgcctcatgatcccctttctccttttctttagccttgtcttacagctctctctctcattcactgattcacacaacatttattcactgcatacgctagtgtttagggctactgcttacctccctttctctttttttttctcttattcttcacatatctcctttgcctcctattctgacatgcttatactatgactagcaacccgctttcataaaatcttttctatgagcatacattggaacccttctagatacaagtagccagacaaggtgatcataaatgaaagactagtcttccctatatcaaatgtagctgtcatctgggaaaactgcatttacaaaatgcccaggtgggtagtacatgctctgacatttctctgtccatgtttctttactagatgcctggatctctaggaatctggtattcagcatagtggatgacacgtaggaaatatttgtggaattaatgaatactttttgtgatgcatgtctcttcctagagaatgtttgtttttctcaaaaacatgagccattccatacatggttgtattttgttatgctactgcacagagtttctgttgtatgtagtttcacaaaatatagcttttgttaatctctgcagatagtattaggaccaccaagttatctgaactgacatgtaattaatatttgcaaataacgataataagcagcaaatcagtaggattttcccatgggaagccatatttctcaaagatttctacatcctagtcagaggtgattcttcatttaaactgtgtagatgataatgggcaaagggaaattgtagcttcttttctctgttggagggcatgttttatttcttcttgttgttgccttcatcttttccccagtgcttcctgtgttgaccagatgatcacatccagctttaaaaccattcatggggatagtggctcaagccggtaatcccagcactttgggagaccgagacgggcagatcacttgaggtcaggagttcaagaccagcctggccaacatggtgaaaccccatctctactaaaaatacaaaattagccaggcatggtggtgggcgcctgtaatcccagctactctggaggctgaggcaggagaatcgcttgaacctgggaggcggaggttgcagtgagccaagatcatgccattgcactccagcctgggcaacaacagtaagactctctcaaaacaaaacaaaacaaatcaaaacaaaaacatttgtatctgaatacagtgttgatccatcttcccaccccttccttttttttttttttcttttgagacggagtctcgctctgtcacccaggccggagtgcagtgacgtgatctcagctcaccacagcctccgcctcctgggtttaagcgattctcctgcctcagcctcccaagcagctgggattacaagcatgtgccaccacacctggctaatttttgtatttttagtagagacagggtttcaccatgttggccaggctggtctcgaactcttgacctcaggtgatctgccagcctcggcctcccaaagtgctgggattacaggcatgagccacagcgcccggccccattcctctttttgactcattgccttttattttttttattactattatactttaagttttagggtacatgtgcacaacgtgcaggtttgttacatatgtatacatgtgccatgttggtgtgctgcacccattaacttgtcatttagcattaggtatatcttctgatgctatccctcccccctccgactcattgccttttaaagcatgctgtggtctccctctagtggagaaattgccatttcagaaagaaaaaaattcacagcctagagtcaggttatatttgttatgcctttatatttgaacaccttgtaaattgctgcttatcagtcaattttctgtttaggtgttgtagagtaamaaacaatttttcttcaactctcgtaagttcttagtcagaacatacccttgtaacaaaagacaagattagtaggagaaaacaagctaattaatacgtatatttcatgcatacatgggggatacccaggaaatgagtaattctcaaagaggtagctttaaatttcaggttatagatcaccttcaacaaagaatagtaattttttaattgtattttttttaaagatgtgacaagacaaagtaaaaggactttgaatctctagtggcagcaacatctgggaagccaaataaatgagagatgacagctagttagtaaggcttgtttatataaattcctctgctaccatttctaggccaataagtgtctaaagttgtctttagtggttaacctttttaacctttgttctccctggtagaaaggggtgttgggttgggataccttcgtctttgtaaatctatgttctgcttttaggcaaatagagggagggcagagagctttcctgtacctgctgcttcttaattttcttcaggtcaacaattctttgtattttggggtggcatattatgaccttccatagtattgtatcttctgaagccaaacctcatcttactcaaaacagttaatcacctcctcttctctaccagttatgtacttagtgtaatttatattattgtagatttcttgctgttatgtagttacttctgggtatatctgttctgcttcacacttcagcatcttgagtagaatttcttaatcttgattgacaatcctatccagaatttccagaatgtttagtttaatggagtgttattatgggcctttgtattttccatgtccctctgaaattcctggaaatgtctgaaatttggaacagatactgttgtcagcaagttacctgaatggatatgtaaaaagcaggggtggcagagcttcttgggcagagcctctgttttttctttttctttttatcttttgacagagtctcactctgttgcccaggctggagtgcagtgacacaatcttggctcattgcaacctctgactcccgggttcaagcgatccttgtgcctcaacctccagagtagctgggactacaggcacccgccaccaggcctggataatttttgtattttttggtagaaacagggttttaccatgctggccaggctggtctggaactcctaacctcaagtgatccgcccatcttggcctcccaaagtgctgggattacaggcgtgagccactgcgcccggccagaccctctgttttcaacaacttcagtatttccatggagttccctaggcccattcattatcttttcacagcctcagcttggtgctcttatctctgggtaccttttagacattaacaacccatacctcttagatttctgaaaaggccaaaggaagatcttgtagttccacttctttgtttcttatgagtctttcttctccctccttccctcccttcctcccttcccctctctctttctctctgtctctctctcattatcctcttactcttcagagtcttcctgtcctgagaggcctttattccccagcagttcattatccaaggaccatgcatgttcctgagaggaacatgggtaggaccccctcagtgggtattggttgtttcaactaccccctagtggagaaactaccatcataggaaaaaaaaaaaaaaaaaaaaaaaactacagagcttctatgtcagtcccaagattttatcaaattgtaattatttgtacactcccagtctgttcctcactccggtgcctaaggtgtagccattgttctatgtccatatgtacccaccagtcgtccgggagatcctaccactatcaagccaactgttgagtttgatagttaatttgccttctgcagagatgaaatacttgctttaatggctttggccatctagcctctggccagagttctagacataggatttgtgaacaccatggacttgaactcaggatttagatgtaagtggaaagtgacactaagataaagatggaatagggttgccaaatttatttattatgtatttatttattgatggagtctygctctgttgcccaggctggagtgcagtggcgcaatcttagctcactgcaacctctgcctcccaggttcaagcaattctcctgcctcaacctcccaagtagctgtgattatgggcacctggccccatgcccggctaattttttttaaatttttagtagagacagtgtttcaccatgttggccgggctggtctcaaagtcctgacctcaagtgatccacctgcctcggcctcttaaagtgctcggattacaggcgtgaaccaccattcctggcctagggatgccaaatttagcaggtgaaaaacctagggttgccagatttagcaggtgaaaaacgaaatacagaatgctcagttaaaattcaaattcagataaacagatttaggacacacttacactaagaaaaaaatagccattgtttataagcaattcatatttaactggaaattctgaattttatctggcaattttaatctggttccagattttgcaggatcttatcagtcatgtgaaggattttagtccttagtatgtataatagcaatgagaaacggcagagggattttaaacagggaatttgtatcttgtcaaataatgattcgaacaggccaccaaaatagtcttctgatcaaacaaattcaggcttgttacttacagcactaaggaaggccactaccattgcaatattgtcttaataacctttcagaaggggaaaatcagatgtggagggattcatatttataaggtttttggagtctggtttgtggcaggtctttcattgttggggcctgaatgattgagattggacaaacttcatgatataattttatgtcaaaattatatcaaagtttgtgatatatttttttcaatagtttttatgtaaaactttgaagagtatcagtcatttgataaacccatttgagagatgttctgagaagtggctgtttactcagatgaggactgcttgataagcattgttcagaaaaattgatttccaggaagtttctgaaacaaagctattcacaacttcctcttactggaagaaatttcctggaatagtagttgaagttaatgcaaagtattaaatagaaacgtcatattaatgtgggtggtaaactgtatgcctgcctttggttccggttctctttagcctctgctggttattcttcagtcttagatgagcttcacaaactgtatgttcatggcacacttagtttcagtctaagtaatttgccagggtatctgtagtccaagagatgtacctaacgtctccatttattaagtaattaagttgaaccaacttagtaagtttgcacattcacacaacttagtagccatatcattcttattgaaagtatttttatcttgtcattaaatgaccctataatctttttaatgctgaatatgtttcagaaacattaatattaaaaataatgattttaataaaaaagatacctgctcatcctaaaaaattttaagcattaaaatgtgttcagaaagcgtagtgaaaattcaccccaaatcctactcaccaggaatgcttattttttaacttggtggcctttattctaagtatatttctatgagtatacacataaactattttagaaaatttagatcataattgatgaagaaagaattatccatgatacttggatatagtaaggtagacattttttcaacagagactactgcattggggttttatagtaggaagagagattgagctcaactccaaatacaaggaaatttatatccaaggagcaggatgggtgttatggcttgaatatcccctcccaaactgaagcgtatctgccactataatgttatcaagaggtggagcctttaagaggtgattaagtcatgagggctgtattttcatgagaatgggttagttactgtgagactgggctcctgataaaacaataagtctggcctaattttcactctgtcttgaccaccaacttgcccagctgtcatgggatgatgaacataaagaccctcaccagatgacaatgtcatgctcttggatttcttagcctccaaaatcatgagccaataaactggttcataaattacccagtctgtggtattgttatagcagcagaaaattgactaagacagtgggaagcagtggatggagaaatgctaagaggaaacatcaggagtaaggagagattgtgagtaaactgacttgataggatacttgctcaaagccggatacagtgatcagatacctagagtaggagattttcactaaactgactcagcaggattcttactgaaaccagactatgtgggccaaagacaggacccaaggttgggacctaatcagaaagagaattcagaggaatctgactcaagtttgctcaaggagagaatctttttcataatataaatgttttatattctcagcagtgtcagagaactggacaaagatatacattattgcctctctcagagaataatattctgtaaggactaataaaagaaacatagaactaaggtagaatcataaaaattggaaaggaggaggcaatatccatatgttagagaggctatacttgttagaaaaatcaagagcttcacctaaaaaattcctgagaaggagaatttagtgagatagttgattgaaatttctttcctatatacaacaataaattgtataataaaatggaagaaaaattccctttgaagaaattaaccaaacataaaatacctaggtctaaactgagcaggaaatgtgtaacatctatatggagaaaagcttggaatgctaaaagggaactagagagaaggcttgaatatatacaaacacagagccactttttgaattgggatatccagtgtggtaaatatgtcagtttcttactgtataaatataatgcagtcacgatgaaaaatatctggaaattaatttgtttggaactaaacaatctgcttctgatgtttatatgtatgtatcaccttgagccgagagtcaggaaatatttgaaatagaagaaccatacctagaagtaagatatataagaaagttgcaattgacaaaaacaatttggaatttgtacatgcttagacagtgaaaacagtatagtgaattcaaaagtagacctgggctgggcgcagtggctcacacctgtaatcccagcactttgggaggccgaggtgggtggatcacctgaggtcaggagtttgagaccagcctgatcaacatggtgaagctctgtctctattaaaaatacaaaaattaactggatgtggtggtgcgcacctgtaatctcagctactagggaggctgaggcacaagaattgcttgaacccaggaggcggagcttgcagtgatccaaggtcacgccactgcacttcagcccaggtggtagagagagattacgtctcaaaaaaaccacaaaagtagattcaaatatatgtggcaatttagcgtatgataaaggtagaatttcagatcatttggaatgaagtgtttaattcagtttatagtgttgataactggccatacatttggggaggtatacatttcaccttataaaaccctttgcacaatttgaattttgaactcttcaacaaagagctagtttaaaaaataaattaaagggttgatatgattaggaaatttttaaatgtatatttgtctgtctctgtcaattcaccatgttcacagactaggcaaaggaataaaaatgctgccataggaaaacaaaacctacctaatatagtgtgtaatggggtattttgacatggatatatcagagatcaataaaattctcccaaatgtaagtattaatgttaaaatctccaaacttttctaattgagataatacaaaataacatatacactgccagtcaattggcatawcattcctcttaaaatataggtctattctatgagcagctgatatggtttgtatctgtgtccctgcccaaatctcatgttgaatcgtaatctccaatgttggaggtggrgcctagtaggagatgattagatcatgggggtgaatttctygtgaatggtttagcctcatccacttggtgctgttccagtgataatgagtcagttcttgtgacatctggctgttaaaagtgtgtagcacctccccactctctctcttcctcccattctggccacatgaagtgtcaactcccccttcatcttctaccatgatgtaagcttcctgaggcctccccagaaaccgagcagatgttagcaccatgcttcctgtatagcctgcrgaaccgtgagccaattaaacctcttttttttaattaaattatgcaatctcaggtatttctttataataatgcaagaataatacagcaactgaccagattatctagctgtgactgtatattcttaaaatttcatatagggttaatcaagcccccatttagggagtatttttgttacttttatttttaattgtggtaaaatatacatgacaaaatttaccatcttaactatttttaagtttattgttcattaatgttcattgtattcacattattttgcaacaaatatgcagagctcttttaattttgggaaactgaaactctgtacaacattaacaactttccatcctcctctctccctagttcttggaaaccaacattctatttcctgtctctatgtgtttgactactctaagtgcctcatataaatgaaatcaaactgtatttgtctttgcgtgactggcttatttcacttggtgtaatatcctctagattcatccatgttgtagaatgttttagaatttccttcattttaaaggccgaataatattccactgtgtgtgtctatgtatgtatgcatatatatatatatatatgtatatataaaaacaatatgtattgttcattcattcttctgtggatagacacttgggctgcttctaccttttgtccactatgaacaatactgctgtaaacatggatatacaaatatcccttcaagaagctgcttttacttctttaacccatttatgcctagtgttccattattggaatgctaagcatgtaggagttatttatatcttactactcaaggtcatcatcaaggtctgattgcaaaaattcaaaaaaattgcaactgccagcataaatgggtttaagtatatgtcgagaaagtagaattgctgggttatatagtaattctgtttctagttttttaggaaccaccatactatgttgcatagtggctttaccatttcacattgccaccarcagtgcacaagggttccagtttttccacatcctcaccaacactttgaattttccttatttatttatttttgatatgtagccattctaatgggtgtgaggtggtatctcattgtggttttgatttgcattttccatgtgacaatgttgaatatcttttcatgtgctcacgggctatttatttcttttaaggaatgtctattcaaattctttgctcattttagaatcagtttgtttattttttgttgagatttaggaggtctttatatattttcagtattaacccctcatctctaacacacacacgatttacagatattttctcccatttgatgcacagaagtctttaattttgttgtagcccaatttatctattttttccttttctttcttgtgcatttcgtggcatattcaaaaaatttttgctaaataaaatgtcatacagttttcccctatgttttcttctaaaagtttcaagcttttgctttcatttgggtctttgatccatttacagttaatttttgatatggtataaggtcaggatccaacttaattcttttgtatgtagatatccagtttctccagcatcatttgtttcaaagactgtcctttacacattagatggtcttggtatctttgttgaaaattattgcaccatatatgttagggattctttctgtgctctctgttctattccaccggactgcaggtctgtctttatgccagtaccacattgttttgagtacgattgctttgtcaaagacaagatgttccagaccattagggaatgtctttatttagactgttgcaatagggagaaccttcattattgaggaatatttcccaggagaaggagatttaaggctttttagaggcagattacaasagagtcatcatgaggcttacatgagtcatgaggtaggatggagatgtgtcctatatgcaaagacagggtagacttttgaagttacttgtttctgaggacacaaaaagatcggggaggtgtggtatttctaaaccattgatgcttccttggagcacagggttcaagtgaagttcatcatggtcactacagtttagtaaactttttttgtctggactttgaatagacaatgatttttttttcctttttcgaagatttaaataggaaaaaaaattcttgtttggtttaagtagttacatttcttttccagcaactctacaatttatttttcccaccacacatattataaatataaccaattatgtactcaaatttctctctgcctttcaaaataatactttgtgactcagaagacattttaaaaaatatacttaaaggaacataattattaggtatgcagtataaatttgctcctaaaactttttccatttttatagttgaaacaatcttacacataatgatgcttatatctactctctgtagggaagaatttgtaattctttcacacaattctgaatattttacaggttttgggggactttttttcttttttttttgagacagagtctcgctctgtcgctaggctggagtgcaatggtgcgacctcggctcactgcaacctccgcctcccaggttccagcaattctcctgcctcagcctcctgagtagctgagattacaggcacccatcaccacgcccagctaatttttgtatttttagtagagatagggtttcatcatgttggccaggctggtcttgaactcctgacctcaggtgattcacctgccttgacctcccaaagtgctgggattacaggtgtgagccactgtgcccggccatttttttggattttaaactaaccattccaggctgggctgagcgattcatacctgtaatcccagcactttaggaggctgaggtgggtggattgcttgagcccaggagttcaagaccagtttgggcaatgtagggagaccctgtctctacaaaatataaaaaaattagctgagtgtggtggcttgggcttatagtcccaactgcctgggaggctgaggtgggaggattgcttatgcacgggaggtcgaggctgcagtaagctgcgattgcaccactgcactccagcctgggtgatagagtgagactctgtctcaaaaaaaaaaaaaaaaaaaagaataagttaataaactaaacattcctgggaagactggccttaaattctcatcctaaatattagagttttaattttttcctacttttgaattattgaaacttcttttttactatcaagaagggctgactgtattttcctattgaaaacatatttgctaactctgcagtcatattcttttgttacagccctctcatttaaatttttcttgaattttgcctcttgttataaagggtggctttgtgttgatctttttcaggtttgtggttttctttcagagcaaagtaaggcagcttatttcttttgggcatttttgccccattttttaattgaagtacaattaatacacagtgaaatgtaaagatcttaactgtgcattttaagggaaacttcaagacatttgttcattgattcacaaaagtgcagaaatctcagcgatttttcaaaaaatgaactaacccatgtaaccggcactcagatcattcttggtaccccaaaagtccttttttgacacttcccatcacaatcccaccaaaggttaacctttatcaagacttttaacaggatagattagtttttttatatagaaataaaattacactctatataaatagtatatgctctcctgttttggcttctttcacttaacattaagtgaaattcattaagtgagattcatccatgccatggtggttatagtgtkgttatagttcactcattctcaatgctgtacaatattctgagtcattaatgtaccatatttgttcattttgtgttgatggatattagggttgtatttttttttttctaatttggtcttgcagtctgtctctggaaagtagctataaactttattccccaacaggttccaagggatttggttgtggatgtttacaatgtgcctttcacaggatacttctttatcctggcagatggtatgatgcctaattgtctgaggtgtgaacaagtgtctttctcaccagaaattattttatactggcagatgcttgtggctattatcagacctgtgtcccgtttattcctgtcaagatagccactgtgtaggagaggcttaactgggagaaaagttaagtctgaatgtatcagtctggggagatataggtgtgtcagttgggtaatactatacagaggagacagcacaacaaaaacagrtgaaataatgtagacagtttattattcacaggttgatgggaaaacaggggtaccgacaggggctgttggaaatactgtagaggaaatgtgctcaaccagcaggtggagagataatgagttgaggcctttattgggtccagtatgttaccaaagcaggttacctctgatgagttctcattagtgggtgtagagcaagcaggcatgagttatactggatgaacgtctcgatggggaggttgtcaccgtggcatatctgcacagtccatgcatggtgtaagggatcaatgggccaagtcaattaggttatatctatgtgttccatagggaggtggtcatcaggaggcaattgtctaagatacatatctggagggaacacattaaggaattgggaggagacagagaactggaaactgtcaaggataatatggagcctggctcggtgtgagaaagttaaacttatattcagaacggatacygagacagcataaaattgtaagaattcactatgagtgttgtttccacttggggttactgcaaatataactgctatgagcattcttgtacctgtctttaggtgaacatatgtattcaattcttttgcagatatatmtaggattgagattgctggatcaaggtgtatatgtatatttgggtttctaaaaagctttctttgggtaatttttttttacctattataaaatcactgatttgaagtgtgcaattcagtaatttttaccaactttaatgagtgttatacccatatgataaatctgtcatagaagatttttatgcccccaataagatccctcagctacatttacagttatatcctgtcttatcccagctccaagccaaagtaatcttcctatctttctatctccacaaatttgccttttctggacatttcataaaaatggaattatgatccatacctatgtggtatcttgtgttcaccttctttcacttagcataattttcagaaatcatccatgatatacccatgcatcaggaattcattcctttttattgccaaataatattctacagcttgtctttcccttcatgagttgctgagcatttgggttatttgtagttttgtctcatttgaataataaatcatcatgaatacttttgttcaagtctttgtatgaacatatatttttacttctcttgggtatgtacctgggaataaaatttctggcttgtatattaaatttatgtttagctttgtgagaaactgaaaaactgttccaaaatgactgcactattttacattccygccagtaatgcatgaggagagggttcctgtttctacacatcctcaccaacgttcattattttctgtcttatatttattatagctatttacgagggtctgaaatgataatgtgttgtggttataatttgcatttcctttatgactaatggtcttggacatttttaatgtactcattagccagatatatatatcttcttttatgaaatgtctgttcatatcttttgtccactttttgattggactgtttattttctgttttttcttttcttttttttttatttttgagatagagttttgctcttgctgcccaggctggagtgcagtggtgtgatcttggctcactgcagcctccacctcccgggttcaagtgattctcctgcctcagcctcccaagtagctgagatcacaggcatgcaccaccagccctggctaagttttgtatttttagtagagacagggtttcaccatgttggccaggctagtcttgaattcttgacctcaagtgatctgcccgcctcagcctcccaaagtgctgggattacaggcgttagccaccgggcccagccatatcttcttactgtagacttctaaagattctttctaaattctggtttgaagttctttatcagataagtgttttccaaatattgtctcacagtctgtaactgaccttttcattttctctttctttctttttttaaaaatcaatatatatgttttcatttttttaaattttttttaaaattattaatttttgtgtgtacatagtaggtatatatatttatgagttacatgagatcttttcatacaggcatgcaatgcataataatcacatcatgggaaatagggtatccatcacctcaagcatttatcctttgtgttataaacagtccagttatattttttagttattttaaaatgtataattagattattactaactataatcaccctgttgtgctagcaaatactaagtctgttcattctttctaaccatatttttgtacctattaaccatctccactcccctgcttcttcccagactcttgtaaccatccttcaattctttttattttattttattattattatactttaagttttagggtacatgtgcacaatgtgcagtttagttacatatgtatacatgtgccatgctggtgtgctgcacccattaactcgtcatttagcattaggtatatctcctaaagctatccctcccccctccccccaccccacaacagtccccagagtgtgatgttccccttcctgtgtccatgtgttctcattgttcagttcccacctatgagtgagaatatgcggtgtttggtttttttgttcttgcgatagtttactgagaatgatgatttccaatttcatacatgtccctacaaaggacatgaactcacattttttatggctgcatagtattccacggtgtatatgtgccacatttccttaatccagtctatcattgttggacatttgggttggttccaagtctttgctattgtgaataatgccgcaataaacatacgtgtgcatgtgtctttatagcagcataatttacagtcctttgggtatatacccagtaatgggatggctgggtcaaatggtatttctagttctagatccctgaggaatcgccacactgacttccacaagggttgaactagtttacagtcccaccaacagtgtaaaagtgttcctatttctccacatcctctccagcacctgttgtttcctgactttttaatgattgccattctaactggtgtgagatggtatctcattgtggttttgatttgcatttctctgatggccagtgatggtgagcattttttcatgtgttttttggctgcataaatgtcttcttttgagaagtgtctgttcgtgtccttcgcccactttttgatagggttgtttgtttttttcttgtaaatttgtttgagttcattgtagattctggatattagccctttgtcagatgagtaggttgtgaaaattttctcccattttgtaggttgcctgttcgctctgatggtagtttcttttgctgtgcagaagctctttagtttaattagatcccatttgtcaattttgtcttttgttgccattgcttttggtgttttagacatgaagtccttgcccatgcctatgtcctgaacggtaatgcctaggttttcttctagggtttttatggttttaggtctaacatgtaagtctttaatccatcttgaattaatttttgtataaggtgtaaggaagggatccagtttcagctttctacatatggctagccagttttcccagcaccatttattaaacggggaatcctttccccattgcttgtttttgtgaggtttgtcaaagatcagatagttgtagatatgcggcgttatttctgagggctctgttctgttccattggtctatatctctgttttggtaccagtaccatgctgttttggttactgtagccttgtagtatagtttgaagtcaygtagcgtgatgcctccagctttgttcttttggcttaggattgacttggcaatgcgggctcttttttggttccatatgaactttaaagtagttttttccaattctrtgaagaaagtcattggtagcttgatggggatggcattaaatctataaattaccttgggcagtatggccattttcacaatattgattcttcytacccatgagcatggaatgttcttccatttctttgtatcctattttatttcattgagcagtggtttgtagttctccttgaagagttccttcacgtcccttgtaagttggattcctaggtattttattctctttgaagcaattgtgaatgggaattcactcatgatttggctctctgtttgtctgttattggtgtataagaatgcttgtgatttttgcaagaaggaatggtaccagttcctccttgtacctctggtagaatttggctgtgaatccatctggtcctgcactctttttggttggtaaactattgattattgccacaatttcagagcctgttattggtctattcagagagtcaacttcttcctggtttagtcttgggtgggtgtatgtgtcgaggaatttatccatttcttctagattttctagtttatttgcgtagaggtgtttgtagtattctctgatggtagtttgtatttctgtgggattggtggtgatatcccctttatcattttttattgcatctatttgattcttctctcttttcttctttattagtcttgctagtggtctatcaattttgttgatcctttcaaaaaaccagctcctggattcgttaattttttgaagggttttctgtgtctctatttccttcagttctgctctgattttagttatttcttgccttctgctagcttttgaatgtgtttgctcttgcttttctagttcttttaattgtgatgttaaggtgtcaattttagatctttcctgctttctcttgtgggcatttagtgctataaatttacctctacacagtgctttgaatgtgtcccagagattctggtatgttgtgtctttgttctcgttggtttcaaagaacatctttatttctgccttcatttcattatgtacccagtagtcattcaggagtaggttgttcagtttccacgtagttgagtggttttgagtgagttttttaatcctgagttctagtttgattgcaccgtggtctgagagacagtttgttataatttctgatcttttacatttgctkaggagagctttatttccaactatgtgttcaattttggaataagggtggtgtggtgctgaaaaaaatgtatattctgttgatttggggtggagagttctgtagatgtctattaggtccgyttggtgcagagctgagttcaattcctgggtatccttgttaacgttctgtctcgttgatctgtctaatgttgacagtggggtggcatccttctattctttatgtccatgatttcagttgttttgagttttagatctcataaataacttgagaacatatgatgtttgtctttttgtgcctggcttattttccttaacgtaatgatctccagttccatccaggttgcagctaatgacagaatctcattctgaatcrtactccattgtgtataagtactacattttctttatccattcatctgttgatggatacttaagttgcttccaggatcttggctattgtgaacagtgctgcaacaaacatggatgggcagatatctcttcagtatacagatttcctttcttttgggtgtatatatatatatmcacacacacatatacacatatgtgtatatatacatatatacatgtgtatgcatayatatgtatacatgcatatatgtatgcatatatatgcatgcatgcgcgcatgtatacagatatgtatacatgtgtatatgtatacagatatacatatgtacatatatatacctgtacatacatatayacacatatacacacacacacacayatatatacacacatatatatccaacaatttgattgctggattatatggtaactcaattttgagattttttgtggaacctccaagttgttatctatggtggttgtactaatttacattcctaccaagagtgtacaaaggtttcctttttctccacatccttgccagcatttgttacttcctgtcttttacataaaagccattttaatgagataagatgatatctccttgtagttttgatttgcgtttatatgatgatcagtgacattaagcrccttttcatatacccatttgtcttcttttgagaaatgtctgttcattattagactttttttctacacagtagtttgagctccttatataccctgactattaatcccttgtcaaatgcatagtttgcagatattttctcccattctgtaggttgtctctttgctttgttgattgtttcctttgctgtgcagaagctttttaactttatgtgatcccatttgtccatttttgctttggttgcctgtgcttgtggaatgttactcaagaaatatttgcccagtccagtgtcctggagaatgtccccaatgttttcttttagtagttttatagtttgaggtcttagatttaagtctgtaatacattttaatttgatttaggcaagagatagggttctagtttcattcttctgcatatggatatccagttttcctagcaccatttgttggagagactgtcctttccccaatgtatgttcttgaaacctttatcaataatgagttcactgtagatgtatggatttgtttccaggttctcaattctgttccactgacctgtgtgtccgtttttacaccagcaccttgctattttggttactatagctgtgtagtataatttgaagtcaggtatatgattcttccagttttgttcttttagattaggtcttttttctgttcattttctcatttagttcttctttatttttaatttttttgagatggagttttgcttttgttgcccaggctggagtgcagtggtgcaattttggctcactgcaacctctgcctcccaggttcaagcgattcttctgcctcagcctcccgagttgctgggattacaggcgcccgccaccacgcccagctaatttctgtatttttattagagatggggtttcaccatgttggccaagatggtcttgaactcctgacctcaggttatccacccgcctcagcctcccaaagtgctgggattacaggcgtgagccaccgtgcctggccaatggcttatttttaggtgtgaaagttttgaattttgacaagacataatttattatttctttctagtattcactacacccttggtttcatatctaatgaatctttgcctaacccaacatctgaaagatttttaccaatatgttttcttgtaaaaatttaaatcttctaaccccttcatgtaggtgtttgatgcattttgagttaatgtgtgtatatggcatgcattgtggatctaaatgcatctttttgcagttgttcatgtgattatataaaacacaattcctcgagtaggcttcccttctccagtgaattgctttggcacctttgctagaattcaatgaacttataaatgtagtttttgaattttatcatactgatttatatgtctttccttatgcctggtttacaccatcttcataactaactctatataggcatacttcactttagtacacttagctttattctggcatacctcatttcatggcattttgcagatattgtgtttttaaacaattatttatataaattgaagcactgtggcgatgtactgagcaagtttcttggtgccattttttcaacagcatgtgcccacttcttatctctatgtcacatttttgtaaatcttggaatatttcaaactttacaatttttattatatctgttatggtgatctgtgatcattgatctttgatgttactattgtaattgctttagggtgccacaaaccacgctatataagatggtaaacttaatmtgtaaatgttgtgctgtgctctgccaatcagtagttccttatctctgtgcctctccttgggcctccctgttccctgagaacagcaatattgcagttatggcaacgaataactctaccatcatctcttagggtccaagtgagtcacacatctctcactttaaatgaaatgctaaaaatgattaagcttaatgaggaaggcatgtcgaaagctgagataggccaaaaactaagtctcttgtgcaaaatagtcaagttgtgaatgcaaatgagaaatccttgtaggaactgttttttgctaaaaagttaaaagtgctactccagtgaagacacaaatgataagaaagaacaacagccttatagttgacrtggggaaagtttgagtggtctggatagaaggtcaaaccarccacaacattcccttaaaccaaagtttaataaagagcagtactctaactcttcaattctttgaagcttcagaatggtgaggaagcctcagaagaaaaatttgaagctagcataggttgttggttcatgaagtttaaggaaagaagctgtctctataacataaaagggcaaagtgaagcagcaagtgctaatgtagatgcatgttgtctagaaggtgtagttagaaggtgtagctaagatcattgacaaaggcggctacagtaaaatacaacttttctatgtagatgaaacagctttctagtgaaagtcctatgtaggacttccatagctagagaggaggagaagtcaatgcctggcttcaaagggcagactgactcttttgttagtggctaatgcaacttgtgatgtaaagttaaagccagtgctcattgaccattctgcaaatcctagaccccttaggaattatgctaaagccactctgcctgtgctctataaatggaacagcaatgtctggatgaaaacacatctgtttacagcacgatttactgaatattttaagcccactcttgaaacctctgctactcagaaaaaaagattcctatcaaaacattactgctcatatgcaatgcacctagtcacccaagagctctgatggagatatataaggagattaacgttgttttcctgcctcctaaaacaacatccattctgtgtagctcatggatcaaagagtaattttgcctttaagtcttattaagaaatacattttgtaaggccatagctgccataaacagtgattcctctaatggatatgggcagagtatattgaaaacctggaaagggttcaccattgtagatgccattaagaacatttgtgattcatgggaacatgagcagttcaatgaattctattacactatgagtgcttttggctagattatctagctttttgaccttggacacattatttaatgtagagcctgatctccatctataaaatgggaatcacagtagtacccacctcatatgaccrttgtgaggattagatgacattttatatggaaaatgtctgcagtaaaccgtccataaatggaaggagttttttaaaaaatgttgttggtataatcaccattatgatctttatgattctatgttttaatttcattttataatttatcctgtgattttttttacctcagcatcaccctttataggatataaccacatttcttctcaatacctataccaacagcactaatcattaaagaaatgcaagccaaaaccacaatgagatacacgtcacacttatttgaatggctgttattaaatagacaaaagataacaagtgtttttgagagtgtggagaaacaggaaaccttctatacagttggtaggaaggtagattagtacagccactgtggaaaatagtatgaacatttctaaagaaattaaaaatagaatgaccatatgactcagcaatccctcttctggttatatacccaaaggaaatgaaatcagcacctcataatcatgtctgcattccgtttttgttgcattgttattcacattagtcaatatatggaaataaccagtgtctgttgacaaatgaatggataaattgtggtatayayacacacacacacacacacacacacacacagaatggattttcattcagccttaaaaaagaaagagatgtgccatttgcgacaacatggatgaacatcataatgatattagcccaaaagagaaagaaaaatactgcatgrtctcatttatatgtggaatttaaacaacaaaaaaaaattcagtggtttttgtgtaaattagtacaatagaagatccaaggtagagtactttaaattagcaagatatttctaactgtgcattttaagaaccatttttatttttcttcagtttggaactacaacctttagatatcaaaatgccctttgtaacttaatttttattcttttttatgagagaggtgcatgtttttcaagtacatttatctgttaacaaaaatagttggagttcgcraaagcctattatttaggcaaagtcttcctttgcaaagattcagactaaagtactagcaggttttaaataatacatgatttattatattttcttgtttttgaactgagacataaaatatcctttaacttaaaaatatgttttattatttaataataaaagaagttgtttcttcaagctaaatgcctggtaaatacattttattatgtgatcagcttgtccgtattctaaaataatagtttatgacttacatgagcctattttttcacttgattaagtaacataattagctgatttacaatataaaacatattcctaaaacccttttcagctttgaaatttcaaatgccactgtttccatataatgacatgtgaatttacattttagaaagcataatttaaaattatatacctctatatttttaaggttcttggcaatttaagtagaataatttccatagagagacaattcttccctcctactctgtatgtactctaatgttgtctacttctttcttctgttcctgcagtgttacttacgttttttatactatccagaggcttaggctgtttgcctttgakgacatggatatatattgctcagtcatacgctttcaaaaaataatctcttcatttagtttttttattattttattactattaatttataataaaatttggtttatatgaaggatcttaaataacatatataaggtataatcaataatataatgagtctataagaactcagcataaaaaacagaacattttcaatagcttgaaagcctcctgcataccccttcacataaccctcccagatcatattgctttcctgttctgatacagataaccagtatctggaatttagtatttaacattcctttacttgtttttctttttataggtttactatatgttttagtttgtgctaagtgaaatggccactactcaaccatttttggtctataattataggaattttatatggttcagctgagtacacacatacacatgcacactcccaaacacactggcctgttgttgaacattatataagtgatgttacagtgtagtattcccactactttctttttttactcaacattatcacctagagattcattcatgttgctgtgcaaagctctatttaataaatttgtgctgccatatagtattccgttatatgaatattccccaattactttataaattttcttgtttatggacgtttattgctgctttcaggtttttggtgttttgacttttataagtaatgctgccatacttcttttttcacatatcccaacaagtgtctctaggtaggtatataaagtagtgaaattgcagagacctagggcatatacatattcaatttttataaacaatactaattttccaaagtaattgaccaaaagtatacttttaccatcagtgtaaagattgttcctttgtactaaatctttatcatttttttattttctgttttttaatatttgctcctctggtggatattatgtggtatttaattgacctttgactttgcatggtatctaattgaggttctaattaaggttctaattattaatgaagtaatgaagtggaatatttttaaatacatttattatccattcatttttcctccattttgaatgacctgctcatgtcgtattctggttttggtattagggtaatatcggcttcatagaatgaattgggaagtgttctttcctttcaattgttggaagtttgtgaaggattcatattaattcttgaagtttttggtagacttcaccaaattaataatttttaattagtaatttaatctctttactcattgcaggcctattcagattttctatatctttttgagtctattttcttagctggcatctttttaggaatttgtccatattatctaggttatctaattgagtgtcatacagttggtatatctttttgatcttctgtaaggttggtagtaatgttctctttttcgttcctgattttactaatttgagtcttctcttttttttctcccggtcactgtagccaaagatttgtcaattttgttgaactgtcatatgtttttcatatttcgttaattatgtttattttttgattctctatttcattaattttattatttcctttattcttcttgctgttaggtttactttgctattttcccagggccttaaggtaagaagttaggtgattgatttgagatatttcttcttttgtaatataggcatttacagctttaaatttccctgaaacacactgcttttacctgtatcacagaagtattggtatgttttcatctctattcatctgaaaatattttctaattttcattgtaatattatttgatgtgttggttttttaggagtatattgtttaatgttcacatttgtgaattttcaaaatttctttgttattgatttctaatttattccatgtgctcagagaacatactttgtattattcctgtcctttaaaattattaatgcttgttttatgacctggcttatggtatattctggaatatgttcaatgtgtatttgaggagaatgtgtgttctgctttttttgaatggcatgttctatagataatctgttatgtatacttagtttataggcctattaatgtcttctatttcctattcatcttctgcctagttgttctattcatcatttaaagtggggtattgaagtgtgcaactattattgtggaattatttatttttcccttcaattctgtcagttttgctttaatgtactttggtactctgttgttagttgtatgtgtgtttatactttatatgtcttctggatggattgaccttattattattattaaatattcctctttgtttctactaatattttttggtttgaagtccatttttttctatattggcattgccactccagctttcttatgcttgctatttgtataatatatgtctcccttttacatttaacataattatatgtttaaatctaacatgtgtttgctatagaaagcatacaactggatcttgtttttttttttaattttccagtctgaaaatatgtgccttttgattaatttgtataatcaattaatagttaatgtcattattggcatgggtgcacttatgtctgtctctttgttttctatatgcataatcttttctgttcctctgttcctctcactggtttcgtttgtattaaatggaaattttttgttgtaacattttaatcctttaatggtattttcttattttactcgttttcttaattgttgctctaggacttaacaatttatgtgagaacttaccagaatttctttcagatgttaaattttcctgagctgtagctatttcttctcccttttttggtgctgttattacacatatgacgtctaaatacgttatgtaactccaacaatacattattacaattattacttttgatagtttttttgtcttttactgaacctgagagaggaatggagagcaagtatataattttaaaaacttgttgattaaacttctcatttactatttctaatgttcttcatttcttggtatcatacccagctgttatccctgagtaattgttgaccgattgctacattgactttgacagtttcctgggacataatctgctccacagtgatacatttatttttggacccctttgcaggaatagtctttgaggccagtgtttcatgcttgctccagccataggtgggcttttctcagctatgtgtttgtttctcacttgtaaactggctggcctatgatttaaagagctcattaaactactaacctcctcataattgcttaccacaaaaatctacactgttttcagggactcccttaggctcaaacttccttacactctgttttaaataaaaatcagttcccttctagagagccttggacctgttttttaatagcctgcctctccccgtgggcagaacatatgcactaaagctttgggaggtaggggtggggacagtgtcatccttctctcagaatggcatccatgctctaggaagaggacattgggtaaaaacagtaacccgtggtcttcttggcttccccctccctgcatggaacctctgccttgtgaattagctggagcagggctgattggggcctagtattctcagattacttttcctagggtagagcttccgtcctgtgactggtcacttgattgaggaaaggagctccagacctctataacatgattgcctccatagagcttttgtaacctagagctgagggtaggatgaaaaattccaatcacctgctagagggaaaagtgcatgcccttggtttttggctgccccagccataagcaaaactttatcctgctaagccatccaggggaagggggagggagcaggttgtggctcagatgccacagactcttgctcttcttactgagatttcatagattttactaaaaatgtttctccatttgccgtataccatcaggacagattctagagactctaaatggttatttttcaaacaaataattttccccagttgtggttgttttgctgggagctcctcatgttgccattgcacatgtatctcttctaacgtggagaaacatttgacatacaaaaagtatactgtaataataacagtctaaccaaactttccagacaacagcaggattttcctccaacatctgtgtttgatacacagttgcttatattttgtttgtactcttgtatatgtcactgccctgcagccacagtacctacctgtgtttgaaaacaggtccagcctatacctgcctttggcctttgcactagctagtttctctttctacactgcttttgcgcaaggctctttctccattttcttcagatctcaacataaacttcaccttattgcagaaactttcccatatcactggatagaaaatagcacctctttggcaggcacctgtagtcccagtcccagctacttgggaggctgaggcaggagaatggcgtgaacccgggaggtggagcttgcagtgagcccagattgtgccgctgcactccagcctgggcaacagagcgagactccgtctcaaagaaaaaaaagaaaaaaaagaaaagaaaatagcacctctttatctctcttgatccctcatatttcattttaccaatacttaatgtattttgtcatatattttaattatttgtttatcctttctttgccatcgttagtacttaagctccataggggtatgaattttgtctgttttgtgttttgtggtatgcctagtatgtagatcagtgccatgcacaaagtagactttttattttattttattttgttatttatttaaatttccagttttattttagatacagggggtgcgtgggcaggtttgttacatgcatatgttacacccaggtagtgagcatagtatctgtagctagtttttcaacccacgccctcctctttcttcccccgtctaatagtcttcagtgtctattgggcccatgtttatgtccaggtgtgctcaatgttttgcttccacttataaatgagaacatgtggtgtttggttttctgttcccgcattagttcgcttaaaattatggcctccagctgcatccatgttgctgcaaaggacatgattttgttctttttatggctgcatagtattccatggtgtatatgtactacagtttctttatccaacatactattggatggtatacttttaataaatatttttagagtgaataaatgagttacagtatggcaattttatctatccccagaggagcactgtccaatacaactttctattatgatggaaatgttctctgtctgagttatccaatgtggtagatgctagttacatgtggtcactgaggatttgaaagatagctagtgcaactgaggaaatatattttaaattttatttaatataaattcagattaaattaggccaagtgtgcatatggttactttacagcacaactccaaaaagtcgtccgccttaccatggcatcttttcaaggcataatttttaccttttattcctattcatggagttacttctagcattgctggtattgtcatcatttttactacatactatgtgcactgtaagcatcttgggtctttatagaaactccctttggttatacttgctgtcaataaacaagagttcaattatcgggatttgtctacaaatgaaattacatccttaattttgcttgattttggaaataagcatctagttgtctcttcatttcttctttcatatgtgatacattttgtaaattttttcaagtcatattgtttttgcaataaaatggcatgaagtactgatgcataacaacatgaatgaaccttgaaaacattatactaaatggaagaaggcagtgataggagatcaaatgttgtttgagtgcatttatatgaaatttccataataggccaatctacagagaaagaaagtcgattagtggttgcccaggctggtggggaataggggaaatggggactcactgctgaagggtttgggctttctttctgcatgatgaaaatgttctataattaattatggttatagttgtacaatttgtgaatatactaaaagcctctgaatttcatatttcagtatgtttgtgtgtgtatgcatgtcttatatttttatatttattttatcttttttctttttttatcttttttttttcaaattacccagaatctgagatgtgtttttttttttttacctcttccttcagagattctgattcatcagaactaagatgataatctgcattttaaacaagcaatccaagtgattctgatttaggttgccraaagatttttttctttaagaaacaatgctttaggcaaggatgttattaatctttctttaagaaatttctgataaagtagggaaatgcatatctttcccctaattatatatgaatatcctggcctccctgataccatggttatattttgaactgaaatttgtagttattgatgatgctgacacattttctctgtatttggcatgccattgctattttagacatataaggacactcaattgctgtatggtactcagatggctttatcttatcagttgaaatttcttcttattctttgtatttttctttaaaaaatagatttggtacttgccataccataacctctgttattacaactgttttaccattactttgaaacctattgtagagaaacaagaactctttctctacattatcccagtcttcacattttgtaagctgcttatcaggttgggttttctagtaagatatcagaagcacagcctacacagggcagagtatgtccaacatgtggtggtgggcaatctgtgtcttaatcatctggaatgtttgttaaatatcctgggatctgagaatcaaaatttctgaagaggtagtgtrttagtctgtttttacactgctgtaaagatactacccgagactgggtaatttgtaaagaaaaaggtttaattgactcacagatccacatggctagggtggcctcaggaaattcacagtcatggcggaaggcaaaggggaagcaaggaccttcttcacatggtggcaggagagcagcatgggggaaactgccccctgatccaatcacctcccaccaggtctgtctctagacatgtggggagtatggggattacaattcaagatgagatttgggtggggacacaaaggctaatcatatcaggtagcttgagtatacaggttactatcatgtccactgaagtctgagagcaactgacgtaaatttttcattttcctttttttgtgtgccaaaactgtagatgagagaaccactgatttatgtagtgatctgtgcctttatgttctctaatacacaacttcagaacagttttaaaattcattctgattcttccttaacttggtcattatatttgcttttcttgggatgggtagaattttgcagtttcacttgaaactgatttttgcctctctacttgatcttgcttgtctaataaaaactgtgctttgcaccctctagcatgctttttgtcaccyggctctactcccgatttctacactacttaacttggtcagcatagacttcacctttaatagacttaaaaaaaatctctgctactccgtttatgtgtgtgtgtgtgtgtgtgtgtgtgtgtgtgtgtggtgtgtactattgttctgctaatgttcttttatgctttggtccttcttataaatccataaaaccatagggataacagtattacaattttaaatacctgtaacctctgacctttcacagaaaatatgaaatacatagacgtattgacctgaccatttctaaattgctatggcttctaaccttttccagcaatctgaaaagttgtgggaatttatattctatttgtaaagaaaggactaagaactgtgacttcaaaataagaatcatagtagaccagttataaaatgcactatctaaaaaggtatscttcacatttatgatcccggtatttgcattctgtgtcaaacattaaatatgagagaattattccaagagagatgaggaagaatcgatataattttagctggcagaatttattaacatatttgcttatcagtcctcacaaattatgagctgtccttaggtgatatatttatttggattctgctgtgttgttttggtggcaacaccatgcctgaataggtgaaaggggctctggaatctagatacttgccttaaaaccttgtccctgccatctgctagttatgctgctagtctagttggctctcctgtctgagcctctctttctccacaggtgaaaggggaaaataatagtgcccatgtcatagagttatagtgaggaacatctgaaataattcacagaaagcacttagtgcaatgtttggcatatggtaagcactctgtaaatattagctgctattattttcatgattgttaataaaattgctgccaatgttgttctttgtctacagcagtgtttcttaacctttttagacataaggtccttctcttataacgaacatttggtaactcctcctttaatattatggaatgaaaatcaaagatctataacctgtatacatataattttgaaaaatgttaatattattctttaatggtaatagaaacaaaatagtagtccagggctacagtgtatgaccactatatcrtaaatccccaagacctgtctcaggttcataaatttactagaaggaatcacggggtctcagcatatacttgtattagtggctgagggttattataatggcataagtgagaacatatagccaaatcataagggaaaaagacacaggtggcatgtgcaggaatccttgtgcaagcttccttacgctctctcccttcaacaaggggtcacacaaagcacattcttaccccagtaacaaaaagaaagcaacacatgcaatgtttctgtctagggaaggccattagacactcaatgttcagggttttccttgggggctggtcacactctctgcctcatacttaccacaattacagataaaagaaggtattcagtcatattatttgaagtgcttgagagggtatctggtggtctaactgcttcttctacagaatttcagtcatttctcctattttcagctctaccaaaactcaccacttacataagtaatcctgattggtatggctttctgaggtttggtgccacaagacagcttatttactattggtgtcaaaatatttaagttggtttgagatttttctggtacaacaagctattaataatttgcccatttgctttctttctttcttttttcttttttttttttttttgacatggagtctcgctctgtcacccaggctggagtgcagtggcgtgatctcggctcactgcaacctccgcctcccgggttcaagtgattttcctgcctcagcctctcaaatagctgggactacaggtacccgccaccacacccagctggtttttgtatttttagtagagatggggtttcaccatgttggccagtctggtcttgaattcctgacctcacgtgatccacctgccttggcctcccaaagtgctgggattacagatgtgagcctccacagccggcctgtgtatttactttctaatttacaacattctgttaacagctattgtctgccctatagcctcccctactctctatacatgtacattcttcaataagtcaacatgagcatgtttacttgctgaccgtaaggagctagcagattagaagtggatggagatattaagagggaatcaatagggtaaggtcaggccaagtggggtggctaacacctgtaatcccagcactttgggaggccaagacaggtggatcacttgagtccaggagttccataccagcctggacaacatagtgagaccttgtgtctacaaataatacaaaaattagctgggcatggtggcatgtgcctgtggtccagctacttgggagtctgaggtgggaggatcacctgagcctggggaggtcgaggctgcagtgggctgtgattttgccactgcactccagtctcggggctacactctgtctcaaaaaaaaaaaagaataaaaaaataggataaggttctgaggacaatgaagaaagggtctgagatgtggagcacttattgagagatgagcctttgataggaggatggcctcctctttcattgtaacaggaggttaagaggagaggttttagtaaacacaagaaactttgtcaatttgggaaagaaaagagaaggacgtgtttgtatggtggtttctgccttctctatgaagtgtatggtaaggctacctgctgagaggggtgatatggtttggatgtttgttgccacctagatctcatgttgaattgtaatctacaatgttggaggtggggcctcatgggaggtgattggatcatggagatggtttctcatgagtgggttagcatcatcccctcagtgccattcttgtgatagtgagtgagtaagtcctcgcaagatctggttgtttttaaagtgtgtagcaccccctgaccccacccctgtttcttctgctctggccatgtagacacgcctgcttccccttcaccttccaccatgattataagtttcctgaggcctccccagaagcagatgctgccatgctttctgtacagcctgtggaaccctgagccaattaaacctcttttctttataaattacctagtctgaggtagttctttatagcagttcgagagcagactaatacaaggaagtaaagatgtgagggatttcaggtcttgggaaattggaggaagtttgaaataaccgtttcaagggagggaaggagtacattgacctgagaacacagacttgctagaaggtgttaaatgcccaggggagattgttgattgtgartatatggtgacaccagtcttacctgttgtgtgacttttttagcagcatctagctgcccctgtgcaggacttgtcaatgctgggttcacctcatccaggggtggactaaaaactgttgataaaatcataacaggttgaatgttactgcctatgaagtttaaggtctttccttgctcagcatcattttattttcatgatggtttgttggaggatgggtctcgatatgtctttcagcctcaattgactcatacctactaagactggaaaggcatgctctccagccagctgacctcttgaatatacgatgacaaactattatctgctgcctgtttttgtaaaataaaagttttactgaaacatagccacacccattcttttacttgttgtctatggctgcttttctcctacaatggtagaggtaaataattgtgataaaaactatatggcgggcaaaatctaaagtgtatatgtggccctttacagaaaaagtttgccaacctctggcctctaggcagstgtctgaatcctgaagccactgttacactgtgtgctgtttactgacattttttcccttaggtggtgtcatagtcctgcatttttggcttcttaatctagttccttacttaaatatgattcaagtactttcttttcttccactaaataaattttacatacacacagagagatagagagacatgtatatttcaataagttctgccaatgtgaattaataaataagaagtgttataataataatggacatagaattccaatttcagactcattttttaatcacaaaattctattactgacaaatatgtaggtactcttccgtasaaatttttctgagttacttaatttctcctggcctcacctctttgggaggtaatttagatgaaatggcttaaaaaagttatagtttcacaactattcctcaaagtcctagaatctttttactttgctgactctacttgcttaattatatttgctaatccatttcattagtcaacacttggcaagcccaagtgtactcatctgtctattaccttttcatctactttagtcttaagtaaacaaatgccagttcatgttctcagatactcagatgtaggtttaattgttaatatcttattcattattgtacaagcttttgctgttgaattttaatattaaaataatgataggttagatttgtgctcacaacttnttattatgttccattttttcccactcaaccgtacattatgtaccctttcttcaagattactgtacagaatgattcttacatatttcagtgtgacattctttttttattgaggtggaattcatatattaactattttcaagtaaaagttcagtggcatatcatacccttacagtgttgtgcagctgccacctctatctaatgctaaaacttttccctcaccctaaaaggaaactccatttctcttaagcatttgctcctcattcctgtttttctcctactctggtaaccacccgtcttatttctttttttgtaaatttccctgttctggatatctcacccatatctagatgattctgtgtggtgtgtaatatgtgatattttatgttaggcctctttcactgagcataatgtttatgagttttgtccatattgtagcatgttcagtttttcatgctttgtcatagttaataatattcccttgtttatatataccatgttttgtttatccattaatccattgatgaacatttgagctgtttccgccttttagttcttgtgaatagtgctggtatgaacatcaatgtccatgtacttgtttgagtgtctgttttaaattttttttttttggtatataactaggagtagaattacaggatcatatgacaatttcatatttaagttttcgaggaaccatgaaactgtttttcatagcagctgaaccattctacattcccaacagcaatgtatgaggatcccagtttttccatatcctcaccagcacttctaattttctagtgttttgattatagccatccttgtgtgtgtaaagcagtatctatttgtggttttgatttgcatttccctacagattaatgtcaagcatctcttcatgtgcttttggccatttgtatatcttctttgctgatatgttcttgttcatcttatttttccttcacaactggagaagacagggtatatataaatgatactaattatgagaaaaatcatagtcatggaaaatcttgagacttcaggtcagtagcttcatatctaccatggaggttaatttaatgcttgttagctaaaactttggtaaaacttctcataaattggtttgcttcatattcattagagccttccactcaaagatgtgataattgttattttgactatttgcaagggatttggaaaggtcagtgtatgtggtgatttttcatttggttggttgaattatgaaagctgcaggagcaaggagtcatttattggaatgagtcttgcagagtccttaaaatacatatctcagatatggctttgttattcttcataatgacatttctgaatttgggaattctgacaaagtatctgcaggaccacattatggctttcatgggcaataggtacttttgttttgtgggccatgaaaaattttgctacataaaagatattaaaatatctttcagaaatactaaaaatttccatgaaaatattataattctattttctgtctacattgctatagagatgaatattttacaggctgtcttgtattcatattttcttctgattttaaaagaaattaaaacattacagaacctctaacagtatcctgggcccaaggcattatgcttgctttgtgcagtgggatgtgggccctggatatctgaagatatctatcatgattttgtttagccctttgtgatttttattatcattgatgtgtgagttcttaacagttactgtgattacttcctaataataatgtgctctttacggctactttgaaatgtccatttcatataactcagatcataataaacttgccctttttcctcattttcattatgggctcagccgtctcagcttgttcaattttatttgcattttcctcctcatattctgctwgttaccatttgagctctcagctgctggaaagcccttcccagagcaggtctttggggataacaggtttcactaaattggtttcagaaggtgaagtttagtgttcatttggtctccactggcagccctgaggagatatgataacacaggctggaaaagaaaaattccaatttcataaagagcattctgtacagtgttggcataaacaaccctgatactagcaaggagaacagactagctttgggatagtatacaagtttattgctaactcttcttttttatggtgttatcatattatcgtatcctttaacatcctttgtggtttttttcttgttccatgttcacttttccaaatctcattgcctgtcatcatcttccttccatcactggcattttttattaatgatctgctttctcctttcccataagccagtcttagtgtcttctagcaatgtcatttaaaatcccacttcctcattcaagccacagtccatagcactwagcctttcttcttcctttctcataactggaaataacagatctctcaggaaaccttcatttcccttactgagagatggtgctcaagtcaaaagcataggagctcacatagaaagcaaattctttagagatccttgattacaggaaaacaggccacaggtcatgttaaaccattaatttttggagctagccatgaagcttaatcaaattgatgttraaacgattcttttaaggcattgactatccacgcattgattcttaggctctatttcatcatcataacttcctttacatttttatgataacaggaatagcaacattattatcatcattcatagtaacaaatgtttatatagtgtttagtgagtaccaaagtctaagctttttgcatttatgaacttatttaattctcataactcttataaactgggtgctattttttacctcatgtcattgaaatcaaataatttgccctaagtcactcagcaagtaagtggggatttatcatctcctgttcatcttgtaagctgttttctatttcaggaagcttaagaaatctcagttttattctgtgaaggctaattcatattattagcacatcaggaaaacctgttacaaacaaatattcagcagagacatagaaatcaagaactgtgttcctcatatcaagtgtatgatcaaggcaaactgggaactgcttttatatgactctctcccaatcacactgaattctatgattccttatcccatttccttcactaaggttatccttggggttgattcctgccaacttggggatctccttgaatgacatcctttctaattcctactgttagagtagatctagttagggaggacatttatgaagaaagacctctcccacaacaccttgaaaccgttgtagcttacttatcctgagtggacaggcatgggcttggagggtgaaggggtcttgcagttctaacatgttactcatgttctttcagtcatcttcttaaatatactttgtagaactatgaggccttatggagatcttaggagaagtactaatgaacatagaatttctgtttttaatcatacagtattccaattttcagttgccatatgtacatatatgtacacagacttgtgtgtggatgcatgcctgcttgtgaacatgtttgcctttgtgtacacacacagacacacgcctttgtgtacacacacagacacacacaaacacacacacctgcaaagatagtttgaggtaaccataatctttctgtggtaagcatctgaggtctttgtaaagaggagtgtactttccatttatggcatggcaaatacattaatcccaagaactctcaatatcaaggcccttttatggaaagtttcaagaagctttcctaggcccctctgctgacctaattatcggggtaatctgttttatcaccgtcaggtggagccaggatacttttaaatttgggataagggtcagatgtattaatccatatcccagagtatacaaattaactcttggccagctttatataaaataaagtacaaagtcaggttctcagataaggttggtatgttgtttggtctttctttttattctattcctgataaagattcacttgttgtaatccagttatctcactaattaactaatatttatattattaacacaacaaaaggaaaactggtggatatcacaggcctccacaggacaggcaagtgaatgaatcacttaagctggttaaggactgtagtgatctgtagagcatatactctgcctaaagagggcagccatgtcttaaaaatttccacacactagccttactagaatgtggactttatgctgccagagcttctgatttttcaagaaacgtttggaatccagatatttgtatgaaaactaatttttcaatgctagcagttaattctaatttttaaaatacgatgccatataatgaataaactattataggagttgacaatttttttctgtaaagggtcagttagtaaatagtttggactttgaggtctgtatggtctctgtttcaagttctcagttctgcagttgtaatatggaagcagctgtagacaataagctaatgaaaatggtgtgttccagtaatatttacaaaaacaggtaaaggcctattttggcccagtggtggtaagtttgccaacctctgaactaaaataagatgtatcaaacatgtgtaagtatcgaaacataatttgactaaacaaagtgagctgtagaaggattcaaacattttattaccatttggattaaatgtaaaaacctgctaaaaaatgcatttatgggtatgtgcatgtatttgaatgataaagattgaatttatgatagtggttgtctctggagagggaaggatgtgggtccagagaggaattgattacagtatttaatttctttataaaaaggatctgatggaaatacagcatgatattaaaatatgattagtacatgggtgtttgcttccccccacctttttgtctttatatttgaaatactttacgaataaaaaacattagtatgcaaggcaatcaaaacatgtctgcagacttaatttgactcagatgccatcattttgaacaacctctgctgttcatgcgtgcaagcattctaaggatatcagctttgtagaaaatgatgagtctttatgtcaacaagttggaatctactacccatatatttggaggttttcaatgcaataacagtttgtgataggtgatatgaatgataaccragatgtaagctggttttcatcaacctatatcatttcttttatttctgtttacaaaatcaggcataacttcttgacaatgtacatatattataattactttttaatgaccttgttatctagcattcctcatagtatctttctgttccctctgaggtttctcagagttttatacagtgtcagcttgttcttattagatctaattatttcataatccaatttaccatttctactcatcatcgaagactttcctcagtactgtcctagaaaacctgcaaagcattgtacatttctaataatatgatcttccacaattattgtttttcctgtgccaagatcaaggatggcatacttttctgttgatctcaaactcatttagttacgagtcatgaaatgatccatatattgagctttattgaagggcagaggttttgttttgtttacttctgtatccttagcaccttgaaacagggcttggcacagaatagctactcaataaatttgtgttgagttaataaataaatgaatgccattattcttttcagaggatataattttacatggtttctggtggaatgtggtgttattccaaaggcagctttagacattgcagtggcagaaggaaactttcagaattctgagtttatgatttattaacttggagtttcaccctgtgttccctaagtttttacttcttacattaatataatttgatttctaagttcctgatgttttctttttactttttttcataaacgttaatgtctaaattccaactatggttccttttctcaactgaaacttatttgtgtgaytatgcaaaccttctttatacttaatgcttattatctgtgctattgttttttcagtgttgttcttagtccttcactttctatcactgctaccctttatggtacaacatggcctagtcagttgagttaccaaaagattaaaaaggaaatcgtggtcgataatcccagcactcggggaggctaacgtgagaggattgcttgagcccaggagtttgagaccagactgggcaacatggcaaaacccggtctctaccaaaaaaataaaaaaattaaaaaaaataaccaggtgtggtggcattctcctgtacttgggaggctcccagctatttgggaggctgaggtgggaggattgcttaagcacaggaggtcaaggcttcagtgagctgtgatcatgccactgctctccaaactggttgacagaatgagaccccatctcaaaaaaagaaaagaaaagaaaattgtagctcttcctgaacaagtcctgaaatgtctttcccatatgcattgaggatcttcaagataacctcccagtttggtaatttgttaaaaggactcataggactcagcatatattgttactcagggctgtgatttattacagtcaaaggatacaacacaaaattagcaacgggaaaaggcacatagagcgatgttcagaggaaaccagacacaagcttccaggagttctctagtggagtcactcaggatgtacaaaattcctccagtattgcttgtgacagcacatatgaagtgttgtctaccgggggatattattaaattattaattggcacaggtttattgggggctagttatgaaggcaacctctgtccagcacatatgaaaatgctagacccccagaaggaatgcaggtattcagcataaaccacattgtayaggcattctaggcatagtgagtcatgttgtcagttctagtagtcactgtctcctcacttagccccattaacagctgtggatgggcctttgtcatcaccaaggtacccgtttcccaaagatgaagaaatttgatttcattttgttgtctcttggtgtcaaaaacataaaaacatttttcctctcctggacatcttcaactctaatgcctttaccaccaagcatagtttcaaacttctagggagcttctctctgtaactaattggaaaatttcttttctgacctcctaaccctgtatggaggttgttggttttatatttagtaaattattaaacagcaacatgttttttaaaacatttgtactgaggcctgacattgggtagtttctccctgcagtcaggttacttgtcagagatggggcatgactccaaagagaattaatgtatgtttttgttatctgaagtgcccttgggggttccagaatcctcctgaagagcccatgtttctttagcaaaagaggtttttcaagtctgaatccaggatacaggaactcaaatgaaaagcttgttctataggagtcttaaaatagaagataagaggctacaaataatgaaatcaaatttgtagaaactgagaaatttcaatcagatgtaacaaaaagatccttgctggagaatatataccagtagtagtacctaactctcatccaagttttttaagctatgtaatttccatttgaccacttattctttatagattgaatttgatcgtagattataatttaaataaaataaagcatagccacaattcgagtgctgactgcaacctatcctagcaaacctttcacacacataccatgtctgagatattctcaatattgttgcaaataatccctaatcacctgtgtcaacatcccagaggttaagtcaaacaaaagcagagaatagggaaatgtataacataatagattttatttgaggagtcctatttagagtgattgccagatccatatttttcacataatttcattccttaataactggtacttcgtcacaaattatcaagcagacgttgataagttatctgaagatttgatttcataagcttccacaataatgatgctgtttactaacagaatatccatcctatcccaacataaagcccgctgggaaaaaagtcattctttttaactagtaattacatgcttgtccctatctcactatacagtaatattttatttttagtctgtctccactacactgtatgttctttaagactttgaattattctttgtcttttacatttatataacacctatgtgagcatgctcgtaattttccagggtcatacagactgaaatattgctgcttttgtcctttgttaattccatctaaaacatggactaggcactcttaggtttcagtcatctgagtagatgtttaatcaacattcgagaaactatgtgggagaattaacggcaggtgatgatggtgggacttgaagcctgtttgccaggggccccggttgtgaacatcattttcagtactgtccagacacaggggcaactccctgtcatttgtgactctttccgtcttggctcttgcctctcttctttctttctttctttctttctttctttctttctttctttctttctttctttaattaacatcaccatcttttctgctattaaactgtcaccatcttgatcttctctccctcttttggcctttactttcccggccagagtgtacttctggtttcttttggagcatccaatctccataaatctcagcctttgacctctctgtctctctgtttctctctctttcactttctctctcttttgaaatagaatttacattttattaaaaccaaacaatccttgcaactctaaaaattgtatttttatggcaccttatgacttcattgttatttatcaaacttcaggtaatagctgattcaaaaagacttsaactataacttaaatattttgtgatttatgaaacttcttaaaacaacttaaagtttatatcttgtggccaaggtactatagacctagttgggaagggcctgcctaagtgaacataaacatcacatttcattgattctaagatacacttttccacattttaacatctcttaaattgggattcatcttatacttcatagtatctcacagtataattggtgaatctttttccttagtattataaaaatgataatgatgggacttataattaaaggcaacttagatttttactttttacttaagtagctgaggcttaagaaagtttacaaagtctgactggtaaccttcacacacagaagttttgtttgcatgtagtccttctcttctttcctgcccttgagatgggatttgttcccttgacctttaccccctttgtgggcaggaactggagtggctcatttcacccagcctgcagtctgtggatggccaagtgttaacagcccagtaaagggtcagagtgacaggctcctgcacctgccctttttgacactcaagttcttgtttggtgtccaggaagaatcaggtcacacaaaccatttgaagggtagtgtatgcagaggatttattgggcgataaaagtggctttcagcaggatggggaattggaaaggggatggtgtgggaagaaggtgatctttccctgaagcctcattgtctgaagttagctgcatctatcagtagtcttcgatgctcagccacatgtatccctgaggctcagcagcttgcatccccaaccacttgcatcagctgcttgtgttgctcttttttttttccctgccagctgatctagtttttatgggcactggatagggggcggggtaggacaaaaaggcaattatttgggtggaaaaatggggtcagctgttttcacttagggccaaggttccaggcttgagggtgaggtttagccgggagcccagcccttcaggggtcagctgttttcacttatggccaaggttccaggcttgagggtggggtttagccaggagcccagccattctgtatcaccctcaccaggttgcttcatgctgacctgcaagtggttctgcttatgctggcctctcatgagtctttcagttaaatctttattggatatgtactgtgtgctaagaattgtggtaactactggagagaaagatgagcaaaatcgtacatggtctttgcttttctgattatagactcttctaaaatagtgttaaccattagcattataaaatggcccaatcataggccagatcattctgttgttcctgtggtgtctagatttcttaatgtttccatgttacataaggaaggagccattctgggtgatcatttaggactctgtatccagtgaccctgtatgggtagagtaacagtttgggttgactacttgaaggtggtttacctccttcatgccttcatcatttacttctcagaggttttcttcatactgcctgtatccaatacgttgcatctgtttttgtcaaacttttcaatgaattatgtatagcaagtctaaatggagttgccttagggtttagtttccctctttactcagtgattatttgatacagctccagggaagattccactgggaatgtgtgtcagctggcacttgctcaagcctacagtgaagctgttatttcatttcttatgtttagttattcttaagaggttggtgtctgggttagagttttcttagtcccctacctgttttcttagcattcgctgctggaatctataaccaactccccaatggactgcaggtagccaacatgcactctcttggtagggccttgcccgcattgaactttgcatttgtttagtaaatttaattaattttgtatagattataaatgtacttagcacaaaatttaaaaagtacaaaaggtaaacaataaaaagaaagtctactttttacacctggctcccagccaccccattgccatcccaggaagcaaccatagttaccagtttctctagctccagtattttttaaaaataactttttattatgtaaaatcaaaaatgtatatggaagaggataatataaagaacctcctggtatccatcatgttgctccaacaattatcaaaaaataaccaatcttgtttaactctactcccacccactttcttggattattttgaagtggatttcatactaaaatcatatgatgtttcagacatcataactaaaagatagtgcctcttttaaaaaacatatagccataataccattttcacactaaaaagcaaaaataattccttaatatcattgcatttaaaatttttcaatgatgtattttcttttcttttacagtttggttgtttgaatcaggatccaaacaaggtccacacattgcattttgttaagtctcgagcctcttttaatctatagctcccctcacttttttttcatttatttgtggaaataactgagttgtttattctgtagaattattccgcgttcttctgattctgttaccaaatatagtctggtgactgttttttctatacattggtattttgatctagacgcttaatcagttgtaggtttaattttttggcaaaaatactttagaggtggtattcagttttaattttacagattaagccaggtaagttcctggttatttktcatttgtttgttttgttttgtttacaacatggtttttaagtacacgggctctatagtcagactatctgggtttgtattccagctccacaacttagtagctgtatgaccttgggcaagtcctatcaaactcactgcatttctccttatttgtagattgtggatcatagtagcatgtaattcatagtactgttgtgaggaataaccaaatccaatgtgtgtagagcattttgaacagtgtctgtctttgagtaggtattcagtgtacattaactattgtggtactatatttttatttctccattgtcttgtacggtatagccagggctgctgtattgttctacgccagggttcactgtttatcttgtaggcttttgaatgatactttttatggtgctgtacaatgagtagtccgtgtggccatatgtagcagcccatatagtcatacaatacatgaacttgtgttgttcagctcttttatgtttttcatagcactactattttataaacaggatttagtgtctatctggatttcttattcgcaaactcatrtatcacattgcctttttgtttctgtacccctcttccttgaaatatacatgtgtttgtgcccatagatacacaccacatgcattttcaaagtcaaagctaaatagtattcctcttacaacctctcttccaactgagtgatgtgaagattatgtagtttatgctggtttccacttaacacatctatggagagttgaggctatcagccagctaccaacaaaaaggaagtgaatcgattagcagcatgcctggggactgtgtagacatgcccacaaacctcatgttgttatatgatctgtccttgggatctggccaaggttcttggtattttaatcaatatgagatagatatttccagaattaggaccccatggggtgacccatgataatctggacatcatttttgtcaagtttaatagtttctctgtgaaaaaaaataatattgtgtgtgtgtctcctccttagatctgacatagaaggcattcatggaaaagtatacctttctatgctgcacttgagaggtggtaggcctgtgcacaggggagaagagattaggtcattaataaaatggtactcatatcctttctaatttaataagtcaatataacttctacagatgtgacactagggaattaaataatacagaatcccgatttttaaagttttctaatgcacaactatttcactcatatgtacacatatacatacatacatgcccaactagccaaacaatatataattatagtaatcctttacaagatgtccgttctagtcttaatcaaaccagtagcaggtttagctcatggagtagtttagatggaatgtgcttaggaaggtctgacttcaaagagcctttagtcagagcccaagcaactttctcagctctctctgatgatttcatttttctcttggctaatatattttatccatcaatgtcaggttgggccagaaatacttgatttcgagatagaagtcattgttttttcaggttttcagaaaaataattacatttattattgtgtattatatatggggatagagacaggtacacatttgttaatctgtatcttccaaggtccccatattgttgactagagttggcagatgggtcacaagcccaacacgtctttacccaggctttttcaggtaaagaaatgcaagttcagattgctctttatatatgtgtttccaaagcagacatataaaatgctcctcataaatcaaccccttgtatttcctttcctatgatttaactcatgtttttgttgatacaggcacatttaatattataaccattcattgtataaaagattgctgttatgttttgctgatacagtgtaaattggcagagttggtcctggcaaatgcagaagtcactgtaacatcttggcccatcctgcctcatattgtatcagtcttcccatatgcacttcctcatattcataatacatatagtattcaagaactttatgtacagcaaaaatatttttacacatatttacttgtccatctaatttcttattcaaaatactataaccaacaaattygtcactgtggtttaatcacaacacagaaacataccactgatactatatgccatggtttataataagcactttgtaaatttttgcttatttaaacctcacatcatgtttatgagttaggtgttattattattccattttacagatgaagaaagtaatgcacaaaatttaagtaaatttcagaaagtagaccctgaatttgaatttagatattttgacactaggccaagcgcggtggctcacgcctgtaatcccagcactttgggaggctgaggcgggcggatcacgaggtcaggagatcgagaccatcctggctaacacagtgaaaccccgtctctactaaaaatacaaaaaattagccaggcgtggtggtgggcacctgtagtcccagctactcgggaggctgaggcaggagaatggcatgaacttgggaggcggagcttgcagtgagccgagatcacgccactgcactccagcctgggtgacagtgcgagactccatctcaaaaacaaaaaaaaaaaaaaaaaaaaaaaagaaaagatattttgatactagtatctgtgctcttaaacactgccatttttactactaaaattgtgacttgttacacttgcctttgtttctttgttatacacacacacacacatatatttaataactttatatttaataatatttaatttgattaaaatttgaattaccatatgtagccagtagtggccctattggacagcacagattccagcacaacacgtaacttagggatgacactcaatacatatttgcttaaggaaggaatgactctcagatttatttttccagctcagatctttcccttgaccttcagacttatgtatgtaatttcttatttggcaccttcactgaatttctattagacattttcaaaccatctattagacagttccaaagacatttccaaatagttcatgtccaaaatgaactattgatctttctctccaagcatactccatccataagcttctccatttcagtttcttctactctctcagactaaaaacttttgtcatgtatgatttttgacagctaatctaccaacaaattctgtagggtcttatttcaaattatatacataatctgaccacttctagtcatctccaccagttttactaaaatttaagccacagccatttttgttccatgttattgaaatagaccttttatatgtctcttttctctgctgtcccagttacgctcttactgttgtctacacagcagctagactgttcttctgtattcaggccaagtcagagcagaccattcctctgtttaaaactcaccagtggtttctcatttcattcaaagtaaaagcaaaggtccttccaataacccaaaaggcctatataatagctcccgctcccctgtccaataccctattctctctcttggtctcatcatttttaatactctcccttctttattccactttactttcactggcttccttattgtttatttttttaagaaggcaaggtaaacaaatagcttaagtatttttatttgtttgcaactaagcttgttaacactatataatgaaaatgtgcaaagaataatgttgcagttttcggttagatttaagtcaaagatattcattaataaggaatcttcgaacgtgaatattccagaaatttctctaagccatctgatcagaacaactgtctctgagtattaccttactttgtaaggtattggcatgcatttgaattaaactcagattttttcaaaataagtcctgattaaaaaaactattctatattcaaactaaaagaatataaatagaacttttcctttccagaaacaataaaggaaacaaggcattttgtaaaatatggtcctgagcaagttgcagtaaaaaaataaatgtatacttctacctgctcaaaacagaggctactttcttttcctcagtcttggaaacaaggtgaagaacagcctaaatgtgacttcgggcaggcggttgccaaaacagctcaagcagttgaccatggacacctcaaatgaatttgggagaacctcaccaaaggatccaaattctatttttaataactgatacaaaggtgaagtggctcttcccaagtagcagtgctgccagggcctggccctggcccaggcccaggcccagctctgagcttacctgctatgctcccaagcaaaccatgatccttctgctccagggcagaccttttccctttagaggttcagtgtccagggagctctatgattgtgtgaatgaggtgagcgccgactccatgtgagtattttaaggcttggagtcaaagtatttttctaacacgcttaggcagagtccatgtgtcaatggcccatctccagtttgttctaatttctcaccacacatttgtagatatttctcaccacacatttgtagatctaggaccacagacctttgctgtattatcataatcacagctaatgtccatcctaacttatgattcatattctatgcctggaaacagtccctgtatttaacaataaaacctacacataaaaacaatccactgttgcaacttatatggtcacaaaacgtaaatgatcttctgtagaacaagcaattttttttttgttttttgtttttatttatttatttattctttgagacagagtctcactctgtcacccaggctggagtacaatggcgcgatcttggctcactgcaacctctgcctccctggttcaagtgattctcctgcctcagcctcctgagtagctggaactacaggtgcctgccaccatgcccagccaatttttgtatttttagtagagacgggatttcaccatattggctaggctggtctcaaacttctgacctcaggtgatccaagcacgtccgcctctcaaagtgctgggattacaagcgtgagccacagcgcccggccaagcaaatgtttttaaccataattgtcatgaatcaagctcagccagaatccccaagatcaaaaaaaaattgcactatacaaataataacttgaaatatacatacacacgctctcatacacacttcttacagaactgtgcttggggaagctccatttgttgagtgccactgaaggcatattttgctaaactgcttctccaagtattttgttttggaaaatctatcacagtagggcacagctgtttactggatgagcagaaaaaggragatatgcttgtggcaaccaaaaagttttaaggtctttcaagttgtataaaatggacctacagaaacgtttaagtgttctcaggatgcaaaattgaagctgaaatgtgttgtcaaaccagttgcaaaaagtgtacagcaggcatctcttgaggttaaacctggtacccagatacataacaaagcttcaggacacatggcttgttggccttgtcccataccgttgcataatctgatcatgtgtgaatttcacaaaagattcattcatattgttctgctagtttggtattgaggatttgctcatactcctcctgaatcttgtcttcatagtctaagacacactcacgtattattccgatttgtcagagggtaaatgtgggctggtccttcttcatccatgaggaacctggagagctaggtgctatgagtgctgaggagtgaggttgactttctgaagcacaagcttcactctgattaagaacaatttctaaatgtctccacctctgataacgactgtattctagttttatgttctgaaaaattttctccggaattgtaaggcgccgcttgctgccgagtggggcggactgctgcagagttggcggtagggtctgcgtctgaagcggcggcggcttggcgtccgggggcctgaggcccggagtggggctgggcagaggggtgcagcacggctgcttcggggaagcagggactcagcagctttgtaccgaagtccatgggccgcttcagcgtcgcctggttcgccaggtcgctgacgggccagggaccgggagcggactcgggtaagtgcggcccaagctccggctcctcagtggggctcgccagccaagccctattgtttctttttctttttttcttttttttttttttttgacacttagtatctcaacattttattattatttttttttaattatactttaagttttagggtacatgtgcacattgtgcaggttagttacatatgtatacatgtgccatgctggtgcgctgcacccactaacgtgtcatctagcattaggtatatctcccaatgctatccctcccccctcccccgaccccaccacagtccccagagtgtgatattccccttcctgtgtccatgtgatctcattgttcaattcccacctatgagtgagaatatgcggtgtttggtttgttgttcttgcgatagtttactgacaatgatggtttccaatttcatccatgtccctgcaaaggacatgaactcatcattttttatggctgcatagtattccatggtgtatatgtgccacattttcttaatccagtctatcattgttggacatttgggttggttccaagtctttgctgttgtgaataatgccgcaataaacatacgtgtgcatgtgtctttatagcagcatgatttatagtcatttgggtatatacccagtaatgggatggctgggtcaaatggtatttctagttctagatcacgtatttcaaaataataagagctatctatgacaaacccacagccaatatcagactgaatgggcaaaaactgaattttcctctaatcgcctcattaaatgtatcccacagattttgatatgtagtgttttcatgatcatgttttaaagacattctgtgattttaatttgtatttctttctttaaagaattatttaagagaaagcttataattttccatgcggaatggacttaaaaagtgatttctagctttatcgtagtattattattagacaatgtttataacatgtcaactttatggaacttactgatgttttctttgtaacctaatatatgatcactttttgtgagtatttcatgtgcaactgagaagtatagtctctattaccgggacataaaatatgatatatatctgtaagattgttatttaagtcttctacatctttacttactgtttatccacttgatttgttgtttaatgaaaatgatgtgttaaagtttctttttagtgtgcttttatatacatcgcctgtatttttgctttataaaggtggtgtctgtattactttatgcacagatattcataattgccatatctttatttggagaatggcttttagcatttaaagtgttctttgtggctgggcacagtggcttatgcctgtaatcccggcactttgggaggccgaggtgggcggatcacttgaggccaggagttcaagaatagcctggcctacatggtgaaaccccgtctccactaaaaatacaaaaattagtggggtgtggtgggcacctgtagtcccagctactcgggaggctgaggcacgagaatcgcttgaacctgggaggcggaggttgcagtgagccgagattgcaccactgcactccagcctaggccacagagcaaaacrccctctcaataaataaataaataaataaataaataaataaataaataaataaaagtgttctttgtttaatttaatgctttttggcttgaaatctattttgtctgatattgattccatttgcctggtagacttttgaccattcctaaattttcctcttttgcttcacattcctttaaactcccagacttcacagggtatctctcccttattttttgccatcttctctcttacaaatgatacctttcaaagtctgccttttgacaactgcatagaaagctcttccccaaggctcgaatctaccagtttgtcattatttttacgctttgtgtggactttgtctttctggttgtgatttagattactcttaggctactagccccttcttttctcattaactctcctgtttcagcattgtccttgctccctggaaagacttgaagagggaatatgagtgatatcttgctgagatttctttttttttctacttacaatttaatagttaagtcttttattatgtgggtgttttctttctttttgttatgtgaagggcatggctttatgtacttttatgttgttctggtggctctatattgttttgtggaggatatgtttggaaattttgatttacatagtcaccattgtcttaacataatattttccatatggttaaaaatactttgtaaatattttaatggctatatactatgatacaaaaatataccaaatttttccaataatttccctctttagtatgttagttttttccttttatgtgatgacgtatttgtgcataagttaattccactacatactttgggtagatttgccaaaatataatttttgcctcaaggttataaatattattaataatcttgacatagtttgaatacagggagaatcaattggcatatggatttatattaagctgctaactagggtagcctccatccttttttcaggtagcaccttcctcttttacatatatatcatgagcctggcctgaaatagctagtaggtaccagtgtggctrtttctggtgtttacagccagcatctctgttgagtgatagaactttgtgccaatattagttattaagtatttggagatcttccacctccacagattataacatttgttattctgtggttggattttctttacttaggacacacacttgtgttatattcagcaataacaaaagaaccaatggcctttctttcagctgtcctttagtctggcatccctggattttataattgaagaagaggggtgatatttaagagcccaaaatacaactggcaagaccttaacttggagaaactaatcaatcctcacattagtcattactgcttttgtggcttatgtcagagcatgatgggcttatttctgctcacgctttctgttagtcacttgtttttcctctcacttgatctgttttatcaacttcagttaatcaaagctgggcttcctattcatgcaactagatttttctcagtaatattatattatctaccatttcctgaattaattgagacactctgacatgatctgtgtactttaggtaagccattgtaactttctatagttgttttgtttggtttgcctctgaatgtaaaaatagcattgtgtgagaacacatttgagagtggtggttagggtctttaccaatatattttctatgattatttttactttcaatcttattattcatcacattacatggtagatggcttagcaatatttagacagtaattccacaaaccactttcatcctagaatcacctttgagacattattatttttttaaatgcaaactgccaggcctcatcatggacccaatgaattaatctcttgcattgggatccagagatctgcattttaaacatctgcccaagtgactctcatgsagtttggtacctgactgtagacttatttttgagatgcaaagtttaatgcataccctaccaaatcatgaccccagtgcacctcttaagtggtcatctctgtgctagtttttagagcttgtcacccttgctgtrtatacatggcatgctccagggtgcatttaaagcgttattttctacatatgtttagaagtcattccttaacccaataacctattaaaatccacttatgttttatttgtattatttagtggttttattttacattttatctcctccatgcacttgaaattgaatatgttgtttggttgtgaaatagagatctaacttatttttttcccaaatagttaattgtccatgttccattttttgaacaattctgctttttttccaccaatttaaaatgccgcttttattgtacattaagttcttacatttatacgatggtcttatcgtgagctttcattttttccactgacctaactattcttatactactatgaccatgccacataatcattttccttttgagtagcacaaaccttccataattattctgtttaaaaaatgtttcactcattttgctagtttattattccatgtaaactttagaattattttatcacattccagaaaattagcttgttggcattttgattacaattatactaaatctattaattaattggaatgaagttgacaacatgcaatatttagtctttctatccaggatcacaaaattttgtttttcatttacggaagtctttttgtgtgtgtaatacttttatttatattaattctgagacttaaataaatcactctcctctctctctctcccacacacatacagtgcaactgtttttttctattacaattttgaagtgtctgttactaatatataggatgcttatgatttttatatcttcattcactgaccaggaattttaacaggcttccttgttaatgttaaaaacattatcaataggtctaagcatggtggctcatgcttgtattcccagcactttgtgaagccaatgcgagaggatcgcctgagcccaggagttctagaccagcctgggcaacataatgagaccccatctctacaaaaattaaaaatacaaaaattgctgggcatggtggtgcgggcctatagtcctatctactcgggaggcagaggagggaagagcccttgagcccaggagtttgaggctgaagtgagccatgaccacaccattacactgcagcctgagtgacagagtgagaccctttctggaaaaaaaaaaaaagtatcagtaatttctcttgcatttttcagttagacagttatatgataggtaaataatgattattctatctcctttccaataggtttaacttttctgtttttgtttctttttaaaattacattgagaacccagttcctcaccacctttgctgttcattaaactcggtgaagagttttttaaaaagtatcaggactcacctgaatcagagattctggtttacctgatgtagggggaatgtgggtattstcatttttaaaagcttctcagatgtttctagaagctgtgtttgagaatcattgttctagacactctgaccaaatgataagtagtactagtgatagcagacatccttttctggcttctgatcataagcttctagtattgcaccattaatggtgatatgagctgatcatttgagattgactcagtggtgtgttggaggcagctggtacctgctcaaaaggtgtaactgtacacatattttcccaacttcacattcattgacattatgttgatcacttcaaatcagccatggttgattcacatggaaattgacaaatgctaaaatcagcgctccccaccttctctgtcaacctgttcattatttgccagcacatcacagtagatctttattagcttaaagaagtattcttttttaaaaaaaagaaaaaaataagaagtattcttttattattaggctatgaataatttttgtccttcattatcatttgcatttcattgcaaccaccttttaatcacattgtcaccttatatcagccacgttctaaaaccttgtgtttctcactgtaaatgcttttttccagagggattcctgtattctgattcttcagagagttttccttctattaaactacattgacttttcctaaacctaataactctttttatggaggaaactttttttcttcttcatcttccctcctcctacccttcctgtcctctgatactcaccagtctactctctatcttcatgagatctacagacctaagaacctttttagtttgttcttttggttggtttatagacaagcaagagtcaaatttgagtttgtaagatatcagtgtgagttcttgcataaaaattccagatacaaatgagtaaaaaagtttaaaattcttctaataatcactgctgtggtgagccacggattcagaaggtagggtgtttgggtggaaaagagtggttcacagtgaccaacctagaggaaaagatggactgcatgttcttcaggcaatcctctatgaatactgtcttgtcacaaagatgtatgtaagaattacagactatggccgggcacagtggctcakgcctgtaatcccagcactttgggaggccaaggctggtggatcccttgaggtcaggagttcaagaccattctggccaatatggtgaaaccctgcctctactaaaaatacaaaaattagccaggtgtggtggcacgcacctgtaatcccagctactcaggaggctgaggcacgagaatcgcttgaacctggtaggcagaggttgcagtgagccgagattgcgccactgcactccagcctgggcaacagagtgagactctgtctcaaaaaaaaaaaattgaattgcagactataaatctggaattgccattctctgagaagtaattataatgtacaaatcaccatctagtcagataaatgtagaccaatatgctatacaatcaagctgaaattggagttgacagtgtcttgtgaatattagggatcctaaacagacacatggctaaattggtgtttattttcactgagaatggaacaggccttgggcagggccatgctttttctatacccagatttttgagggtttttatcctgaagggatattgaattttgtcaaatgctttttcagtaacaattgaaattatagtatggtttttgtccttcgttttattggtatgatgtactgtattgatttatttgtgtatgttgaaccatccttgcatccctgagataaatcccacttggtcatgatgaaggatttttaaaatttgttgaatttggcttgctagtattttgttgagggtatatatgtgtgtgtgtgtgtgtgtatgtatatatatatatatatatatatatatatatgatcagtggttatggccaatagctttttgtttgtttgttagtttgtttttttgatgtgttttggtctggttttggtatcagggtaatattggcctcgtagagtgagtttggaagtactccctcccccctctattttttcagaatagtttgaataggtttagtattagctcttctttaaatgtttggtagaattcagcagtaaagctattgggtcccagacttttctttgctgttagactttttattatgcctttgatcttgttccttgttattggtcggttcaggttttggatttattcctggttcaatcttggtaggttgtgtgtgtctaggaatttatcaatttcttctagttttccaatttattggcatatagttcctcatagtagccactaattaccctttgaatttctgcagtatcagttgtaatgtctcctttctcatctctgattttatttattgggatattctctctttttatcttaatctggctaaaggtttgtcaattttatgtatcttttcagaaaaccaactttttgttttattgatctttttgtattattatcatgtcaaattcattttatttctgctctgatcttaattatttcttctactaattttggatttggtttgctcttgcttttctagttctttaagatacatcattaggttatttatttgaagtttttctttttgatgtaggcattatagctataaccttccatcttagtactgcttttactgtatcccatacgttttagtatattacatttccattatcatttgctttaagaaaatgttcagttttcttcttaattttaccattggcccactgatcattcaggaggatattaatttccatgtgtttgtatagttttcaaaattcctcttcttattgatttctagcttttttttccattgtggtcagagaagatacttgatattatttcagtttttttgaatgttttaagacttgctttatgggtgggtgcagttgctcacgcctgtaatcctagcactttgggaggccgaagtgggcagatcgcttgagtccaggagttcaagaccagcctgggtaacatagtgaaaccctgtctctactaaaagtacaaaaagttatccaggtgtggtggcacacgcttgtagttccagctactagtgggggctgagatgggagggctgcttgaacctatgaggctgagactgcagtgagccactgcattccagcctgggtggtggagtgagaccttgtctcaaaaaaaaaagacttgttttgtgacctaacatatggtctgtccttgagaatgatccatgtgctgaggtgaagaatgtgtattctgtagccattggatgaaatgttctgtaaatatctactagatccatttggtccatagtgcagattaagtcgaatgcttctttgttgattttctgtctgggagatctgtttaatgctgaaagtaggggtgttgaagtgtttagctattatcctattgaaatctacctctccttttagctctaataatatttatatgtttgggtgctccagcattgggtgtattatatttaaaattgttatttcctcttgctaaattgacccctttatcgttatggggtcataatgatcttctgaagatttaaagtagtgaagggaaaaaaaaaacttttattctagaatagtatgtctagtggaaatgtccttcaaacatgaaagagaaataaagactttcctgacaaacaaaagctgagggatttcatcaatacgagatctgtcctacaagacagatgatcttctttgtctcttacagtttttgtcttgaagtctattttttctaatataggtatagctactctgttcttttttggtttccattggcatggagtatcttttttccacccttttattttcagtctatgtgtgtctttacaggataaatgtgttttttgtaggcaagagtcatttgatctatttttttttatccattcagctactgtatgtcttttgattagagagttttgtctatttatattcaatgttattattgataagtaatgatttactccgtcccattttattatttgttttctgattgttttgtggtcttgtcttccttcttttcttcctgtctttttagtgaagtagattttctctagtggtatgattttaatttcttcctttttattttttgtgtatccattgtatcttttttgatttgaggttattaagaggtttgcaaattctctcttataacccattattgtaaactgatgacaacttataactgatagcataaacaaacaaacaaggaaaaaaggaaactaataaaaactttacaccataattttttctgcccacttttcagttttttgttgtttccatttatgtcttgttgtactctctatgtctttaaagttgttggagttattatttttgattgattcattgtttagtctttctacttaagagtggtttacacattacagttacggtgttataatattctgtgtttttctgtgtacttactattaccagtgagttttatatcttcagatgatttcttagtgctcattactgttcttctctttctgaatgaagtactctctttagcgtctcttgtaagatagatctgctattgatgaaatctctcagcttttgtttgtcttggaaagtctttatttttccttcatgtttgaaggacattttcaccagatatactattctagggtaagagtttttcttcttcagcactttatgtcatgccactctctcttggcctgtaaggtttccactgaaaagtctgctgtcagacatattcgagctcctttttatgttacttgtctcttttccccttgctgcttttaggatcctttttttatccttgatcttgaggaatctgattattaaatgcctttagatattcttgtttgggttaaatgtctctggtgttctataaccgtcttgtacttcaaagttgatatcgctgatactatcccactgaataagcttgctacccctgtctctttctctacctcctctttaaggccagtaactcttatatatgcccttttgagactattttatagatcctgtagtcatgcttcgttgtttttcattcttttctcttttgtctcctctaaatgtgtattttcgaatagcctgtcttcaagctcatcaattcttctgcttgatcaattatgttattataagactctgatgcattcttctgcatgtcacttacattttttaactccagaatttctgcttgatttttaaaattatttcaatgtctttgttaaatgtatgtgatagaattctgaattccttttctatattatattgaatttatttgagttttctcaaaatagctattttgatttctctgtcttatatgtcacatacctctgtttctccaagattagtctctgatgccttatttagttcattttggaaggtcatattttcttgaatggtcctgatgcttgtgaatgttcatctgtttctgggcatctaagagttaagtagtgtagtctttttagtctgggcttgtttgtacttgtccttcttgggaaggctttccagatatttgaaaggacttgagtgttttcatccaatccatatctgcattagagagcatcccatacccagtaattctgtggttcttgcagatttgtagcggtaccaccttgatggtgttgaataagatctggaagacttctctggattactaggcagagactcttgttttctttccttactttctccttttacttttaaagtccacttttacttttccctctacttttctgaagcagaaggagtctctccccacagctaccacagctgggaacgtgttgagtcatacctgaagcccacaaagtttcgtctaaggcccaatgagtactatctgggttttgcttctggttatttagggtccaaaggttctttagtcagcatgtgatgggtcctgccaggactgggttcttccattcaaggcagtgggttcccttttggccccaggtgtgtgtagaaatgtctgggagctagagtctggaaaaggggccttaggactctgatgagtgctctaggctactgtggctgagctaatatacaagatgcaagacaaagtcctctttactcttgccccctcttttcctcaagcagaaggaaggggtatcttttggagccttgagctgtgctgtgtggggtggtgcaaggactcccatagccaccatggctggtgtctcagtaggttgcatgcctcccaaattcactggctctgagcccagttcaacactaggactaatataagagttgcagtccttgtggcttagagtgcccttcaagtttatttagggatccagagcactttagcctgcagtgtcaaggcttagaactaggatgtgtgattcccctctagctagggctggtttaaatgctccctgtgtgggttgtccttagctgagttcagcctgattttgctttcttccatgtgacagggtagcacggagttcaatgcagtgtctcacaattgctgcactctctctttctgaagtrcacacattccagtgtctctttttttggagaaatgtttgctcatattttcttacccattttttacttgggttatttgttttcttgttatttagttgtttgagttacttctatattttggatatcagccccttatcagatttatggtttgccaatgtttttacccaatccgtgggttgtcccctcactgtgttaattgtttccatttctttgcagaagctttttagtttggtgcaattccatttgtctacgttagcatttgttgcttgtgtctttagagtctgatccaagaaatcattgcccagacaaatgtcatggagcttttcacctatgttttcttctagtagttttatggtttctggtcttacatttaagtctttattcattttgtgttgatttttgtatacagtgtaagatagagtccaatttccttccgtatgaggatatccagtttttccagcaccatttactgaatagagtatcctttccctgttgagtgttcttgacacctttgtcaaaaaatcaattaactctaagtacttgggtttacgtctggactttctgttctgtactattggttgattggtctgtttttatgccagtaccatgctgtttatatgtgattataataacttcataatatattttgaagtcagagaatgtgataccttcatgttttttccttttgctaaagattgctttgactattcagggtcttttgtcatttcatatgaattttatgattatcttctatttctgtgaaaaatgacattggaattttgataggaattgcattgaacccagagaaagctttgggaagtatggacattttaacaagattagttctcctaatccatgaacatggactattttttcatttatttgtgtcttcagtttgttttatcagtgttttatagtttttagtatagcagttattcacttccttgactaaatttattcctaagttttttctttatttaatactattgtaaatgggattgtttttgaaatttttttcaaatagttcattgttagtctgtagaaatgcgactgatagaggctaaacattactctgatgttcttgtttttgcctcctctgttatttttggtttggcctaaagacttaaatatcatctgagaagcacagttcttttagtcatatttccgtggttacatatgagcccagttgatacggtggtaaggtgtcatgggtggggaggtcttctataagattatgtctctgtcttttagtgagctgtgcccctggcctgtgacttacttaagttcttctcaggaattttttttccccctcttgggagagatgggaaggcaaattgggtctggaattcggtatttcccttcacctcgttcgcttaggttctgataaaactccaggaggttttgatctggtaaaaatagtttctcttgagggaagaccttgttaagaagaagagaagggtctgtgaatatttttaaatgactacttatctttcccccctgctggaagcatgaggggatttttcaccatcaaaacttgataggactcttgtaggtaaaactcacaaaagtttgggagccccttttggactgggccctattggagtttttacctctcaaatccgagcatattaagcctccagcaatttgtaaattacagattaggttatcctatcccagtgctggttcgcaaggagttttctactcctggccttctgttactgtaagatttggttctctctatctatctcctcacttctggggacagccatttaccctatgaccccagttatctgatgaatctaagaagagttgattttgtttgttcagttttttcttgttgtgtgaattggatagattactttcttatttcttatatggcagaccagaatgcagtcatgtttttgaaatatcaaagatttgcttcttctaaagttttgatctcttaaaaactacttagggtaatatactttgtttttcttttaaaagrgggaaaatgtaagatttttttgatgattaacttttgttttttgtttacttttctcaaatagatcctaaatgcccaggagatgttgattttcataatagtgactgggacattaagacaatcaccagctccttgaaattctacctcaggtatgcctgatttgaattgggagtttgcttttcatagctggtgaaatttctctgggtgttgagcggagttaacgtggtctcagttccaggagtttggatagaattgcttaagaaaaaacatgtgaagaggatttctggccaagaatgtgcaaagactgttttttaaatctgagagtttaagcaagagaagcataaaaataatagaattgttactgaaaaaaggctaaaaagattatgttcaaaaaacatgcacttgaaataattgaatacgttttgctcttcacagatagagtgatgttgtgatggattcactagtagaatcaggagctgggactattcagggtggctaacatgttttagaggataataaccattttgaaatgtcaaattgcatttgggcaaaaatggtatatgtgtgtgatgtgctacrtatcatgtcttaatccaggtaatggaaataaaaaccaagaaaatacaactgtaataatattggagctaaatgaactgtcagcagtatggaaaaaagttagctcaccaacaaaatttgggaatgtgcaatattaatgaatatattgttcagtttattggcataaatttatattatgcaaaaggtgcttaagacatatatattttttaaacacattgatttcttaccactctttatgtctcatagtatgtatcatactttatgtgcaaaagcctcttcttttcaatgattgtgttcttgagccattaagattgatacataagttctgggaaatctcattaatctaaaatagattgggtttcagatattactgttaaatattttgctactgtagcatcatcttagagctttccataaacttgaatgttctttccaggaatatttctcctgcatctgctgataaagaaaagaactgttattggagggtttattctgtactaggctacggctagttgtttacactgatagtgtcattgtttttttctcccattaaccgagtgtactaggtggtacttgactcgttttgcagatgaggaaaccaaggtgcaccactttctccattaagtaatagccatggtcccagcttgtattttttaaatctcagtgtctctgacttataaggcccctggtactggggcatcttcttctcctgccccctactcccaggagctttggccttctttggatggcttggtaatttagtaaagacagagagcaatctgttacaaatactttaagaagacttgttgtgatgagaatagtgggaataagtgattctgtatctctagcttccttcaaaggagtctcaacattttcttagatttgtaaggccttccccacattgcattattcccagctcatcctataataggcagggtggcccttttcaaagatgagagggtcaagcctgaaagtgcgagtgggcggcacccccagtaagtgatatttgttctcgagactctcatccatggttctgtaatatataccagccagtaaataccctatagaattctcaaagatagctgtgttccaggacaggtctccacactctgttctaggtaactaaatcaccccttatctctaacctttccagagaagtcctctaaaaatcatcccttctctctcccctatttttatcctctctcattcaactggctctttttccgagtatgtaattatgctccagccacatacatctttaaatcagtaaatgattcagtaaaaatatcttgactgcttattctatgcccagtgtgatgttaagcactaggcaaacagttgtgtatagatatggtctctgaccttaaagaacttatagcctagtaaaggggacagtcagaagacaaataatcatacaaatgtaataaactctaataagtactctgaaggaaaggtataacgtgctatgaaggcatttaataggaagacgtcacccattttggtttaaactgaggtttgaactgtaagttggaatcaactaagtaggagttgggttccagacagagggaaatgaatacgcaaagacttgaggcaggagggaagaaggccccttcaacaaactacatgaatcagtatagggggagtattgagtgtagagagggagggagaggtatgtaagggccatatcattcatggctttaaaggatcttttaaaaattagggtctaaatttatcttaaaagtaatgggactatattgaaagattttaaacatgaggtgcatattgagatttgtattttgaaataaaaaaggatggagattagattacagtgatataaaatgggcagagatgtggaaatcagttagccggctatggctgtcgtccaggcaagagatgatgctcatgcttggactagggagtagcagtagatattcctagaagtaagcatattcaagagatttgggaagtacaattcatgaattggatatgaggattagggatagggagacaaaaaggtgacttccatgtttctggcccatacaaccaaatgatggtcatgcatttactgatttgagaaacacaagaagactaagtttgagggaggcaataagttggaatttggatatgtcgaatttgggtagctttgaagaaatcagggcacaatattaagcaggcaattgaatacataggtctgaaactcagtgatgagttcagggcttgaactaaaaaattggtgatcattgaccatatagatgatagttacagccaggaacttaaacaagattgcctaatgagatactttactcggtgaggactaaactctgatttttcatcttgcccaaattcctttctaaggggtctggggagtcatgccctccaagccataaattctcatcagatgggttttatttaaccttgtatatcatgacttactttccaatctgactctggcataacaagggagaaaatgaaaatgttttatcccaaaatatattttcttgccataccttgaaattgccctgcaaagtctcttgtgggaaaaatccacattctatagagaatccccttcccccattgttttccttcatttctttccagatccaggagataatcaactaagagccaggtgcccttttaggtctaataagaaacattttacaacgtactctctctaaagtctggtatctgagagattcctccacacaataaaacttggtctccacaatcctttatcttaacctgaacattcctttccattgatcccggtcgtcagataaactcaaccaattgtcaaccagaaaatgtttaaatttacctatagcctggaagcccccactttgagttgtcctgcctttctgaaccaaaccaatgtatttcttaaatgtatttgattgatgtctcatgcctccctaaaaatatgtaaaaccaagctgtaccctgaccaccttgggcacaagttctcaggacctcctgagggctgtgtcacaggccatggtcactcatagttggctcagaataaatctcttaaaatattgtacacagtttcactctttttgtcaacatcagccaagcttctgtgtcaagtaatatacactcctggtctgtacttcttaactccccagttccttcttaactcattgtaatctaactcttaccccctctgctccaatgaagctgcttttgccagggtcaccagggataccctcaatgctgcacacaaagcacagttgtcagtctttaccttacttgacctttttgtaacatttgaagttgttaacaagccttctttgatactttcttctgttttggattctgctgaatcacttgctttttgtttttctctaacctctttggtcattttagtcaatctcctttatgggctttctatttggtattttcctgggctctctgctcattttactatagtagaacaactgaaaactgaaatatctacagggaccaggaaataaaactgaatgaagtagactattttcatattaaacactttgcacattgaacctttatttgtatgacaagccctttgtttacatacaaacagcagtgttgtttacttctacaaagaaccaatagagccagatctttgcatttttcaacagggacaggggatatgggtttgtatatgaaatatctcattttaaaatattttgatcattgattcaattccatttcacttttatacactgtgctggacaaagaagaaatatcggaagacctcatgtagctgtttgactgccagtttgccagctcccctggagaagtggcatctgttcttgtggtttcgtcatctgttctctaggttcctgattttcacatctgcttctctgatctagcagagccctgcatccagcttcttagtagatatcaccttcctgaggcctccctgacttagcatctctacttccctcttaatcaactcttattctattcactcacccaaaccaaactgctcccttgccatcatacccaatcaaagaaggagttctttctttaatatttttcaaaacagtctcctcacctattctttctatgctttgtcacccaggctggagtgcagtgttgtgatcatgactcattgcaggcttgccctcccgccacacccttctctctctcaggctgaagcagtcctcccatctcagccccttgagtagtctggactacaggcacgcaccaccatgcccagctactgtttttaagttatttttaagaggtaggggtctcattcagttgtccagactggtctcgaactcttgggcttaagtgatcctcctgccttggcctcccaaagtgctgggattacagatgtcagccaccatgactagcccctctgtttgtcttttattatcttttgcttggattactacagtaacaacagtggcaggcagtatagtatagtaattaagagcatggactcaggagacagacttcctgcttctgccacttattagctgtgtaattttggatgagtttttaacttctctaggcctcagtttcctcatcgatgaactggaaatggtacctacctcacagagttgttatgaggtttaaatgggttaatacatgtaaatcacttagagcagtacagagtttgctattcttataattattagttgattacttacttcctctgagccacctaccatatacctttattttgtcatcgtacttgtcccactgcattgcaaattttgtgtatggtgctcttttctactaaactattagctcgttggaggtttggactatttctattcatctctggatccccagtacctggcacaatgccaggtacaagtaaatgctcagccaatgtttttttttttcttttttyttttattattattatactttaagttttagggtacatgtgcacaatgtgcaggttagttacatatgtatacttgtgccatgctggtgtgctgcacccattaactcgtcatttaacattaggtatatctcctaatgctatccctcccccctccccccaccccgcaacagtccccagagtgtgatgttccccttcctgtgtccatgtgttctcattgttcaattcccatctatgagtgagaacatgcggtgtttggttttttgtccttgcgatagtttactgagaatgttttttgactaaatgagtaaacccatttgagcctgagtttcctcctcccgtaaatggggatttgaataactgctccacctcacaggattattgggaggacaattgcaaaagcacttcggaaattctaaggatctatcaaatcgtaagggattcatggtagcattcagcatgggtcccctctggaattttgcaggactggtttgtgcctctttttacttctgggagctagttggagaccttgctagagggctcagcccatgcttttgcaggtcttttgttgaattactagcaacttggattccctgacgaagcttcaggtgaagagaaaaatgtatataatcccactaagctgtagggctcaggaacttcagccttgctgtccccagaactaagaatccaatacccagctgctttcttcccaaagcaactgacaattttcattcatttcaggaatctttctgaacctgtcatgacctatagacttcacaaagagctggtctctgctgccagtaagtatttatgttactaattaactgtgttgtcctagtttcttaatgtttactgcaataagcctagaaaattgtttgaggggaagtgattgagggcacagaaacctaaaacacatacacaaattatgcacaactgccaaatgaaagtattcttgcttgctgtctaactcaagagttctattatttttcataattagtgttacttaagtgggcttgagaaaattggttaacttgagggttgtgtgaatataaaggctttatttatatatgtattcattgcctcttccatcagaacaagaacattggctcacattaccaggggacagaaaaatggttacacgacagttgccgtttcaacttccttcagcattttgcctgttcaaatgcttttcgactgtgttgtgaaccattgtccttaatctgttagtgccagcatcacattttctagatgagaaaactgagggagagggcgtcagtacataggaaataaggcatagagaatcactcccaaaagttggcgattaaagaagcattgaaagttttggctgaggccactgtatgagtgcccctctccacctcaatgtgacccttattctgcatcatatcctgtgtggtgtagaggaaaaagattcaggggacttaacatcataatgcgtctttgttgaaacaagggagctttgttctttacttctgggctctctcagtgattttaacaggaatccagaggcagcagcacacttctcagtaccacaaggaaggtggatgggaataggtttccagctggaagtttatctgtgagacttcaggaacaacctgctgtgctcagagttctgactccctctgagacagtcttctcttctcatccttctcttttctatcttctattttctacatctttttagacctgtttctttgtgtgtgttttttttctctttttctgccttttttctttctttatgtctttgtctttgtttctgggtctctaatttttattgtatttcagtgcctatttatctctctgtctcttttcatctcattgattatctctctctctgtgtgtgtctctgggtgtctttctccgaatctctctgtgtgtgtgtgtgtgtgtgtgtgtgtgtgcatgtgtgcatgtgtgtgtgtttgtgcatatatatgtgagaattttgctcaatccagttgcccagaaagccaaaccatttatctcttactgttctatcccagagtctgacaacctggattaccgcctaggagctattcactccctggtatataagctaccagaaaagaaccgagagatgctggaacttctgataagacacttggtcaagtaagtaactgctggattttcagaaaaagttcctattagaggactggcccatgtggttggactacacagaaactgcctctcagctctttcagccccagcccttaagtgcttccttggaagctgaatgctctgtgaggaaggctattttgccttgacccatgtacatatcctcttagagtcatcatgcatgtggattgtctcagttgaaaggtagcagcaaggtagagtggggtggacacaggctttgctgtcagatgagcctggttttgaattgaagctctccaacttatttgctgtataatctcaggcaaacctctctgagtctgtttggtcatctgcacaatccctacaatgaaggccagttgtgtggattaggatgaacacaggtaaaatgcatgtcacatgagaggctctcaagaaatggcactttttgttaagattctggtcaacttcttgccatggtgtggctggcagtaacagacagcgggatcctggagaatagtcctggtgacaggcactgagataggcaggtgaaaggggcacttgtgtcccacagtggtgcttcctggccagaagatttaatattgtgaatcaagatgaatttacttggcttaaaaaaggcggaaagcattctgtccaggagccagcagacctgggctctagtttcatttctgctttctgctattagttcattttgtgaccagggacaggtcactcttgaggcctctcttggtatatatattaaaaaattgtaatgtattttaagtgtatatatttagcaagtgcagttgtctgcatactcaaaagatgcagtaatgatacattttaacctcatttggagaggctctgaaacacctaaaattgaggcctttaatgaaggtgagtttccaggttaatggctcttttggcctccccctgtaataaatcctgagtgctttgcctatctggacctcgagttttcctattatatgtgagatctccaagatctgattcagctctgactttcaaagactgttttctacacttctatagcaaatgaatattgtggacactgatgtaggtaataagcagaattaacaagagagaatggcttttatatttattgccagtgtttgcaatttgagctaatagagaacattaagaggcatgtggtctccaaaaagtagtttgtgatcatctcagtaaatgtacaaaaatcagcaaagaagctatttgcatgttaatttaaagttgccctggaggagtctttgagtccaagttccagatctgtcacaaatatgctgtgtgacctagagaaagttcctcccactctctgggccacaggtttgtgcatctataacacgaagagactgaagcagctaatctcaaagggttttctcagctctgactttctgagagtctcaacatgtgacgagacccaaggactcaattgaggatgcccgtgcttagtgagcatcagggtgcctgcctctatctgcccaaaggctggctgcttggcttactttaagaatcttagtcctcaaaatcttgaaatcaaaagaagacatgaacaaatagatcacagaaatagaatggcaaatactcttaagtatgtggtaatatgctcaagctcactcatagtaacaaaaatacaaattaaacctatactgagctaccatttattgtcaaatcctaatgcttattaattagactatggggaaactgtcctctaatacatttattgtattaatgcagtacagttccagaagaggggatttggcagtacctaacaaatctacacattcagttatcctttgacccagcaaaacagcgtaaaacagggtatatgatatgttagcttttttttttaaggcgtatactctaaagatacacctccaccaatacaaacaacacatgcacaagatttctcattgcagcacaattttcaaaagcaaaagattggaaacaacacaartatctgaaaataggggactagtcgagtaaataagggtgtattcaacagtgtagtattatgcagtaatttaagaaaagaatgaggaagatctctatgaactttgttttgtggtgattttctgggatatattacaattttccagcacgtaaaacaaacatcataaaaaatctctggctgtaaaacaaggtttataatatgctagcttttcttttgtaagaaaaaagaggaaaataagaatatgtaagaatacacacacatttaaaaaaatttgtcaaatgaagcatacactaagataaatttaaaaaaaactaatgactccaaaagttaaatgtagagttgccatagatccagcaactccactcctaggtatatacctaagataaatgaaaacatgtctccacacaaaatcttgtacacaaatgtccatagcagcattatttcatagttgttgaaaagtggaaacaacccaaatgtctgttaactaatgaataggtaaacaaaatgtgatatacaggcaatggaatattattcagccataaaaaaggatgaagtactgatacatgccacaacatggataaacactaaaagcattatgctaagtgaaaaaaaacaagacacaaaagtacatattttatatgatttcattgatatgaaatgttcagagtagacaaatctatagagaaagaaagtagatgagtggttggcaaggtctgggaagtgggggtatgagaagtaatggggagtaattgataatgagtatgaggtttctttttggaatgatgaaaatttctggaattatataaggggtgacagttgcacggctccgtgaatatactaaaaaccacttaattataacctttaaaaaggtgaattttctgatatgtaaaatatatttcaataaatgtattataaaaataaactaatgaaagtggttattatactggataggtgtggtaagtagggtggaggtgataggggtaagagctagattcctctaagtatacctccttatatacttatgactattaagccatattaatgttttacatatccaaaaaagaaaattaaatcaaaaattataaaccgtaaaactgaacaccaataaaagcaaatgactttaatgaacctaagtgtttatcaacttgatagcataattacagagagaaagcaattatttcaactaacgtgtcaacacagtcctctgactcatccttaatgagatgtactctagaaacaagaagagcaaaattttaagcaacactcagtaggtttattaatagtagtaatataatttaacttgaaacaaacacacagatcttataaagataaagcaaaaaagtaaatatgttaatgttatcacaagctaagtttatagtgtacaaaagagatactgataaaaaagacataaggaaaaaaaattttaacattaaaattaaattaagaatgttaatatgaattcatgatttaaagagaaagcaacaagaagaaaaaactttatccactgaaacagtgtcgaagggattctacccaaaaagaagtgaatacacttagtgcccagttttttgtttttaaatagcatttccttttcaaaggaatcaggggtgcttagagaaatggctgattgcatgtctggagcaaggaaaatacaaagttagtcttggataaatagtaccaccaagcaagaaagaacagagtcacactaatagtgtcatgtccaaaggacgtagaaaccttgaaagggctgacactgatgatgtttgagccaacctgaacatcaataacaataaataatgtatttgattattacatgttgaaaaacaaaactcctggaggtgggtagaggaaggaaatctctttattgcagaaggaataccagctaataaacataggaggaatgacagaattagaaaaatcattagtttgcaatctaagtgatctgttttagacatgaatcaaaactattgggcaagagtattgaggaataggatgttcacattattccagtgtattactgacaagttacttactaatcacaaataaaaaacaatgtatctttacaatgaacctatctggcagacaccaccttaagtaattgatcaaagttagcatcagtaataacggaacaggccaagtgcagtggctcaggcctgtaatcctagcactttgggaggccgaggcgggtggatcacctgaggtaacgagttcgagaccagcctggccaacatggtgaaactccgtctccacaaaaacacaaaaattagctgagcatgatggtggatgcctgtaatcccaactactctggaggctgaggtgggagaattgcttgaacctgggaggcagaggttgcagtgagccgagattgtgccattgtaaataatggaacaaaccaccttatgtacctcctaattagacataataaaaattataaaacattaactgtgaaatatttttgccaaaaatacgtagcctgaatcaaattaattctttccaatttgcaggaaataaagagtatagaaaaacacacagtatttgacagtctataaagcttttgaaaaggcttggacttttcaaaaagtcaatgttgtgggaaaaagtggtagaggtactgttctacataaagagactaaagaaacaaacaaatacagtataagagctttgtttggatccaaatttgaaaaacgcagctataaaagactttttctcccataacatttgagaaaatttgaatatggactagatattagatgatatagaatctacgttttctaagatgcaaacatgttattgtggttttgtaggaaaatgtgcttattctttgatgatgaatgctgaagtatttagggttgaagcaatgtactttcagaggattaagaaaaaatatagacagaataaaagcaaatatggcaatatgttaatttttgagtctaggtatagacagtatgagtcttcctagtaccactctttcaactgttttgtatgtttgaaaatgtttataatgaaaattgtagggaaatgtaaataaaaaataggcttagtttcaatagagaaatttacacaggagaagaaaattcaagtgtttttaaaatgcacataattatcttgcctgtcaactgctgctttcatcatctatatgatgagtacatctatgcctttgtactgtgtttccactgacagcctgttttctaggctaataacaggcagaaccaaactgaccttagccaatttgaggttctcagttatccagttctttttggttagtatctgtagcttctattagtcagaagtaggagaactctaaggccacctccctggcaatcttactaccagtggaatattacaatggaagcaagctccaggcctaattctgccattcttatagctatttatcagcaggcagacgaaaaaagacttgaacaacctgttctgcaaactcaaatgaagtcccagctctctgtcctttcagatgccctgcctgacaacatcttggatgaaaggttcactggaggcagataagattggagtcagacaataaaatcctaccatctagtacccctatgtaaccttaggcctgggctaccattctgaagggtatgggttattagcttactaggttctttttacttttgtaataatacttctcttatttgagaagcaatactgtgcattgtataaattagaaaatttttaaaaagcaaaaaaaaaaaaaaaaaggaaaagctttctattcccaacattcaataatcattactgttaatatagttcaggttttttcggatctctctctctctctctctcttctctctctctctccctctttttctctctctcgttgtgtgtgtgtgtgcatgcatttttgtatacacatacctgtttgcatttttttttaccaaaatgagattatgctgttctttagtctactttttccattttaacaattttgacttttccagaccatattaactttttcccatttgacccaaaagtggccttttataggtgtttgtccaatctggtattcaatataggaacacattttatttatgtccttattgtgtttttaatctagcacagtgcttgtttctattattattattattatactttaagttctgggatacatgtgcagaacgtgcaggtttgttacataggtatacccgtgccatggtggtttgctgcacccatcaacccatcatctacattaggtatttctcctaatgctgtccatcccctagccccccaccccccgacaggccccagtgtgtgatgttcccctccctgtgtccatgtgttctcactgttcaactcccacttatgagtgaaaacatgtggtgtttggttttctgttcctatgttagttttctgagaatgatggtttccagcttcatccatgtccctgcaaaggacatgatctcatccttttttatggctgcgtagtattccatggtgtatatgtgccacattttctttatccagtttatcactgatgggcatttgtgttggttccaaatctttgctattgtgaatagtgctgcaataaacatacgtgtacatgtgtctttatagtagaatgatgtataatcctttgggtatatactcagtaatgagattaccaggtcaaatggtatttcaggttctagatccttgaggaatcaccacactgtcttccacaatggttgaattaatttatgctcccaccgacagagtaaaagcattcatatttctccacatcctctccagcatctgttgtttcctgactttttaatgactgccattctaactggcgtgagatggtatctcattgcagttttgatttgcatttctctaatgactaatgatgatgagctttctttcatatgtttcttggcctcataaatgtgttcttttgaaaaatgtctgttcatttccctcgcccactttttgatggggttgtttgtttttttcttgtaaatttaagttccttgtagattctggatattagccctttatcatatggatagattgcaaaaattttctcccattctgtaggttgcctgtccactctgatgatagtttcttttgctgtgcagaatctctttagtttaattagatcccctttgtcaattttgacttttgttgccattgcttttgctgttttagtcatgaagtcattgcgcatgcctatgtcctgaatggtattgcctatgtttttatctagggtttttatggttttacgtcttacatttaagtctttaatccaccttgtgttaactataaggtctaaggaaggggtccagtttcagttttctgcatatggcaaaccagttttcccaacaccatttattacatagggaatcctttccctattgcttgtttttggcaggtttgtcaaagatcagatggttgtagatgtgtggtgttatttctgaggcctctgttctattccattggtctatatatctgttttggtaccaggacaatgctgttttggttattgtagccttgtggtatagtttgatgtcaggtagcatgatgcctccagctttgttatttttgcttaggattgtcttggctatatgggctcttttttggttccatatgaaatttaaagtagttgtttctaattatgtgaagaaagtcaatggtagcttgatggggatagcattgaatctacaaattactttgggcagtaaggccattttcatgatattgattcttccaatccatgagcatggaatgtttttccatttgtttgtgtcttctcttatttccttgagtggcagtttgtagttctccttgaagaggcccttcacgtcccttgcatgttgtattcctaggtattttattctctttgtagcagtcgtgaatgagagttcactcatgatttggctttctgttattggtgtataggaatgcttgtgatttttgcacattgattttgttttctgagactttgctgaatttgcttatcagcttaaggagattttgggctgagaccatggggttttctaaatatacaatcatgtcatatgcaaacagagacaatttgacttcctctcttcctgtttgaataccctttatttctttctcttgcctgattgccctggccagaacttccaatactatgttgaataggagtggtgagagagggcatccttgtcttgtgcctattttcaaagggaatgcttccagcttttgcccattcaatataatattggctgtgggtttgtcataaatagctcttactattttgagatacgttccatcaacacctagtttattgagaggttttagcatggagggtgttgaattttatcaaaagccttttctgcatctattgagataatcctgtggtttttgtcattggttctgtttctgtttctctttcccgatttccctggacagaacttccaatactatgttgaataggagtggtgagagagggcatgcttgtcttgtggcggtttttaaagggaatgcttccagcttttgcccattcactatcatattgcctgttgatttgtcataaatatctcttattattttgagatatgttccatcaatacttagtttattgagagtttttagcatgaagtgattttcaaatttatcaaaggccctttctgcatctattgagataattatgtggtttttgtcattggttctgtttatgtgatggattacatttattgatttgcatatgttgaaccacccttgcatcccagggatgaagccaacttgatcgtggtggataagctttttgatgcactgcaggattcggtttgccagtattttattgaggatttccgcatcaatgttcatcagggatattggcctgaaagtttttgttgttgttgtgtcttctgccaggttttggtatcaggatgattctggcctcacaaaatgagttagggaggattccctctttttctattgtttggaatagttttggaaggaatggtagcagctcctctttgtacctctggtagaacttggctgtgaatccgtctggtcctggggtttttttggtgggtaggctatcaatttctgcctcaatttcagaacttgttattggtctattcagggatacaacttcttcctggtttagtcttgggagggtgtaggtgtctaggaatttatccatttcttctagattttctagtttatttgtgtagaggtatttatagtattctctgatggtagtttatatttctgtggtatcagtggtgatatcccctttatcattttttattgtgtctatttgatttttctctcttttcttctttattagtctggctagcagtctatctgtttagttaatcttttcaaaaaccagctcctggattcattgattttttttaatgcattttttgtgtctctatctttttcagttctgctctgatcttagttatttcttgtgttctgctagcttttcagtttgtttgctcttgcttctgtagttcttttaattgtgatgttagtgtttcgattttgtatctttcccgctttctcctgtrgacatttaatgctataaatttccctgcgaatactgctttagctgtgtcccagagattctggaattttgtgtctttgttctcattggtttcaaaggacttatttatttctgccttaattttgttatttacccagtagtcacccaggagcaggctgttcactttccatgtagttgtgtggttttgagtgagtttgttaatcctgagttctaatttgattgcactgtggtctgagagactgtttgttatgatttctgttattttgcatttgctgaggagtgttttggcagtacatatactaaaattggaacgatacagagaagattagcatgrcccctgcccagtgcctttttttatgatactgttttaccaacaagagaagaccaattgtcctgtagaatgttacttcctagttttgtctgctttcttctttgtcatatatttcagctaattactctacttcttgtatgttttgtaaagtagaggttatatctaaaggctagatggattcmagttaactatttgttggctggaacaaatcacatgtgatgttgtatacaccatatgctgcatcacatctgaagatgcataagattggttgattcaccttactgatgttaagattaaccattgctatatttttctaccctgtcaatgcagggctgagagtgtctgtacaatattttcagctagtccatatgtctttaatacatctaggcaatgataattcatttttaccttatgttatgctcattaacaaagcctttggtgttggttggagataatgttagctgaaacttacaggagcccctctgacttttacctgagtctttaaatactcattaatcacccctagagtatgcgtgtattcacaattagaatactacaattataactaatacgttatacatgttagagtatacatgaaaactaacaagcacataaaccaaatttcatcagttctaataacactttttctcaaattgtaatctgaattctgtacacatctgaaaatcaatggtttcttaaaattacacttatcargcagcagttttgatgtaattatcatggcctccatatgcatgaacttgtaatagctgctcatattatagtcacttaagttaaattatgttcattgttgagtttattttctatttaaaatgtcttcaaaaatattacatgatgatatgacaatgaaattacttttctttcttagtggtacataaataatgtgctcgtaactgatgactgatgaaattcatgacatcgtatggactttgttgaagtatttaaagtaaatgacagataatataacaccagtggaggaagccaaagctgtcagccctttaaaaaaaggcaccatttcgctgggcacggtggctcacgcctgtaatcccagcactttggaaggccgaggcgggcggatcacgaggtcaggagattgagaccatcctggctaacatggtgaaaccccatctctactaaaagtacaaaaaattagccgggcatggtggcgggcacctgtagtcccagctactcgggaggctgaggcaggagaatggcatgaacccgggaggcggaggttgcagtgagccgagatcgcgccactgcactccagcctgggtgaccgagtgagactccatctcaaaaataaataaataaataaataaaaataaaaaataaaaaaaaggcaccatccttggggatagggacctgtttgcttgtgacactgattcactctcgccttcactattgtcttttccttttgaagaattttttattatgtaagatttcaagtatatatgaaaatagaagaaacagtatagggaagtattatgtgtccatcacccctccttcaactgtaatcaacacatggccaatcttgtttcatctatttccccacccatttcccctcctcccatgttattttgaatcaaatctaagacatcatattatttcatccacaaatatttcagtttgtcttgaaaagattagaactgtttataaacataacatcacatctaaaaagaaatgagtaataatgtaataatattatccattattctgtgttcagatttctgcttcctttttagttttgtgtttctggggtgtgtgtgtgtgtatgtgtgtgtgcgtgtgtgtgcgtgtatgtatgtatgtatagggtgggaaaggcaagcatacttaatagatggttctatgttcttctaacaggggacacacagtgtgtggttgtctttgcccccaattattttcgagagcactactttctgagattcacttaattgtcagagctggaagtccccttagatcacctaataacttcattttacagatgagggaacagatacctaaggatggaaaaagataggcccagagacacaatactttagtaaaagaaccaaaaaatattgaaggtagcttccttgtttaggagtcagagggcacacagttcttagaattgttggatgctaaagctgggcgagacctaaaagttcatacagatagcctctcattctgccagaggtctcagtctggcaatctgttgacaaggtccagaccagaaatatattttatttgtcctgcagtgttttgggaaaaaagtgatttggcttcaacatttaaaaaatccagatagttcacatcaaaatatacatttcaggaaaaaaagaggatgttagcacactggatctgcatgcccacgtggcagcaatcagttggggttgagtaatggtttcttgctttggaatgggcacaagcttctaatttgccatagccctcaccactcccaagtgttttaacaaatattatattagagttacattagatgtgacctaggaatttccctttcttaaaactagaagttattctgttgatggtgtgtctctaagtgagtggcgggaaaatggtggtctaaagaatgtctgcttgtttaaatgtggcagccacttctcaccasgcccatttctctcatgtaagttacctgccttgcccctctagacatttaaatttatgacctctaatctaaaccatgcaatcagaatcattttattctgtactggaggcttctcacaaccaacctcagtggactagagagttcaagattcctttgctgtcaaataacatcacatactcttgtttttggtttcattcatcttrttaacccacaatttggaatgttacttatcccccatactgattttcaaaatatataataaaaagagagacactaaatgcaaagcaatttccccaaagaataggtgaacttccaaatctcataagaaggccaagaaggaagagtatcctaaatgggatgccaagtaactccctcagagaatcagaaggtggctttagcttagaagagctcacatatgagttttgatttctccagaaaagttagacaagcaggcagtgggatgcaatgggataactataagacttggggagcaacaaatatgggcttgaatctctgccttgccatatgaccttgccaagtgctttgctcttggtaaacctaggcttcaaagctaaaatactctgctttttggagttgtgatgattctgtgagctgctgggacactgaacaaagatcagttcctttcaaagttcacaaaaggagatacacaagtgcccttgtggtttagccttttagggtcacttggtgttagcatggagatacttttccattttaatatctgaaaaaaacttccgtcactaaagaataaagattaattgcaggggtattgaaactgttaaaaggaacacatcaccagcccagcaatatcaaaagctatgaatggttgctgttcatttccatctgaatggtactcagctttgtctagggcttaacagacttcacattaagatttgtctaaggattctgtcctcctcaattacccactcagtgttaagaacctgccattctcttctgggccttagccttggtaggtgtggagagtgagtgtttcgggtagtcagttgggctgttcctacagccaaactgaccaaaagagattcttgccttttacttggctgcctccaggactgtttgaaacagcactagggagctcaattcctttacaaataattcattagtacctgctgtgtggcaggcacacacacttggaagttgtttatcatttagtaggagaggcagataagtaaacggaaaattgcaacttactctgcttgccagtggttttagttaagatgagcacagtgggctctggtctccctgaaggagatgtaacgttatgtgcatctccaaggatagatagacattttgtagatgtagggagaggggggatattccaggtagagagaacgacatgagcagagaggtatgggggtctgaaacaatgtggtataaccagacaaccccaatctaagcagtttagtataacaagagtgtcagaggtcagcagtacctgaaggctcctggagaggtaataataacaacagatacttcccagggtgccaggtaccatgctgaagcaatttatctttatttattcaacaactctctgaagtgggtgctattttcccaggtgggaaaactgaagttcagagaggttagagtgagtgaactcactgttgcgcagctggtaagtggccgtgttgggattcaaacccagcttcagagcctaagcagtgagtagggattggaaataggggtcaagttactcaagttatggaaggcctcatttgtcactttgaagagaattggccctatcccaaagtaggaagccactaaagggaatttaagcaatgaaagtgactagggatcagaaaatctgggattgcacgttctactctacagctaattgactgtgacttcgagcaaattcctttccttctttgggcctatgttttttcatctgtaaaataaggaagatgatcaagggcaagtcttaatgatccctttcagctctttcaggtttttgcttctctaacgggggtcaggaaggggctgatttaagagactagtaggcattctctcaatgtgctttgtggttctttgtacatgctttatacttatatgggctgttcctcttgctttgaatgtcctcttgcttccctcctgcctctccaaatagtatcccactagctttagtccctccccacatccctgtctgtctcttaattccttcaatgctgttagctaggttagctatgtctaaccactttgattcctaattttatactatcttgtattctttgctgattgtttcctttgtaatcttgccttccaatacatactttaggtgctcctttccttctacattttagtttctcttaccctctacagcacctaaaacagtcttggttgtaaggggatactggagcaaattttgttaatcttgccccttttcttctggcagtgtgtgtgagcacagcaaagagaatcttatgaccccctccaacatgggagtaatctttgggcccaccctgatgagagctcaggaggacactgtggccgccatgatgaacatcaaattccagaacatagtggtggaaatactaatcgagcactttggcaaggtatgcattttctattctcactacctgtcttccaaacatgtgacactttcccccaactgccttttagtgctgtgtcttcctccttggctcacgttgacagtgaaaggaaatcccattatgacacaatgacatttaatggcaactctgaccctgggaaattcattcattcagcaaacattgcttaagcttataactatattattttcagacaccatgctaaatactgggggtaatgaagaagaaaaagtcactgtctgtgcctttaaggtgttaacaatgtgtagtatggagacagatgggtaaataggaaaatgatagtataaaagtagtctatatacaatgaaactgtaggggagaagatatttatgttctcacccattgctagtttcatggctgagatccctataacaaaagaccgattaacaagagaaaagcatacaaatttatttaataagttttacatgacacaagaacctttagaaatgaagacccaaagaagcaggtaaactcttgcattttttatactaagtttgatgaaatggatcgttgtgaagattagtgattagaagacagaaggatatgatctaatggtaataaacttagggggatcttagcaaggcttgtttgttcagattcttcttggtgtttctgtgtcttcgaggatagggatgttcttttccttcagttatagggagggtacctctggaatgacctacttcagaggaaggtcagagaattcttttatggcctgctccaggggagaaggtagagaaaccttcttgcttctgctgtttccacaaacgccaaagtgccatattttgggatagcaggtcytgaactccatcaaaactaaaaagaaatcaatgcttacacttattcgaaccccatctcattccaaaagtatatatggtagcatattttatattgcacataaaatataaggcatcatacattataatcaggtcaagtacaaaaggtaaaacaaaggtagagtcagaaaatgatgcccagaatgaggttaagacaaatatttattgacaaattcttgtacacttgcaacagatggccctgcacactggggtataagcttcatagcagctagtgccatcctagggaaaagcataattcaataaagaagcacagggaggcaaaagcagcaggacttggtgactggaagtcaccaaggatgggggagagggagatttctgaatcctgattttctgacttggctgactgggtggatggggctgtccttatacatataagaaattcagaatgggaaagtttgagggagatagaggaaagttcagtttggaacaggtcgcatttgagatttgtgaaagacatccagggagcaatgcctggcgagcagttgactatgtgaatctaaagcagggatcagaaagcttttccttaaaggaccgtataataaatacttaagcctttgcaggccatggatttctgtcacaactacttagctttgccattgtagtgagaaaacagccatagacaatatggaaacagatggttgtagatgtgttctagtaaaattctatttacaaaatgggaaacaggcctgtgggctgtaatttgctgacccctgttctagagcccagatgtgataaattgataaatcaattgattcatccaacaaatatgtgtcgagtacccactttatgccaggtactgtttcaggaactctagatatcatcttcatagagtttatatttagaaaaagtaaacaaatagtattcaaagtaagtaaagtatataatattttagattgtaatgaacattaaggagaaaagcagagaagggaaataggaagggttggaaagtggttttgcaattttaaatacagataggaaaggagaaaataaggaaatgaggagggcctcacagagaagatgacctttcagcagagatcgatagggagtagaggaatgattcattcacctatccagagagaaaggattctaggctgaggaaatggtaagtgcaaaatcccagaggcagaagtgtgcctgtcatattcacggtacaacaaggaggccagactagctagagtggattaagcaaaagatgaaatagaaaaagatgggctcgaagagataatggagagggacagactagatcctgtagtggagtcttataatccactggaagaattttagatttgctctgcctgggtaagatagaaggggggttttgagcatgggagtgacaggatttgatttaggcttaacaggcttattctggctgcaatgtggagaatatgaaggaagtcaaagaaaatctagataaattgagatacatactgtgttcatggagtggaagactcaacatgataaagatgtcaattctttaaaaattataagtttaaggtaatcaatatcaaaatcccagcaagagcttttgtagataaagacaagataatactaacatatatgtagaaatggaaaggaactgtaagggctaatacaattttgaaaaataataaactggaggtaggtattaataatattaatgcttactgtattgcttcagtagtcaagacagtgtacaattggcagaggtaacccgataagtcctcttgtctacttcttacataaacaaatagaacagaatagagaatccacaaatagccctacagagtatggcctgattatttttcatgaaggtacaaaagcatttcaagggagagagggtagtcatttcaatgaattgtattggagcaattgcagctctataggtaatgaaagtgaacctcaacctaaacctctcattttatataaaaatgagctcacaaaggatcatacatttacatataaatcataaaactaaaacttgtagaagataatatagaaaactgttagagcctaggacttattgaggagacatgataccaaaagcataatccattaaagaaaaaaaatcaataaattgacttcatcaaaattaaaaatttttgctctgtgaatgaccctattaataagatggaaaaaaaagctaccgagatttggagaaaatatttgcaaaccacgtatctgacaaaggattaatatctagactatacaaagaactctcaaagctcaacagcacaaaaattcaatctaattagaaagtgggcaaaagacatgaacatgacgtatgcgtggcaattaagtatatgaaaagatgttcaagatcactagccattagggaaatacaaattaagaccatgatgagagatctctacacacctattagaataggtaacgttaaaaaaatatatagtggcaataccaactgctgacaagggtacacaaaaactggatctctcacacatttctggtaggaatataaaatggggcggctgctctggaaaacagttttggagttccttaaaaactaaacatgcacttctatcggatccatcatttacactcctgggcatttatcccaaagaaatgaaaacatgtccacacaaaacctttatagggatgttaattaatatttgaaaaaaagttatttaaagcattttacacatattagcacatttacacctcatttcacataagaagaaaccaaggtacagagaagttaagtgacttgtccagggtcatggagtaagtaaatgttggagctcaaatttgaaatcaggcagttcaaatgtatactttaccacctctagatctttgttatgtgttttgcaaatgggtacctgaagtaagtgaaggtgagggtcattatagatgagagagctaaggaactttgaggcaagagttgctgaagggtcatccacatagtaaagatttttgatagaaaataattttctaatcctagcatttggtggtcagatcatgggtcttgtatgcttggctaaggagtttggtctttatcctgaaggcagtagggagccttggaagcatattctgaacattcattatatgatgattcattgcatcttaaatgtcctaattcatttataagtggataaaggagtgacacagcatctcatcattagtataacaaaataatttttcttttgtttttattctatgcatttttaggggcaaatgccaacttaaattttattagaaaatgtgttggttggcaaatgacctcaatcccaatctagttcataaaagtgtgattttgctatgtccaaagcatattatgtggcatgatttgaaaagcaattaaatgctagttatctcttattcccaggatataataggaggccatttctattaactagtggtcagctgttaagtgagattttcacaccgttgtaacctgttaatatgtgttaagtagtcgaagttctgacctttgtgtgataccagagatgtacgctgaccatgttttccaaacaaagacatggtaaccaaggatcttttctgatttatgaatttatttcaaatgaaacatcttacatggagatatgaaatgaaatcccagtttattaaatacttatcaagttaccttttttgaaaaatagcagaatgatatatgggtgagaatgttccagaaattctagaccttatgtaggtgtaacctcacatggtggttgtgggattaaaagagataatatgtgtgagagctgttgctgcttcacacatagggattatatgttcctggcaagttgttcagttaatggggtatgatttttcagttgaaatatattataatttcagtaatgtgttttttccatttacacttgctctttaatagaaaagggcttaaacacattggttttaagttttctttgttactcctttctttcagtctctcttttaagagcatccagggtctgtaaatacagtgtaagtgaatcagaagagttgatgcttaaaggagtctattactaagtcttgcttaaaatttttttttaacaacttgaatgatcttttctaatttttttcttttttaagttggaaagtaggtaaataataggggaagatctacctctacactgattccctagaacaacattgccaattattctgaagttctctctcttcccatctcacttagcagtatgtatcagggtgcctgaacctcatgttgttggcttgaggcatagaggtaatttggactgacagaggaaggttgacttctgttttccgaacattttgttttggggagctgccaggaattagtggggaagagagaggtcatctctgaaggcggttcttagcaatttagttttgaggacagagctatttcacctaaggggacaaaatatagggtagatccatttgaattttagaactggaaaggggccctaaagaccttcaggtccaagcttttcattttatatgaagcctcttttcgcatgccatggtagtggtaacaggtttgcatttctgcagctccattcctgcttgtctactgtttggaacatcagctctcccccacagttcttcccaactagtttataaaagaactcggataccagccacaaacttttaccagttgtctaacttgtgctttgcaaactcattttctcacctacacaacctggcatcagctgttttcctcctttattgctcccaagaccactctcaaagagctagaaagcagtggttctgcccctgtagacttagatttgtattcagtgaacatggaatcagtgtgggacagcrtatttccagctcgtttagtcctttttctaactctgtgaatgatggatcgtatttccatttctgagataggaaatggaggcattgagtgtagtaagtggcaaagctgagacttaagtttaggtctatcaggttaaggctgcccctcagggaaagggggacctgttttattgagatgtgagctgtgcttttctttgcatcattgatgatgacttagctattctagctactcttgagttccctccttatttccagtctttcctttttagtgggtgggcatctgctttttaatcatacaggaaggatcttgcctaactgtgttaagtatagttttctgggagaatagttgattatttttgagataattagaaaatctattatcggtgtatgtcaaaatggattttagtcttaytgcttaagatatatggttcagggaaatggaagactgaatggtatagtcttttctgcagacatggatggttgaaggcagttcttcctataaactggccggagaaagctgggttattctcagtgtggagtttgtgggaactccagtgttgcctatgttcccaaatggccaaatgggacctcatccaggaaaaaagcccatgtcgtagcaatgtaatggatttgagaaggcaaacaagagaccctgttaagaaatggctctgatttatatacttttcagacacccagtctagcaacctagaggaaacagacccttccagtcctggtctgtctctcctttctctaaaaggtggtgtttgtgaatttcagtctgccaccagagggtagcaagagaacagatgaatgtgtccctccaactgatttctggaataagatagatagatagatattttaaaatataagtaaatgtaaatatatagttatactttatagattttactgtatagatttatattttatacatttgtattttagaatgtatctctatatctacctacctacacacacacacacacacacacacacacacacagacacacacacttggtggggggtgggcgtcagtatgtgtaaagagagagaatctaattaagccaagactctacttcacatttaatttctgaaatgataaggttaagctaaaggttattgaaaataacatttttattatctgtacatgtaaggatattttcattagtctctacatgtgaatctaatatgtatttagcttggaatttggcaaacattctcaattgaatctggagaaaaaatatctttaagtttgaatattaagatcaaaacgtaacctggagaaaaaatatctttgagcagagaattattaagattgggagatttcagatgtatttattagttacaatgaatctttgaaaacgtagcttcaagttttccaccttggctaagtggaggtctttcacacattcttcaaatgcccagttacttatagctttgaagtgaagtcaggccctgtttgaggtgaataagcatgtccaaacccaatgagatagggtgataaatgtaggatgcagttgtgatctgaggtttgctccaatgttcagagagcagaaaagattccccttttgattctgggaattatgccgatgattcagaatgaggtgaaaatatccactccttccctttttctctctctagctggggctgtaataataattatcacagtaaaaatgatagcattttttgacagcttgctatgtgtcagacatggtgctatacatttgacacaaagcatctcctcgatttctcacaactttatgtagtatttasttacaggtaaactgmggtctacagaggttaagtttctatggactatcaaaatcaaatatctgtttttattttctttttggaggcttcgagtgtgtgtgggtggggaagaatatagaatcagagatttttgagaatcgaaaatatctccaaggtcatattgtccattcccctcaatggccagcgattttcttgtatcatatattttttcctttgctgttctcctttgagtggcctgaggtctcaggttggaacaccagagtctagataatacagtaagactggggccagtgtgccagagggccagataggtgtactttggcagctagacttaaagcagactgagcttcagcagtctggtgataggccaataggaatttcagaaaacaggaatcaattgaggagcaatgagagatcgggtggactttttctttgctctgagatttggagagtgaaaactgggtcattgctactttcttagattaagactccttaccaagaactctgaaaatgtccaggctacctctgtgagctcttcagatatccctagagtgagaataatggaaagaatggaaaaatagctttaaactagacagcccaggggttacatcccaactttatcctttactagctgggtggtcatctaaacaagccagtttacccccctgagccttgtttccctcattaaaaaaaaatgataccaataattagacatacttcatagagtttttgggaggagtcattgagataaatgtttcaagtactttgtacatagtacattggccactaaattttagtacttgcccctgccctataccaccacccctttgctgtattgacaggagatgagctctgtctttgtggtggcattccctcctaatacttttattaataccttggtatctactaagtctttgtagtcaaaagaggcttttcttagtagctgttacaccattgtttatggttgttaaatgatagagaaactctttaatttcccaacctaaacgcatcttaagttgatctaaaaagaaactgcacttggaatctgccatctcattcttagtagaaaactcacaatccatgctgagtagatagagatgtccttaacaggatctgactttatcttctctcccccttgatattttcttcccaagacaactgggaaggggaatgaacagacaattagaacacggattacagaccggttagatataatcagtggaagtctacagctgtttcaggcaggaggtactggtttttaggggaaatgacacccgattgggcattagaactcttggattctagtctcagttctaccacctactagctttggggccttgggcaagtcacttccccctctttggacatcgattttcccataagtatattggatgagtaggactagacaggattctggaatgttacatctaaaaaggccttaaagactatgtgttgctgagaccaaagacagccttagtgacagcccttttataaaaagctggctcttggtaacaacagacgtgatactttcaaagttctctacatactctaagcaaactcggtgacacacttgatgtttaatgtggtctgtgccaaatgctaagagctcattacttttgaccctttgccacctttgtttctagtgtagttaagagtatggtttttgctaatataaccagaacccagaaagctcaacatagccttagccagagtgtaaatggagactcagttggaaagctgggattcatcagggccaagtcttgtagctttgatttatagaaaggcaaaatgtttttttgtacaatctgatatttgcagccctgaagcgacatctggaaagaatctggatagttgctcatttctgccaagatttccaagagttagaatgggtctggatctcttggcctttggcaattggaaatgaccatcttatattaaatttcttctctctttcacacctaaagacatgacagagaagaatccgtaagggggttaatatgtgaccaaactcaggcaagcagttcattaaccctcttcccaatggaggtgatcgctctcctggcagtgtctcaaagcccagcaaattatccagatttagttcccagaagccttcaggagagggattccaggagttgggctccttcctgaatacaacccaaaacaacagccaaggcccatcagaatgaaataatattcctcggatattgagttctcttagaccaggcctttagaatggcactcagtgccaaccatatgcccagaaaacaaataagcactggtttgcccccagactctactttggccaccttctgggatttttttctgaagtcactatcagagaccatgaagccctaattgttcttaaccagtccacagaaagccaaatcagtctgtcctttttctggagttttggagggtgggaaaataagttctgcctgatactgtttctacccgaggagttatttttaaacttaaaatgtttccttctatggtttatagtggaaagagtgttagccttgaagtcagacacttctgagttcatatcatagccctgcttcttactatcaggtggccttggacaatgcacattctttattcccagccaagcctttggcctcacatcctctttctagtcttctccccagtgagttgatctagtctgtctatgagttaggaattcctacttaatttttcagctacagaagaaccactacagtgtccagaggagggaaaatgaaggcctataccctgtcaagttctagtgataattttctcaactttccattcattcagctttctaattattctttcctcccttaatcctgtggaaaggggtagatagagggatttattttgtggttaccctaatgcgctagttgttcaatcatgtccttcaagcccaggttgtctttgcagagaaaggaatttgtgttcagagaaaggaacttgtaaacactcaataaatgagttaatatacataaaacacttagacatgtgcctgacatgtagtaaacattgtagaagagttgaccattaaaactaactctgacccatggcttgaacttggaaaaagtttattccatcaaagccattttagtcagtcttctgggtcagcagctagtaccaccatttccaccttctattactgctgtcactaccttttcacaatgattgcatgagatgcataggaactggttttgcatcctgtgccacctagtatttgaccctttagaaagtctccatatgctatgagtttcccattcttttaggatttatttctgcttttttttttttggagacagagtctccacttctgccacccagtttggagtgcagtggcgtgatctaagctcactgcagtctccatctcccaggtttaagcgattctcctgcctcagcctcccaagtagccaggattatgggtgtgcaccaccactcccggctaatttttgtatttttggtagagacagggtttcaccatgttggccaagctcgtcttgaactcccgacctcatgtgatcctcctgcctcagcctcccaaagtgctggggttacaggcttgagccaccatgcctggttttatttctgctattgtaaaagggtaggttgttattccattctcagaacctgcttagaataagtcctttcatggatacacaagaagccactggggcattaggtagagcttgctaggtttcttttcttggacctattctaactcccttgtcagctctgaaagttttctcattaatattggactgccaacagtgagttaagagatcttgggcccatattctctttccttcctcctttcttaatagaaactgtggagttttccgcaagttgcccttcccaattccactagttatatctgtagtttataatcctgtttttaaggtaccaatgtcaccccttcattcaatgaatacttactaaatgcttactatggacaggtgaagttctaggctctggggatacaaacaaaacaaaggcccttttttgtgggtcttatgttctgctggagataaacaatacatcaggtggtggcaagtgctctgaagaaaaagtaaagcaaggtagtgggttgttcctttatggaagatggtcagacaaggctactgttaatgtgttatttaggcagagaactgaataaagtaagggtacaaagtatggtagatatctttgggaagagcaattccatgaatagggaaaacctagtagaaaggcccaaggcagcagtgtgcttggcatgttgaacagcaaagaaaccagagtgtctgggagcaaggatgacaatctgctccatttctcttcccaaaaggaatagcagtaacacacaggttaatgcccattgttaaaaaagagttttgaagtgaggcctttggagggccacagaccagaaaaagaggtaagtggattcttcttactacagcaattgccaatatttccacattaaagtttggcttgaatgtttgcatctgtaggccagctttgggaaggatgttgcaatccgtgatgactgcagggttattcaggccacattttaattttagagaagacacacaacaggaagtttcccctttgcttttctagacttttctcacttaaagagagtgtggttttaagcctaccaagcaccttctctgagctctgcctactgccacattggcaaaactgctctcaaccagctccttaccaatgagcctttcagtatattttcaggagacagggcatgtggacaacaccctgtccaggtggaattgtcagctctcattataaatcgtagaagtcagtgagcccatatctatcttaaggcctgggtagcttcttgaagaagaacaacctgtgaggaagggttttttttttcaatgagaagtgaataatttttataactggagcagggaaataagatcatttaatctgacagagagcttgaagagcaattaagttcatatcacctgatttgcatagcatgtaactgcttcactccctattgctccggtctgaaaatttctctgttcctccctccctttctctaccactctcctctccctctccctgtccccctctttcactctctctccctccgttccctccgttcctccctctccccccgttcctccctctcccctctctccctcccccctccccacctctttgtgtgtcttgtgttttctctttctctaaggaaacataggtttaagttctttttagggttcatgataattgcaataactaccacttactgagtgctcagtatgttccaggctaggttctttacatcaggtataccttgctttattgtgctttactttattgctctttgcaaatattttatttttaaaaacaatttgaatgttggtggcaatcctgtttcaagcaagtctatcagagccatttgtccaacagcatgggctcacttcttgtctctgtgttacattaggaaaattcttgcagtatttcaaacttttttttctttcttacatctgttgtggtgatatgcgttcagtgatctttgatgttactatgtaattgttttgcggctccatgaactacacccagacaagatagcaaacttaataagtaaatgttgtatgttctgactgctccgccgatcagccattcctcatccctctccctctcatgcttccctattccctgagacacaacaatattggaattaggccaattaaaaacccgacaaaggcctctaagtatgcaagtgaaagaaggagttgcatgtctctcatgttaactcaaaagctagaaatgattaagcttagttaggaaggcatgttgaaagctgagataggctgaaagctaggcctcttgtgccaaacagttagccaagttgtaaatacaaaggaaaaattcttgaagaaaattaaaagtgctactccagtgaacacacaaatgataagaaaccaaaatagccttattgctcatagggagaaacttttagtggtctggatagaaaatcaaaccagccacaacattcccttaagccaaagcctaatccacaggaaggttgtaactcttcaatctgtgaaggctgaggaagtaaggaagctgcaaaagaaaagtttgaaactagcagaggttgaggccgggcgcggtggctcacgcctgtaatcccagcactttgggaggccgaggcgggtggatcatgaggtcaggagatcgagaccatcctggctaacaaggtgaaaccccgtctctactaaaaatacaaaaaattagccgggcgcagtggcgggcgcctgtagtcccagctactcgggaggctgaggcaggagaatggcgtgaacccgggaagcggagcttgcagtgagccgagattgcgccactgcagtcygcagtccggcctgggcgacagagcgagactccgtctcaaaaaaaaaaaaaaaaaaaaaaaaaaaaagaaactagcagaggttggttcatgatgtttaaggaaataaaccagttccatgacataaaagyrcaaggtgaagcgacaagtgctgatgtaaaagctgtaccaagttatccagaaaatgcagctaagatcattgatgaaggtggcaacactaaaaaacacattttcagtgtacatgaaatagccttctgttggaagaagatgccatgtaggactttcatagctgcaaagaagtcaatgcctgggttcaaagtttcacaggacaggctgactcttttcattaaggactaatgcagctggtgaagccaaggctcattgaccattctgtaaatcctagggcccttaagaattatgcaaaatctactctgcccatgctccatatgtggaacaacaaagcctaagtgacaacacatctgtctacagaatgttttactgaatattttaagcccactcttgagacctactgctcaaaagaaaagctctctttcaaaatatcactgcccattaacaatgtagtaatcacccagcagctctgatggagatgtgcaaggagattaatgaatgttgtttccatgcctactaatacaacatccattctgcagcccatggatcaaggaataaagtaactttccagtcttattatttaagaagtagatttcatcaggatttagatcccatagatagtgattcctctgatgaatctgggcaaagtaaatttaaaaccttctggaaagcattcaccaatctagatgtcattaagaatattaataatttatgagaggaggtcaaaatatcaacaaaataacagaggtttgaaaaagttaattacaaccttcatggctgactttgaggagcttaacccttcagtggaggaagtaactgtagatgtggtagaaatagcaagagaactagaattagaagtggagcctgaagacgtgactgaattgctgccatatsaggataaaagttcaatggatgagaagttactttttatggatgagcaaagaaaatggtttcttgaggtggaatctactcctggtgaagatgctgtgaacattgtggaaatgataaccaaggatttagaatattgcataaacttggtttactaaagcagtggccgggtttgagaggagtgactccaattttgaaagaagttctgagggtaaaatgctatcaaacagcatggcatgctacagagaaatttttttttgtgaaaggaagagtcaattgatgcagctaacttcattgttgtcttcttttaagaaattgccatagccactccagccttcagtaagcaccatcctgatcaatcagcagtcatcaacatagaagcaagaccctccaccagcaaaaaagggtatgatttgccaaaggctctggtgattgtcagcattttttagcaataaattatttttaatgaagggatgtataccttatttttaggaatcatgctattgcacacttactagactacagtatagtataagcaccatgaaaccagaaaaaattgtgtggctcagtttattgtgatacatattttattctggtggtctggaaccaaatccacactatctcctaggtatgtctgtatgttacctcattcaaccatcacaacaaccctatgaggtagatggtatcactattctcattttgcagctgacattttcaaaatgcaaactgagcttcaagtttgagattcatatagtttaagtttcttgcccctggttacatagcaaagctccaacacaactgactctgactctgtcctgactctttgacctctactttgtactctctcacctctattttgtactctctcttcccaattatagttggtgaaggaataaatgaaaaaaaaagttctattatttaatatgctctaaagggcctggtagccaaaattcatccattcattttaaaaactgtcattgagctgctttatcttgcctcgtgccctactcagccctagtctctagagaggaatcacgaaaaaaaatctctgctgtcagaaaagttatgggacttgggggtatctggaaccaactaacactcaggatgcagtgtaataaagactgtggtgaagatgtgcattggatgctgtgggagcccatggaaagggaacttacctctctattgggaatcagagaagtcttcatacagtgggtaatgcatgatgtgagtcctgaaaatcagaggagtagattaattgattaaccttctgtaagaaaagtcctcctataacagaggactgcaaattatttggcttaaatatgatggagaggagttcatttttctctcacataaaagtctagcagtgaatagtccaagatcaatgacatacttctgccatcctcaccacttggcttcagtttcttgatcctagatagctattccatttgtccccatttactagccagagagaaagggaaaaaaagacagaatgtaatacagacagcttcttcataaaagcatgacccagaggctttcatgcattatttctacttgtattctgttatctaaaacttaatcacatgtccttacctagctgcaagggagactaagaaaggtaggcatgggtgcccagctaccattcagtgacttccattagtaaaagtaagaaggggaaggtgggtaccagtaagcaattagcagtctcttccataaagggtaagagtgaaagtgttctgtgtatagatcactctggatacatacaggaatgagacaccagagaaattaagttccataaaataaccaaagaactaaataactaagagactaaagaactttaataattcagcatggctatagtggagggtgaatgtaggggaatagtggaagatggggaagatggggctggagatttcaggatgtggccagattattgagtactttgtgtgctaactaaggaatttggcctttgtcccgaagacagtgaagagtcattgaaacattttaagcagtggagtaacayaattagattagagttgagaaagatcactctacctgcacttgggtagacagattaaagacaggagtggctggagacagaaggaacaattaggagactattataatcatagagagacatgatgagactcaaccaagtcagtggtagtgagcagaggggacagattagagagacattaaggaagtataattgatagaacttggtgactaaatggatgtgggatgtgagagagggggaggattttaagataataatgtccagatttgtggcttggacattggcattgttttagataataaaaaattttaagggacgaaagtgtttaattctagaaatgttgaatttgagatacctctgggatatccagaaggcaacattgagcagttagttagatatattggtatagaaaccagtagagaaacttggtagtgcaagccatgtgagtggatgacacggttgagaaagcgaatgagtgcagacaagtgagatcattagaaggttgaggacataatcctggagaacattaaatttcagagagagccagtgaaagagacgacagtgttcagagaagcagaaaggtaaagagagaggaatttttagaaatggattggttaaatgtgttaaatgttggagcacagtcaaaataaaaattgaaaaagtacctgttggagtcagcaatcagcaggccagtggtgatcattgtaaaaacagttacagaggagtgatgtgggcagagacaaggttgaggatcaactggaggatgaagaaatggagacttaactgtctggaaagtgtagaagaaaatgaatgtgatggcagtggagagtagcttgggttcagacaggagagacttaagttcatttaaatgcttttgagaaacagtattgtaagaaaggagatgaatgatggaggaaggtccctgagaaacaggaagagatgagatgggatccagagcataggtagaggcattctccttagaaagtgaggagagataaagtaggtttataagtgtggatgtcaatgagtttgtcagtatggggacagaaagttgaagttgtttactttatttatttatttatttatttatttatttatttatttattttgagacagtcttgctctgttgtccaggatggagtgcagtggtgcaatctgggctcactgcaacctccaccttccagatttgagcaattctcctgcctcagcctcctgagtagctgagattacaggcatgctgcaacatgcctgactaatttttgtactattaatagagctagggtttcaccatgttggccaggcttgtcttgaactcctggcctcaagggatccgcctgcctcagcctcccaaagtgctgagattacagacatgagccaccgcgcccagctgaagaagtttacttctaatgacctcccttttctctgaagtatgaggtgacgccatctgtgagggagggtgtctatggtctggtatattatgaatggctcagcaaggatgtcttctaactgagcaaagggaaataatatatgatgcgtttatctccattaataacactcacttgggttcaatcggaagagattgttggatggacagatgcatggatggatgcctataaacataataaatatgtattctgttttcctccactcaatgttttcaaaacgtttttttagaagtttagttcagggttaaaattttcttgaatcccatctgcattaagtaagtatattctcatttgttattcctcttcattattctagaccaacatttttcagccttggtattattttgacattttgggccaataattcttgttgtggggactgccctgggcattgttggatgtttagcaggattccttgcctttccccactagatgccaaccccccttccacagttgtgacaataaatattttcacagatgtcatgaaatgtcccctggaaaatagaattggccccatttaagaggttgtattcaaaaccaaatggaagggccctggagagagagagagagaagggggatttaagctagacaaatactcatgtacatttatcagttgatcatgacaactatactcatagacatgatcttcttttggcaaattagacaactgaggctcagagaggttaaatgacttgcctaacatgacagaggccataagtgatagagctggggtttgaactcatgtgtgttagatccctacaatttaggttctttcttaagcaacaataaaaaatattttagagggtgtccttgttttcatttttattatgttttaaaaaatcaaactaaacttaaaattcagcacaaaaatttaaataatatagaagtgtatagactaaaacaggaatgtatctgttgacattcctctgtaatcctattcactttcctagaggttatgattgtgattgttaacaatttaatgtgtatgcttttagacccttttctttgcaattataaatgacaaaggacagtgcattcatacacacacaaaactatttttgaataatgacatcatactatatatactattccataagctactttaaaatatttaatctttccacctcagttcttacaaatctacatcaccaccttttaacagttgtgtaatattcctcagtgagtgaaccacaatttatgtaactttcccatgttaatagatatttatgtagttttattttttttatggtacatggaacttgcatagatatcagtgtgtgtatgtgtcaggatttctgcttaataggggttttaaaagtagggagatcagaggtcttgcctatttaaaatcatgattgctactaccagattgacccccaatatggataaaccaaatcaycctcccaataacagcttataaaggtgactgtttttacccacttctttgtcagtttaggacaatatcgatttttcttaatttatcagtctaataggcaaaatgtgatatcttgtttgaattgtagttttataattattagtgaagttgatttttatgttcacaagctatttcattttcttttcctttgtatgtccttttcartggctggtcgcttcaaaatcctcccctctccaggcyactcccacactaaactcttcacctaaggcaaccactaatcagttctgttagtataatttgtgtttcctaaagttttgtataaacggaataatgcagtatatacttttcttttggtctggcttctttggttcagcatagttattctgagattaatttaagttgttatagtgagtcaatagttcattcctttttagtactgagtagtattccatcatatataccaaaatttggttgtctattcactagttaatggacatttgggttgtttcagtttgggtctgctgcaaacatttgtgtacagtctgtacgactatatgttttcttttttcttgagtaaacatgaaggagtagaaatgactgagtcacatagtaattatacatttaatttttaaagaaaacgtaaaacatttttcttaagtaactgtatcattgtactttctggaagagactgtaaaactcatgttaattctgtatatgtttggtggaatcctccagctaaactctctgggtctagagatttcttctttggaagtttttaaactatgaattgaaattttttaatggttataggactattcagatgatctatttcattgggtggtttttttttttaattcactatgacattgtatgattttacattcccatcagcagtgaaagttccagttcctccatattcttttcaacatgtggtatggtcagtctaaaaaatttcaaccattctartaggtgttcagtggcatcgcatcatgtttttagcatgcatttccctrttgacttaatgatgttgaactttttttatgtttgccatttgtatgttttctttggtaaagtgtctattcaaatattttgcttattctttaaaaactgatttacttgttttcttattattgagttattgagttttgggagttctttatataatatatatataatacaagttctttatcagacatatgatttacaaatattttaactcagtctgtggtttttcttttcattcttaacagtgtcttttagaaaatcatgagttttcaaatttgatgttcagtttattgattattttatgaatcattgtatctaagatatctttggctaacctaagattacaaagatttttctcctcgaaattttatagtttcagcttttaaatttgattatagcccattctgagttagttttcttctgtggtataagatacgaattgaagtttttttttttttttttttttgcctatgtatatcacattgttccagtaccattgctgtcctttctccactgaattgcctttgtaaaataaataaataaatttatctgtatagatgtgggtctatttctgggctttctattttgttccattgatctattcacctatcttgacatcagtgccacactgtcttaattgttgtagctttataataagacttgaaatcaggtagtgttagctttccaactttgtttttctttttcaagattgttttggctattctaggttctttgcatgtccttatacatttttgaatcagcttgtcaatgtctacatacaagcttactggtatttgggttgtgttcagtctgtagatcaattttgtgagaatttacatcttaacactattgagtctttatacctgcaaacaaaatatatctcagtttatctagattttcttaatatttctcagcaatattttgaagattttagtgtacaaaatctctctggcactttgccttgcaaattctcacttccttgtctttcccatactcccaattcagtcttctcaacgtagggatactactgggttccacttgggttccccttcctgcactgcagcctgcaaaactctaagctgggaaactcatagggctgacctcatttgtttttttcagtctctcagcattcactgtccttcactgctggatttccaatgcctttaaaactactgttgcatgtatttttcctagttttgttttgtttttacttgtttcaggctaaatgagtaaaactagtttctgtgccctatcttggccggaataagatagtagctgtttgtagtagtattttagtagtagtagttagtagctgttaatagtagtagtattttcaggtgacagtttggccttttacattagaattgcaaatgtatttgttttttgcctcagcaattccagtccctcttctaggtggtggagatagagcagtgaacatgacagacatgcttctatgttgtgtaaaatctagcttggagacagacagcaaacaaaatcaataagtaaaacgtgttatatgttagaaagtgataggaaatgctgaagagaaaaaaaattaaaatggaaggaagataggaatgcttgcgtagagggaggcatgtcattgttttaaatatattgacctggaagggcttactgagcagagtatgtttgattagaatcctagaagaatggatatctgaaggaagatcagtctgggtggaagaaacagtcagtgcaacgacctcatgtattcgaaaaatagcaaggaatatttgtaacaactactacagtgtttgagctcacaaaatggtggctctttagactattattactaatgatggtggaattaggaatatgacctagaaccgtatggcctcaacattaatctgcttgctgttaagttacattttgtcttccttacaatcatgaggcatatactcacggtttgtgattgttcatgcattgtttcttatcattgtccaccttttacacagcttgccttgtgttctcaatcatgttatttccatgcccatgtagtctgtgttgacccttgcctgatgggatattgggctctgacatttctctttacactaatcactggggttgattttgttagtctcactggctagacagtggtctcctttctccatcacatatgtgtatcatcccatagtgtatgcacttgggctaaaaggttggtctccatggagactggaaaatccttaagtacacatgagacattatataaaaattctaatcacagctccttctgcatgccttcggcacttcttatagcatccaaggcactgtgttgttgctttttaattttattttactttttattgaatagataatgtaccatggcatgaaattataaaagaacaaagtgacataggagggaaaacacagttgttctccctgtattccccagccaatcattagtcctaccttgagacaaacaatgtaatcagattctttggtatcccttcagaactatttaaggcatatgggcatgtaattgtgtttagtctccttccatgtcctacccccacccatagaaggcaccttgacagctcctttaatttctttcttaccacactctgtgaagtgggtgatgctgtccctatgttacggatgagaaagccaaggctcagagaagtgaggtgacttgcctaaggtctcccaggaaggacatggaaaatccaggactaatgccatcttttataggcattttttcttccaaactgagaagtgccaggttctgtgccttgagcatagtaggagatacctaaacatttacctgtagctagagtgattaagaaaatctctgattctttgagtcatgttagtattcacgttacaaactctagatataaggccaacaagcatcaactggtgggtagcattcagaagacaaaaacttgatctaattattctctagatatcttccttctttctccacagatctatttaggtccacctgaggaaagcgctgcaccgccagtgcctccgcctcgggtgacagcmagaaggcacaaaccaatcacgatttcaaagcgcttgctgcgagaaaggacggttttctatacttcttccctggatgaaagcgaaggtcagtactgaggttcacctttagcttctgaatggtgattagacacaaagaggatatcgaagggcagaagcggtggcatgaccatttttctctctataaaagtagacctttcctggctcctgagcttaaaagcagccagggtttgtagtttgtgctcagagaggggattaagcctttgacagcagataggatggtgatgagcttgtaaaggaagttaccacgtggaggatccctataaggccagtgcaggatccaaggtgttcttagatttatgcccccaatatattgaaatgggtgagcaaggtgaatgttgtgaaattttaaattcaaatatagcaaacacggattggataactactatgtgccaggtactgtgctaggtgaaattaagatacattgcttgccctcacagaagaaatggagacatagataagtgaagaaataaatgccttcagtggaataattgctagtgtggagactacacccattctaaatgtgcctctgccctcctaytccactaagaccatttttgtcaggtttgccaataatctccatgaggccaaaccaaatagctacaacattgttctcatcatactcagtttgtgagtagcatctgacacagttgactaactcctccttcttgaaacactttattcacctggctctcaggataccagattttcctttaatctcaccagataatccatctcagtcttctctcctggttttccttctcttcccaactttacatgttagaaggtcccagagcttttttcttagtcctgttctctgatcatgttcttttcctgtgtgatctcattaaatttcatggttttacatatcatttaaatgctaaagatgatttccaaatttatctaagattgatatcttgcctcttttgtcatatcaaatttcctgctcaacagttctccttggatgactcatgggcatctcagtttacactgtgcaaaacataacttgatgcctgactctttcttaacctgctcctactctggtctcctccatctaagtaattggcagcagcagtcatccagttgctaaggtcaagaactttggaatcatccttggttactactttccctttttccttcatattgaatccattggcaattcttgtcagctctacctgcacattatatgctaacttctactactgcccactgcttctatcactgtaagccactattatctcttacctggtatcattgcttgccttcttccttgcctgtaattcattctccccggcagccagtaacagcacatcctttaaaatatggaaatcaggattctgcaagcttcccaagcacacatcagcagccggctcccttactgtctgaatcatcgacctctctccatttccaaaatgtcgctttctaacaagctgacattggacaaaccagacgtcaaagggcagcgggtcattatgagagtggacttcaatgttcctgtgtagaataaccagataacaaacaaccagaggattaaggctactgtcttaagcatcaaattctgcttggacaatggagccaagtcagtagtccttatgagccacctaggccagcctgatggtgtccctatgcctgacaatactccttagagccatttgctgtagaattcaaatctctgctgggcaaggatgttctgttcttgaaagactgtgtaggcccagaagtggagaaagcctgtgccaacccagctgctgggtctgtcatcctgctggagaacctccactttcatgtggaagaagaagggaagggaaaactctgggaacaaggttaaagtgagcccgccaaaatagaagctttccgagcttcactttccaagctagggaatgtgcatgtcaatggtgcttttggcactgctcacagagcccacagctccatggtaggagtcagtctgccacagaaggctggtggttttttgatgaagaaggagctgaactactttgtgaaggtcttggagagcccatagcgacccttcctggccattctgggtggagctaaatttgcagacaagatccacctgatcaataatatgctggacaaagtcaatgagatgattattggtggtggaacggcttttaccttccttaaggtgctcaacaacatggagactggcacttctctgtttgatgaagagggagccaagattgtcaaagacctaatgtcccaagctgagaagaatggtgtgaagattaccttgcctattgactttgtcactgctgagaaatttgatgagaatgccaagactggccaagccactgtggcttctggcatacctgctggctgaatgggcttgractgtggtcctgaaagcagcaagaagtatgctgagactgtcacttgggctaagcagattgtgtggaatggtcctgtggggggtatttgaatgggaagcttttgcccagggaaccaaagccctcatggatgaggtggtgaaagccacttctaggggctgcattaccatcataggtggtggaaacactgccacttgctgtgccaaatggaacacagaggataaaatcagacatgtgagcactacgggtggtgccagtttagagctcctggacagtaaagtccttcctggggtggatgctctcggcaatatttagtacttttctgccttttagttcctgtgcacagcccctaagtcaacttagcattttctgcatctccacttggcattagctaaaaccttccatgtcaagattcagctagtggccaagagatgcagtgccaggaacccttaaacagttgcacagcatctcagctcatctttactgcaccctggatttgcctacattcttcaagatcccatttgaatttcttagtgactaaaccattgtgcattctagaatgcatatatgcatattttgcctgttaaaaaaaaagtgagctgtgttagcttagttctcttttgatgtagcttatcctgattagctttgtcactgtttcactactcagcgtggaaacaagatgaaattccatttgtaggtagggagacgaaattgatgatccattaaatagacaataaaagtgtccattgaaaccatgaaaaaaatggaaatcagatcacatcattccctctgtgccaaattttcagtaacctcccttcatacctagaataaaatttgcattttattcttcattatatgactgttgcttatttctgtgaccttcatttctgaactttgctctctcactgtctcttttgctctctactgtaatctcattgttcttgcaggtccttacttgtgtcaaacttacctaagggcctttgcatttgctactctcttggccctaaacattcttcctccagaacttcacaaggctcactctttcattcaggtgtctactaaatgctttcttctcatagagaccttttcttaacattctacttaaatagttctttctcctcctccaatcactccctatccctttatatggcttaatgcaactcatatcccctgcttctgtttgttcacatgtttattatctctctctcccattagaatgtaaaatctatttgattaccaggccctagaacaactcctggtatacatatcatgtatttagtaaatattctaagaatgaatgagtggatgtataaggaatgatgaagagattatcacttaggttaagggatcaactctttgacagaggaggtgagctggcattcaggagaaagtggaggggaacattggatgcctgtctgttgttccatagtctcatttttacagaatgggtttgtttatttacagtctccccaaatataaactctatgccagtggccacttgttttttttactatatccaaagcatgggcacagtgccaggcatatagtaattccttaataaatgagtgcaaaaaatgaatgaactgtgtgtcagtagatagaaggtctaatttaatcttggctactagcctgctgaataacttgagctagtcacttcccctctctggacctcaatttgcccctctgtggtgatgagggctttgggacagaagatctccaatgaggttacccagtctagacattttttatttttaacttttttaaaaactgagctataattcacataccataaaatgcaccattttaaagcgtacagtttaatggtttttagtaaattttgtgcaactatcttattccagaacatattcatcatcccagaatcccaatacttttaaatttacttctcccccaacctctgacagttactgatctactttctgcctctacggatttgcctattctgaacatttcatagaaatataattatagaatatgtggacatttttgggtggcgtcttactcttagcataatattttcaaggttcatccacattgtagaatgtatcagtacttcattctttcttatggacaaataatattcctttgtatagatgtagcacattttatttatccattgatcagttgatggacacttggattgtattcattttttggttattataaataatgccgctgtgaacattcatgcacaggattttgtgtggatgtctgtttttaattatcttgggtatatacctaggactggaattgtaggttatatggtcggtctatattaaaacttttgaagaattgccaggctgttttccaaagcagctgtacctttttttttttttttttttttttgagatggagtctcacagtgtcgcctgggctggagtgcaatggcgcgatctcagctcactgcaacctccgcctgccaggttcatgtgattctcctgcctcagcctctcgagtagctgggattacaggtgcataccaccacaccaggctaattttttgtatttttagtagagatggggtttcactgtgttggccagactggtctcaaactcctgacctcatgattcgcccacctcggcctcccaaagtgctgggattacaggcatgagccactgcaccaggcctcagctgcaccattttactttcccaccagcaatgaatgaaggctccaatttcaccacatcctcaccaatactttgtatagtctgtcttatttattctagccatcctatgtgagtgtgaatccataatctcatttaatgttcagcactcccatgcgaggtaggtatgctgaattctgttttatagtgaaggcactggaagctcaaagatgatgagtagttttcccaactaacacagctactaaatgacagaacaatttgcactcatctatcttatcctaaagcttatttatttactataatatcacacttcctataacctgtctgaacactgttctgagaaggaaccaatcctgctcaccagtagcatctcattatctcactctgaaatttgatatcccttttgtatatagtatgtcagtgactcctttcaccctcgtcatggactccatcacacctccataactaagccctgattattccacttctttaacctctcttgaatctgcctctcttttctgacgcagctctagtttggatccttctcaacagcggtcccctagcttgtctttctgccaccagtctttctggtccaagctacttttcattggaacgagcctatttttcattacttttcgtaatgaacccaaagggatgtttaaaaatgcatatttgataatgccacttctccccacccmcagccctctgccccccaaaatcattgtcttctgtgactcaaaggcagagtttgtattcctgagcatggcattcatggacttcatgatatagccccaacttattgcaacaacctcacctccagctacccacactttttcatctgtaattggtccctatgctcaagccaaaccaaacttttaattatattttcttaggcaaagcatggtctttcactcctccaagttgttttttgtttgaatgccctttctactttgctccaccttttggaattcttcaaggcccagcttaaaagttacctgttttataaagaccctctctaatccttgcagtcagtattagtactgtcttactcctagcacttatttgcatgaatctacatgtattataataattgatttatttctattactgtaccagtgtgtatcctctcaaagcttctccccacctcttacccacccatggaagagaggcctccactttaagggttggccccacgcctatttatgaggcctccctgtctcatcctgattcactcccagttcttcgtagtccctgagacttgtctgtgtgttttcctgtagaaatgggtggctggttagggaaaggggatggcaccgaacttttattacctgacagagcaatgaactctcttcagaaagagtaagtagactctggaagcagacttcaagatttgaaatttggcgtttccacttagtagttttgtgacatggagactgcgggtgtcttagattccttatctgtaaaatggggctagtaacaatgtactactttatagagctgttttgaggattacatgagataatccaggtaaagcacttagaacagggtctgccatggtataagtgctcaagtaatggtatgtgttgtctttatcagtattattctcattattactgtcattgtcactattatcattatttttattcaccataccccagaacctagaaatagtttccctgctgaaaggcctggctccgaagtcatcatggcttctatcattacatttcctattttcccgagccagcagaagatactttcctgagtggaaggtagcagcctctctgaggctgtgtatgtgggtcctctttatgaagattggctctcttgagatggtgatgttactctatggcctgtagggcacaggcaacctttatttccctaagggagagcagagatggagtcacttgtccagaagaaagtattcagataggaacatgcagctgagatgttgggctaaagcatgtgagggaaagaatttatgtcaccatgcactttattgtttggagagagtagatgtgcttgagttactcctgagtgctgtgtttaaagatggcctctgccacaaggcacgtcctggaagccagaggctctagttatttggcgctcttgtgctcatgttcatgccattatttgtgagcctttggtagttttttgtttgatggcctctgtctggttgcacttatgctagggttaataaataaagggctatgtgtctactttgggacaaaattagggagactataggggaactccccttggttccggcccctttggcagtggcatcagtggtggcaaattcccaaggagaataaaactgtctaggggacaaaaacctttgcagcaagacttcccccatggaaacttttgcctcactgcccacccaccacataatagtgtaaataataaccaccaattaatgagtgtctgttatgtgccaggcactgaaataagtatacctaccatctcctgtaatcctcaccataacctcatgagaccggtattctttattattcccgttttactgaggagaaaatttgaggtacagagagaatagggaacttgtacgaggtctcacagtcggtaagaagcagaactgagattcagacctggccacctggcttcagagcctgcatttcttttaacattttattgcgaagaattccaaacataaacagaaattggaaacaaacgtattgaactccccacatttcagcatttaaaaacatatatcaagtcttatttcatctatacccctacccgttcccccaacctactcatcatgtcatttcatttgtaaatgtttcagtgtatatctctaaaagaaaggaactcttttaaaagcaaaaccgcaatatcatcatcatacttaaaataaaacaaaacagtgattccttaagatcagctatccagtcagtatccacattctcctattatctcattttgttaaaaaaaatatcaagatctaaataagatccatgtattgcaattggttgatatatatctcaggtttcaatttgctggccggaacctctgttctttttttttattattattatactttaagttctagggtacatgtgcacaacgtgcaggtttgttacatatgtatacatgtgccatgttggtgtgctgcacccattaactcatcatttacattaggtatatctcctaatgctttccctcccccctccgcccacctcacaacaggccctggtgtgtgatgttccccttcgtgtgtccaagtgttctcattggaacctctgttcttaaccactgcactcgaagttttttatgactatggaaggtgacaatttctttacagcaggcattctcaatctggggtttattgacagcttcagaaggctctgtgaatcactaaaaaattagttttcaaaatttttgctatatttgtgtgggttaatttttctagagagatggtccctaggtctcattagggtctcaaaagctttaagtaagtctcagaaccactgaaagacatgtactaatgtcagaggaaattgtagaccacaaaagctggggaaagaacagttggaggtttccttccgggttggagaacgaagttaaagtatgttatgttgattaacttaaaatttgagagaccttaacaaaatacttttcagagaagtggttaagaattaactgatgatgtcttcatttgcaaagaatagaatatgccattgactggggactttaagtcttttttgagtgacatattcctttaataaaacctcttggtttactgtggcttattgaattgtggtggtgaaaatcatacgcggatcttgaattccctatttggattggatctgtggctttacatgaactgggaagggtagagaatgattttgtgggatrtagttggtttgtgccacagtgacataactgctttgaaaatgtatamaaattttcaaaattaagtatgtatgcatgtatcaaaatgaaaaggttttaaaagttatcattaatcttccctcttggcaccaacttttcctagatgaaatccaacatcaaacaccgaatggtactatcaccagcagcatagaaccccccaagccaccacaacaccccaaactacctattcagaggagtggggaaactgatcctgggaggaagtccccaagcaggcctattttggatggcaagttggagccctgcccagaggtggacgtggggaagttggtgtctaggctgcaggatggagggaccaagatcaccccaaaggccaccaatggacccatrccaggctctgggcccaccaagaccccctctttccacataaagagaccagctccccggcccctggcccaccacaaggagggtaagtgcttgggaatcccatgggagccagagctgaccctaactacttttcaccttgagatccttctgagtttggagatatatttaagtggaaatatgttccagtttactaccactaatattggaacagtgggcaagatcacaataatcagtcacaataatcactagaatgtaagctccatgagggccgggattttttacctgttttgttgacctctatatcccaagtgctatgtgcctggcactgtactaattgctgatatactatttcttatcctcacaatcccactgtaaagaatgtattattcttaatattttctttttttttttttttgagacggagtctcactctgtcacccaggctggagtgcagtgacgtgatctcggctcactgcagcctccgcctcctaggttcaagtgatttccctgcctcagcctcctgagtagctgggactacagacacttgccaccatgcccggctaatttttgtatttttagtagagacagggttttgccatgttagccaggctggtctcaaactctcgacctcaggtgatccacctgccttggcctcccaaagtgctgggattacaggcgtgagccaccacacctggccaagaatgtattattcctgtttttttttttgtttgtttgtttttttwaatttggaaatggaggctgctgtagataagtgacttgccaaagattcacagctaataactggcagagctgggatctaaatcttaccatgtctcacaggcaccaaagcctgcgttctttccactgaggcagaactatcactttaccttcctataagaagctatgaatctgtgaacccttgttttctcattctccctttccagtttgggagaaatagggacaaaggggcacaacttctgccaaactctggatttttgaaattattgcaaattcaaggtgtggctgacttcagcaaatttaattaactattgcatgttgagacttatgttgagagactggggctaatccagaggggagttttaggggacacaattctatgaagatagtaagatataatggacaaaataaggatttgagtatcagaaaggcttggatctaaatcctagctcttttactttgtagctttaaggaatttcacaatatagcaaaatgtaaaaccttaaaaaatggttaagaataatttatttgacaaatatttattgagtactgaccatgtacctggccccattctacatgccgaagacatagaaatgaataagacttatgaagtccctgtcctcttgaggtttagataagagggcttggcagactatggcctgtggacccgattgggcccactgcactgcctctttttatatagcctgtaagctaagaattcttttttacattttttaatgtttggaattaaaaaggaaataatattttttgacatgaaaatgttgtgaaattcaaactttgtccataaacataaatacaccccttcatttacatgttgtctatggctgctttcatgccacaacagcagaattgagtagtagcaacaaagacttcatggcctgcacagcctaaaatattaactgtctgacactttacagaaaaagtttgctggcctttaccttagattctagagtactgataagaaaacatgaggcccagaatgggaatcgggaggttgggagaaggtaggatagcaaggaaatggcaggaatggagttagtatacaaaatatttgccatgaatacttaaacacttggtggagcagtgtcacaggtttggttccaaactttctagagaaaacaaaaagagagaaaccaatggttatataactaagttcctaaggtaaaagcaagccaattgttcaggtaagccataacttttctggttttgaggccagggaaaaatttcttccatggattatttcatataacaacctcagtatgaaccaatggcattgtctcagagcacaatttagtaaaagctattcagtgtgcggatgggagggggtccagtacaatttctacaagtccagtacartttccacaagtagttgactctgaatgctctggtttgatccactgatgctgatgtgatcactcatgcgatcacagttaatttatgtaagctgtttgtaccttggtttccagatctgtaaaatgggaaaacagttcacctgttagaattattattgctaggattaaaaggaatgacaaaatatctggcgtataatcrgcattcaaaatatgatattgatttccctcccctgtccctcttctcactatgacttggctcttctgagacatagccaagaaaaggaaaactttaatgtagacctctgcttctgtttttaagtcatgtcgtgaccttcctatcaatctgggtagaaggttgggtaactcaacttatactcgtcacagtaaaatttgtcttgtctgttgccaagccttgagactggccagattctatcagctcagcgcacacartaactcagccctccttccctccctcctgcaaagttcaatcccagtggcattcccctcttccccttcctccagtcctaccctgggctgctggcggcagctactctgatctaatggtctcagctaatgtaagtactgatctgacttgttcagtatcagcctaactatctaaatctgggcctcagctttgcctggcttcattttctgctttcaatcagttagcaacaggctggcacgatgcagctttttttcaaaaccccatgcttccagctttggctacagaaagcagaactgaggtggttttggccttggtggagaaccccccaaacctctggtatagttgcctctttgaacctaacctacactatctattcacttcttacttcctccttgctcccctcctgattctggctgcttctcctagtagattccctggcatctgaagagttatcggttaagcaaaagccacacacagctctgaccctgtgctataactggtagttgtttgctcctggtactggccagtagcctgaatggcagtattagagggagggaactgttacctcagccagcccagtctgtaccttgcagttgtcaccccatttcagctctgttgtttaggactttgcctgccatcctgaggatcagtacacaggctccattgcattagtgagccagctgtgccacagtcctgcccccatcttcaccccttgcattgacttaacatttgagtggccttaacattcttcacattttttctcagcaattaaaaataacaaaagcatggtgcatgttaaattgcttttttccatgacagtcaactttaaaataagaatcartagtgtttgctgatggaattttatcaaggatccttttctgttccagacatgagcttgatactttcactcttctgttgcgtctaatcattgtgataggccttgtgaggtatgatttaccctcccctttttatagatggagaaacagaggctcacagacacaaaacaacttgctcagagttacctaggttgtaaggtgcagagatggggcttgacctcagcttcttgggttcaagattgggactctttttctttataccatatttcttcagcagcgttggccatcttctcctttctgtttttctaaggaccacttacttttgggggggtacaaaattatacaagcctatttttttctgccttcatttgagtttactgcctcttaggtgtcctggctttgcaaagggcaggcatgtagctaccgcaaagggatttaggactttcctttgggtaatgaagagggaggagggctatatcccatctactttacatgtatttgtttatttaatcaggtataatcatatgcaaagggagagacaaaaatgaaaagccattgtctctgccttccaaaggtttgtggtgacactggcatgcaagcagtcagtcccagccaatgtgattaatgttctagtaggggtgagaagaaattctagtaggagcatggagcaaggagaccttcattctacctgaggtattgagatgaaagtgaagagcacaccatggactgggactttatgacatatgggttgaggggcccttcttagctcctttcctctgtcttggctggaaaggaaagattgcatctggtggcatgcttttgggcttgtaaggccttgctcagtcacagagccattaattctccactgaggtgactaatgttatgagtggcatttgcatctactctaaaagtattaggaacagacttgctcttgcagtaatgggtgttgctggccattatccacattttcttgtttggacttatgctttaataatctactgtttggtttttattctctacttttcttggagcctaacgccaaattgttttataaggataaataatggctaaggaagcaggaaggctttaaggtgagcatggaggagtgtcatagaaaaaaagaggtaattctaggtgactgggggaatctacaagaggaatcaacctcctcctactctgtgccttcaggttgggtatagaggaatataaggaaaggtggaaaaaagttgctaaggttgaatactgatgaccatcaggtcccaagaactctgcaaatgttaagattctttggttatggtcatttgacagagattagagagagagggaacaggtggggcttgagaaggagatcaagtttgtagtaaaagccaggtttcggaccaaagttgaaaagaaattaaaaagaagtacagcttggtggaaagcctataggctcaagtgacttagtggttaaaagctcaggctcctgaatcttccagatgtgagtttgaatcctggctctgcctcttcctagctgtgggactttgggcaggttacaacctctctraaccttagttttctcatttgtataatgaggatagtatttgcgcccataggattgctataacaacaaagtgagtcctctacatgcctagcacatcaagagtactcagtaaatgatagcagttgttttgcyttcataggagactattactagctacttgatcttagttagttcagctttacttctttgagccagttttctcaactgtaagtggggacaataccaccattgaaggcaaggattttgcatggattaaattagattaggtatacaaagaatctggtaaaataatagaggcttaagaagtggtagtattactaggtaacaacctcttaggaaatggcagacatggaagatggggtgtctactcttctgtattcgaggccctttgagaagcctcaagcctaaaatgtagatggcataaaagagttcagagttatattttcaacccacaacctgtccctaccatgccaaacacctaggaagaggcgaactaacctcaaggtctaactcaagtctcattctgtccatgaagccttctgacaatcctaccccagttagctctcccttgattcacatattttggcacccaagattgaccctctaatgtggatgctrgtttatagtattcacacttgtttcccatgaatatgacttatatcccccaactcagttttgagctcctagagggcaggggtcatttgtgtgtctttgtgtgtgtgtgtgtgtgtgtgtgtgtgttagagtgtagggttgggcacaaaagccctcacaaaacccccatattgaataccgttcaatttaggtttcagagagagaaaaagagagagacagagggattaattattttaaagcaggttaagtacatgtagagtacttcaaaaacagcctataaaagtcagctgggtctaacatttaagtcagtccagcaggccagcatggcacatgtaacgagcctatgtaacgagcctgcacattgtgcacacgtaccctagaacttgaagtatatttttaaaaaataaaaagtcagctgggagagatagaggcttatagacttagatcattggctcattcatctggaaaaacagtccaatccccatgttatactggtaaggaaatgatccgctgaaggtcacacagaaagttagttttagtattaatcatagaatccaggtttcttgactaccagttacatkactctcccctttctgcctcaccagtttgatactgtggcttaactgtgactgagacacattagaggcaagagagaacaacatcggtgtcttcagccaagaaaatcctttgctgctacctcaaagctttacttgtaatgaataatcatttggaggtagcaataaagggcccaagaggaaatgaggttaatgatgtttgttttccaaggccctaggttcatgttcattaggatgtggctataacttgggaatgaatagggttcatattttagggatgtcatctggttcactcatcaaggcatggtttcaggtagacatgttttccagctctaacagtccagcatatcatttctttacaattactgccttcccctccacaactccgcctcccagcagtaaccagtggaaatggggcagcactctcagctctgctactctgtggggtgcagtgaggaagcaacatcatatggcttaatggtcctcaatcttggctgcacatagcatcacttgggaagcttttaaaaatacccatgctcaggatccatcctaatcaataaaactaggacgtatgaggktggggtccaggtactttacaattttaaagctccttacatatttctaatgtttcactagggttgaagaacagtggtagttgggactacataggtttcagaaatcagatggactgatcaactatgaagttacttttcatctctgagtctctgtttcctcagctgtagaacggagataatactttctgtcttgcaagattgtggccagtgttgaatgagaaaatgtgcataaagcactgagtacagtatcacagtacctggaacagaacaactgttcaataaaggttagctaaaaaaattttgccagtactattgtattaccattactattattattataatttataatttttatattaccaatgataacaaaacagcagacaactggaaaggcagtgggtgtggaaacaggaggtatgggtttcagccctcactctaccatttaacctatggttgtggatgaatcagtttacttttctgaacctcagtttccttctctgtaaaatggggataataagacctatttattcatctctctcaagcttattgtaaacattaagcagttatcgtctgggagagtgctttgaatagtataaagtatattagaagaattggattattattatcattttggttaattttttctgctgcaatkctgtatacccagtctgatgttaaggggaatgacatgtccagaacgtaagatgcagactaaatggagagacaattcatatgtgtgcacatgaatagtgttttgtttcttccttaattagaacaccaatcacactgtattatcattatttctttacatatatatcttgctcaccagaatggctagatggatgaattttttaaaaaacgtacatattaatatataagaacttcacgaacatttacatggatgtgaattacatatacctactagggtgttcagagggttgagattttagctgggtcttgaggaatgattataatacacaggagacataagaatagggacacatatagggcaagaagcaggacagagtctgacgcttacttacctctgctgtatactaggcattgtctataggtcatctaattgagtccttaaaatcaccttgtgaggagggtttttctttctttttttttaaattatattttaagttctgaagtacatgtgtacaacgtgcaggtttgttacatatgtatatatgtgccatattggtgtgctgcacccattaactcatcatttacattaggtatgtctgctaatgctatccctccccgctcctcccaccccatgacaggtcctggtgtgtgatgttccccttcctgtgtccaagtgttctcattgtacaattcccacctatgagtgagaacgtgcggtgtttggttttctgtccttgagatagtttgctcagaatgatggtttccagcttcatccatgtccctacagaggacaagaactcatccttttttatggctgcatagtattccatggtgcatatgtgccacattttcttaatccagtctatcattgatggacatttgggttggttccaagtctttgctgttgtgaatagtgccacagtaaacatatgtgtgcatgtatctttatagtagcatgatttataatcctttgggtatatacccagtaatgggatggctgggtcaaatagtatttctagttctagatccttgaggaatcgccacactgtcttccacaatggttgaactagtttacactcccaccaacagtgtaaaagtgttcctatttctccacgtcctctctagcacctgttgtttcctgactttttaatgatcaccattctaactggtgtgagatggtatttcattgtggttttgatttgcatttctctgatgaccagtgatgatgaacattttttaatgtgtctgttggctgcatgaagaggaggggtttttatactcatttcgcagatgaggaaatttacagtcgtagaggtgaagtacctgtctagggtcctacaacctggaagcagcagaacaagatctgaaagccaggtctacaaaactccagactctgtctcacttagaagtaagagtcaagggtttgccttaatggggcagtaggcagaccaatttgattagagtagaactgatagttaaaatccagggttactgcttgggacagtaatatgggaccagctcaaggagggccttgattttctgtgaaggagtttaaacttttatcttctacattttagagctgttgggaaagtctttaaagagcagaaaaacagtgtaaaaatacttaaattaaattttatagttgtatatgtagattcaatttagtatgtttttacatttactgtaaatatttttgtagaaaaaaatggatgaatataaagatccactgacacccttgcatagttatgtacatgtctatttcagtatggtcttcatcaggccatgagcactttctgtggacttttttttcacttgatattattttgtatgcctgtttttgttttgacctggtctaaatttttggcagttcacacataatatgtattggttaaatgcttgtatgaattgaattgtttgtttagcctttatggttaagtctgattttttttctgataagrtgcatgtttttgtgccaattgctttttcttaagtgttttttttgttttgttttgtttttttgtttttttgcctcttggattagtccatttgggcctgttcccaaaagcaaaattactggatcaacgagtatgaaccgtctcatatgtatgattttgtacttcatccacattgttccagaatccttgatgccctctagataaaataagcccagttcacattgccaccagcaatgtgtgagtttacctgtttcactatagtcctactagaaccatcttatttaaaaagtgtttatatttattttgtactaactgacaaggaaactaaagacacagaggcaggaaagtgagttagaaaacaactataatagtcaaggcctaagtgaaaaggacctggatatcagtgatgatgaatttaagcaattcaaattcatcatcatcagacatttagtaagcacctactatgtacctggccctgcactaaacatattagtacctgatttaatcctcccactatctctgtaagataatatattgtggatctttattatatagctggggaaactgagacttagggaatggatatgacacacccaagatatctgaaactccagagctggggttcaaatatagactttctgaagggacagttgccagaaaaattacaaaaaaaaaaaaaaaatagccagagttgttagtcaccaagaagaaatggaggccaaggaagttggcccaggtaactctcatattgggtgcctgctcatgagtagtgttctgtttggctaaccatccaagttcctggtatcattttctcttccaggggatgctgacagtttcagcaaagtgcggcctccaggagaaaagccaaccatcatccgccccccagtgaggcccccagatcctccctgccgggcagctactccccaaaagccagaaccaaagccagatattgtggctggcaatgcgggggaaatcacatcatctgtgtaagtagggttgtacctcaaagttgactgaagtcctgtactaggccactaggaatgctttcaggatcaccatattaagggtatacagtgcacagccctggggcatccttcactttatagtctagggaaatatcataggccagccctgttgggagtattccactcaatgctcaaagctgagggatttctctaaagctgaaacctttgattcttagtacctgctaggagacccatttttcttagcttcctttatctctgtatggtgatattattaccttctgattttagcttccttggctcaggatattttttaaaaaaatttcttgttatttctactggttttaaaagtaatttaatgaacagattcattcactgtacttatgcttgaggcttttattttaagcaaagggtatgatttaaawtttttttcaaaatgactttggttctccagagagtctcttacagggtgggagctgagctgatgtgcaacagaccttcctgaggctgggccgcaagccaaggaaccaaggaaggagcagctagggtgggaccacagcagtgctcagggaccagctttgcttggccacaacgcgcttgcctgtcctctctttatcgactgggaccattctcagtatactgcctcctggtcttcctttttcttgtctttcttgttttccataattgtaaaattggagaaaaagaagaacaaagcctccacagctttgactaattagcttactatatttacaaaaagccaacaattatactttgaaatcaagactggtttcatttatttcccccaagaagagcctgactcagcaacatactcagaccattctgaagcaatggggataaagagtgtcagctatggccttaggggtgcctatgggctctgggccatttcacatttgtatgtgtagggcctttgccagcaaaggcaggggctggcattggtgtcccatctggttcagagtctcctgtcctttctgttggccattggttctcacgtgtataccaaagcaacttatgggacttggttggcttctgtttgcagggtggcttccaggaccaggttttttgaaacagcttcccggaaaacaggaaggtaagatatggaggtgacaaaagaaaaaccaaatcgccttttaataactgcatccttagcatacaattgtgctcactctaacatctttctctttttgtttctctacagctctgtctctgtctgtcactttctcttccccaattctgtctctccatccctatctgtctgtcacctgttcacctgtgtgtctatttgtttctctcatattctttttctcacttggtgtctctgtcctttttttttttttttttgagatggtgtctcactctgttgcccaggctggagtgcagtggcacgatcttggctcactgcaacctccaactcccaggttcaagtgatcctcccacctcagcctccctagtagctgggactacaggtgcacgccatcatgcccagctaatttttgtattttcagtagagacagggttttgccatgttggccaggctggtctcgaactcctgacctcaggtgatccatccacctcagcctcccaaagtgctgggattacaggcgtgagccactgcacccagccagtgtctctgtcattctcaatctctttctgtctgtctgtgtttctttgcctgtgtccccatagttgtctttatctgtctgtttctctgttcatgtcactctatatgtctctgtttttctcttcctgtgtctctttgtatctgttgtctctttgcctcttcatttcttcatctctctctctgctcatctttcccttttctctctcacaagcacatatgtctgtgcacacttgtgtgtgcatgtgcatgtgaacacacaccaagcagtatctcaaagactttacacccaatattttttgttagtttttttttttagtttacttttttgttattttacttatttagattccattatatactcaaagggcagctgacagggatatgtagaatattacactctaagataaacagccttagggcccccatttcaaaggtaaacattggacttaggcagtggttctcaaactggctgcacatctaagtcacctggaaacatggagaaaaaagtcacatattcctggatttcattctagacccactaaaacagaatctctagtagtggggcctgggaatatgatttttttgttttattttgttttttccttccctccctttcttcttttccattagtttgttattaaaacttctcaagtgctggtacagactgtccaaggcctggaatttaggaccctttggactagaacatctggagagatatttggttagccttcagggactcttttgtgagtttgttccttcttggttatcagagagtttgaaattgttcctcctaacaggtgacaggagcagaactcttctaggtggtcagttaaaagcagaacaatatacctttcccagcagtggagttggggtagattttccatcctctagtcaaaactatgggaactgacacactaggacatgattctgcacagcagttcattctagctctgattgtcagtgagccacctggaacctcaggctgggccaaattctccttagacaataatttaccattcattctaccatagcagatgaaagtcagatcaaggccccagatttctcttactgatagcatgaagataaaagttttcacctcagaagttttttaagtaagcttaatcaaatatctctcttgagaaaagaaaaagaaaagaagaagggagacgaagagagtctcaaatattcttaataaggtggcctatgccttcctagaataagccacttgagaaataaataacaaggaaatagaacgatgtaaactggaatgaactggatatgtctacaggaaagctttttagaggaggtgatatatgagttggggcttgaaaaaagaatagaactagacagaaaaaatgctgtgggggcagttattgatctgcaagcttggacaggaaaccaaggcattgagaaggaaatatgtaagaagcatgaagaaagtccaatagaacttttaaggcaggtagacttacaagagggaagctatagccaaactggtgttgagagtgtgaaaagattggtagccactaccaatgggctgggctttgtcagccagtgctcgaggaagccttagatcaagcacaacctacaagggctatggccaaagcaggcacttcaggctagaatatcactctacccaccctatgtctgggcttccagaacctagatttaatcctgttctttattcctagattccattttggcaggaatgtaggtaagaccaaagtaggtacacttgctctccagtatgtcatgaactaccatcctgagtacccacaggctcctcccactcagcatccacatagggaaagcatcccttccatctaggcctccaccttgtaaccaccacttgcatcagtgcttccacaggttggcctctgatcaagatcctcagaccagtcacatagtcagtcccgtctatggtcattgttgctaagttcttctctcatctctaatgaaaatgatgatctttttaaactttgtcttgcccctttttggtccccatttgtatacctgactacggcctagcgtttgaatgacrtcacccccttattcatttcccttacacaatttaaacataaataactaagaagaaaatgagtagtggctcatcaagaacataaaggaggtgagaacatttcaaagaggcccgacagcttatggtttcagaagttattagtgttccactttggctagaatgtgggagtgaaaagagggaaacttagctgggggtgagaccagaaagatggattggagccagatcgtgaaggcattgtataacatactaaggtgcttggtctttatactgcagtccatatgcggatgagtcatagaaaggggggaagaatttcaagaatgacagtcacattctgagctgaccaagttgtaaaaagatcactttggtagtgggaaagatagatgggagagtaaagactggagaccagttaaggagactaattgtcctggcaagagttggggaagccctggcctatggcattcccagtgggaatggaacagaagggacagatttgagaaagactcaataagaccttgctacattttcaaacatggaacattgatgaaccgagaaagagaaaagtctaacttgggcacttaagtagatggtacaataattaatcatggagaagcaggttttatgggaaagatgctgagctcaattttggacacagtgattttgaagacacagttgttaaatttatacamattttttaaagacactttgagacttaggtagagatagatgttcagtgggtaactgcaacttaggctagcagttggagctggatgtatgtatacatagatttgggggttagaaatatgagtatagccactatataagtctggggagtggggctagtcacatatgctacaatgtgaatagtagcctgttgtggggaggtccctagtatttggtggcaattgaagccatggatgggaataagatcctccagggagtaagtgtaaacagactggagagaagagaaaaacagaaggttgaggacatagccctggggaccagctgttgtacgtaatgctctggccacactagagtgggtttcatttgccaagattttctcctccccaagctgtccccagacatgggtaatttagaactaatccaagcacatcaagaggctggacaaggttggtttggtcttctaggcaaaggaggattcatctttcacatggtacttgtctgtgtcctcacccttatccctgttagagatcatcacagaatgtagttcgtggtctgcagccagcttccctgggttctccaagcttcacatagtctggtactcagagaattgttctggcacctgaaagatgtcttcacatctctttaagcctgccagagaaggagccccaactataagcatggagctaaatgttttgaaacatctgggctgaatcacttctccatttttcaaatggcctctttagcactggcctagaaktgtcccccattcccccaatttacctttccagtcctgatttctagaatcttagtgaaacgtctttctttatccacagttctcaaggcagacttcctggagatgaaagttgaggctacaggtatgcagtccccatccctgattacaaaatcttgttccacataagccttcattacgggatctgatattttgaggactggaataacatgtagatcagaagggtgggaactcacttctacgcctcagttcattactctatcactgcctgacccttaaatttagtgactttcaattccaaggttttgtgtgattttaagtaaccttcctctttcatttctttttctcctagccaaactatggcrcgcttttacagattgcctttgaatcaaatttattaagaatcctaggctgtgacattttgggaaagtacatttacttctctgagcctcagtttcccagtttctaaaatgagaaggttggaaccttctaactctgacacctctcgggcctttaaggaaaccaggaacatgctttctgatrttataacagatgccaagaggctaccttagtgtctgtagatggattcattcctgcagaccaaatcattatttcagtcttacccacctgaaccttcattcttagtcctttatgtttgtccaatgcaaagcactttcacattcattatttcatttgatgcatatcacatgccaggagaagggaggataatatgtgttctaactcaacaaataaaggaactgaagttcagaggggataagtgacttgcaaaggtcacaggagactcagaggtcagggaaattcctttctctatcataggagttctgattgtttgactatcagattgctggcatgatgtgacctgataacacacataaatgagatccaagtatctggagcttggcttttcatgtgctccctaaccttctttttttccctgtcactgccagtcctcagaggtccgtgggtagataagcttctccttatcagcccctatggaggtgaagtccctgttaaaaggaagtttatagttattgtatgaccataaaggcagtgggcatgatgtgggaagaaatctcagaggttctagtatcaggcttctatttctccatgtagattttggggagtttgagttgaggtcaaaggcacaaagtgtccagccctggtcatagcaccatcttaggcctgtttcatgagatttgacttgtaagagcctttgcccagcaatccgctgttgctcagaagatgagctaccaattataggcttagctacctaccaagagaagccccactgatcagtggctgttaagtacttgaccagtcctcgctaattccctactctcttctttctctttcaggttttaaaagccttggcctcagaggaccctttccaggttctgaaagagtctttcttcttcaaacctttgtgtgcggagtcattttgtgttgaagagcagctccttcctagccttgcactttcagactctctctgggaggccataaaataaggagcatatgtcctagacaggtgtttatatctcctttgtattctgtcttcatcccctcagaaggtctgttttgagttcctataacactgtgaagagctggactccctcaagccagactctgccaaaaccaagatatccacttacctgagttgaagaggggagctcagttttcaactcttccctgaacttcctgcttcctcagagggccattgaactctgagagatttggggctaaagactgatctcaggggtcttaccttgaactgaaggccacttgagttggggccattgcttaccttggttggaagggaatagaaatgtttgctgaacattggagaatctcaacatgtctcctactgaggatatggacactggtgccatgtcagcgctctggtgctgcagtatgttgccaagagcccgtctgctcctgcgaggctatgagtgggatgagtgatgcccccacagcacctccatgtggacttaggaaggtggccttcctgctgttacatgcagccacttaggacaaatctgcaaagcatgttttgcatgtaaaagcctaggtctatttggattattctttctccttttttttgacagcttcctgtcaagcaatcaagaaacaaacaaaagctgaacacatttctttttaaaaaaaggagactgtgtttggtcctgtaggagttctattttggggtcaaatgctagaaaaattgttaaggtggattgaggccaggcagctgtcactgctgcttcatgtttgccttctgcacataaactcttttatctcctgaaaaaagcagttcttaacccagtgtccatggactcagaaactccatgatgcccctgagatggtatgcacaattccatgacaatatgccctttctggggagatagtccataatgttctgctaaatttcaaatgggctcgtgacccaaaaaagtcaagaaccacagcacttgagtaaaatactctttttacaatccatataagcccttgattggaagggcttttcaaaatcatttagtctaacaactgcccagtttccagtcgggggaactgaggcagagcaaggtagtgatcacaccagtacaagatctcaggtcccaggctcctatgcaagttttttttccccattatatcacacttatctagcaagggaccttgtggtttgtggctttagtggccatcatttctgggggttggcttttaccctttttcttgaatatttgccaccaagtgaaaaatgttaggacataaacccttgccaggtccctttcatttgctatctctattattggaaaggacctaaaaattggtgtaatggggcagaaatctgaggaatggacatttctaattcctgtttgttgaagggaagttgctggaaagagcatcagtacttgtttctatgcagatgcctgggccgtagcttgtctgtagmgtctgtataattataatgttgcccagtgtgagggaaagagctttcctacttgcactcttctaccaaggccctgttagtgcactgattatagtactgacagataaacctagataaagagatagagagtgagtacatgcacactcatgtgcaaacccactcagagatgcatttggaacagtgctactgaaaggcagtagtcattttcaagactgaattccaaacatggtttattggtgagttaggaacatgtaaggccaagtacactgagagcctttttgaaagtaattgagtggaaacttgatgccattctaaatcaaggcatatccaggtggcccggttgaactcactccactgtacccagtctcaaaggccaggttgctaagaaaccaggagtaaaagagtcaagtgaccatcatttcacctgctgcttgcccccaatagtagtctctgtgaggccttactgacctcacctaggaagtgatttttgagcccttgtttcagggctgtggcctccctgctctatcctgaataaagcagacaggtgtgcagattttggccatgaaagcatggctaatagggccacagtccctttaaagaaacatggtttgactctggttttcttgggggaaaataccacaatcaccgatgcaaacattggaagattattgagagccctagaaagctgctgtgatcccagtagaaaatatgtcccagaaatgtcatgagattgctgtgtgttgcctgggacacagatcaagggcctatcttggagagctggggaccagcagtctgcctggaggccagggagcagtggctgagtagctctgcctttgctctggtctataccttaagaatgccaaagaatgaatttcaacgcctgcctttggcactctgacttaaagtgcaaaaagcttctgtggcgaggcatgctatcatggaatgagactggcttgccctaggcttaatggatgggcagtcattttgcagaggctatgggaagagggtgataatagaagagtggcagctataggaaattatcaacataccttggccagcaagttagagaatctggcaatggatgaactgaaagtgatgaactggcagggataacaaagaacctaacatttattaagcacgtatttattaactgctcagtgtttcatattcatgcaagtattctcattttacagagaaagaaattatggcccagggggctaaagtaaacaactcaagggcacatagaaagtaaataaaaggactgtgatttgaatccaggccactcttagcccatgctgttttccctttgccacactgtggtaggtgtttgaacagaggccacattactagagttggcatgactcttgactcttgcctgcctaacaaaatattgaaaggcaaacatttgaaggagggagggggtgcaggttcagtttatatggaaatgcaaactgggctggaagatattcctgagttaggctttctcttcatattcagcttgcacatttggtaatgtttttaaratgatcatctaattttattttgtgaagtgaaggatttgtgttttagttggcarttgttaagtccttggcttgccatttttcaaaaagtaaaaaggtcctcacaggtgtctccatacttcgccaaggttgtagcatgggcagtttcagtttcagcctaagagactggtgacatccacaaatgcagttttagaagcagaaaaggtcttggtgcctctgcagtacttgatgtattggggtcaaatctctacaaatttttctgtggtgatagcaaaatcaagagatggcttacaaaaagaaatattgaatttttatttttgaagtttttgttttttaaaaggttgggggtgttcagccactgagggacaaaacttagcatctaatttcaattatagtgtcatgcagagtatttctaaagtarttggttatcatgggaaagtattctcttttcaagaagttctttgattctgtaataactagaacaaataaagtagtaaaagaagaaatagttctgtgactaggaaaaaattgcttttgagagaacatagatcaattatactacttctaaggtagctgcagataagtggccttgacacattacaagcctggaaaaaaacatcagaaataataaaaaatttcagagagaatcaagatacctttttttttcttttttttttcttttttttattatactctaagttttagggtacatgtgcacattgtgcaggttagttacatatgtatacatgtgccatgctggtgcgctgcacccactaatgtgtcatctagcattaggtatatctcccagtgctatccctcccccctcccccgaccccaccacagtccccagagtgtgatattccccttcctgtgtccatgtgatctcattgttcaattcccacctatgagtgagaatatgcggtgtttggttttttgttcttgcgatagtttactgagaatgatggtttccaatttcatccatgtccctacaaaggatatgaactcatcattttttatggctgcatagtattccatggtgtatatgtgccacattttcttaatccagtctatcattgttggacatttgggttggttccaagtctttgctattgtgaatagtgccgcaataaacatacgtgtgcatgtgtctttatagcagcatgatttatactcatttgggtatatacccagtaatgggatggctgggtcaaatggtatttctagttctagatccctgaggaatcgccacactgacttccacaatggttgaactagtttacagtccaaccaacagtgtaaaagtgttcctatttctccgcatcctctccagcacctgttgtttcctgactttttaatgattgccattctaactggtgtgagatgatatctcatagtggttttgatttgcatttctctgatggccagtgatgatgagcatttcttcatgtgttttttggctgcataaatgtcttcttttgagaagtgtctgttcatgtccttcgcgaaggacaagataccttaaagataagttttcgataaagaaaagccttcattttcctgggggaaatgaagcacttgatgccaaggacattagtagagggctagaaagattgcctgtgtgaaagacatatgctatatccaaataataaaacaaacgagatcctggggctcattcatgtgactttcaataaagtatgtagactgtctaatataagtggcctccatctgcagttttgtcatggaaacaatctttgagcatatcattgaggcatgatggtacatggaaccactcactacctactgcttgtgttgacttctacaaatctaaggaaacctaagtaaagagttcttttgcacctaggagtctccatttacagtctactttgaacaatggcctcgcagttccctcaggcttcacaacatcattttgtgacaggtgacaggcccattttacagataaggaaacttgaggcttagggaactgagaaataatttgtccaagattacacagctaggttaactggaaactacagaggccttcccatttccatttctaatacaattcacagcccccagtagtaaagaaaagaaatccctagggtaaatggagaagattcttagaaataggaatgataaacatctttaagtcttgctactcaaaatgtggttcgtcatcagccttggcataagcattagctgggagcctactggaaatgcagattctcggaacccactccagcatgtggaatcagaatctgtactttcacaagatccccaagagactcctatgcacattaaagtatgacaagcactgatatgaggtatttgagacagcaaagcagcttgaggaaggagtccctttggtgagacaaagaccaaaagtggtggataaggatgatctggtatgttgggagtgggtacaaagattaagtcatagttgcctgcttttttgcattcctttatacttgtgctttgatgacaaagtttctccacctcaaagaatagtgaaaccagcctggggaataagaagagtgaaaagtacttggctttcaaatctctgagcagtagaagcagtggaaagacaacatgaggccatgggaagagctcctttcaggagccctcatggtccagaatcagcgctatcattgcctccccttaatgttgagcaaatccctctccctctctaggcctcaaattctctgcctttaaaccaggtactctcaaaggatcttttcagctttgatattctgttattttgtgatgttaattataccacagcctacattgtaatgaaaacatgggcaactccactggcctttttctggccctagtttcacatattcagtttacataagaaggggtaattcaggaggaaagttcacagtcatggcaaagcaacatgaatggaaatcacagggaactagaaggggcatgatctaggtagccagcttgaaattggccagtattttaattaaagtataacaaggcatccaaactgctttgaacaagctgctgcttcatatcacacgctgatgaatcaatttatgtattctaaataagctttactttgaacgattcatgaattcctctgacttgggtcttttgagggggcaaaagggacttacaaaacagggaatactaccactccctgcatctgccactcatcttcaggtgattctgatgtccattagttaaggaccactgactataacctaatcaattagagatggagaaacatactgaggggggtaagggtcttgcttaaggccacacaccagagccaggggcagaaaacaggtgctcagagtactactagcacaagggtttttcaacactacttttttgggtgatcaccagtatcaagatacctgcttccagtggcagggcacacagtggggaggactgataggcttcccatctgggtgctttgttttcatcccatgttcatgctgatcgcttcatttgaaccttaacagccatatcatctagtcagagcaaagatgattatccacattttaatgaggctcagaaaggtgacataacttgcccaagatcacatagctgagaaataagactgtgccctaggttgtcagatttctcctatgctaccctgcttctctaggggaggagatgcagcactccaaactctcagctcttaattgctttgattcaattacttcgaaaccgattattttttccttttggaggatataacagtgtatgacttcaaactttgcagagcatccttaatgccccttattttgtcctcataatatccccctgaggtagggagcacaaggtatttttgccccaatttgaagaatgtacaagttgaggccagaggcattgtattagccttctattgctgctataacaaatgatcgcaagtttagtagcttttcaaaacaccatgtatttatctcacaatttctgtaggtcaaaagtttgggatagcatggctggattatctgcttatggtttcactgagctaaagccaaggtatcagccaggcctgtggttgttatctggggcttggggttctcttccaagctcactggttgttctgtgactaaagtccccatttctcagacatctctatcttaaagccagcaatatttcagtccttttgctttctctctcttgcatctctctgacttcccctcttctgcttctgctgttaaggccttgccccttcattggggtgatttcattgggttcaccccaataatacaggataggcttcctatgttaaggtcaatagtaacattagtcacatcttcgatattctttttgccatgtaatcatagtcatggggagtaggacatagaatcttcttaggggccataatagctgcttacaacaggcatgaattagctgccaacagaagccctgcatttcagtctgaagacacatggttgtgaaaccttaattttagggaaggataaaatgatcatttatatgtcacctacatgggcagttagaaaccccagggttgttcaacctctcccatctctcaaatacacacagagacaattcagcagcacatcaaaggaagtggtagcaggagtgtaaggggggatctttaacagctgatggtattcctagatagtaccttgatgctggtgaccagtcacttaattagtctccttctatttaggtactgggggaaagggggagaaacagtttccccaaaggcccaacatgagaagtgtgcttcccattgatgtatctcttggccattacagctaatacatggtgtctactacaggatagatgtgtttctaagtgcttttcatgggtttactgaatttgttctattttagtaacattcctatgaggtaggtactggtattagccccattttataggtgaaaagacatgcactgttacgtcatttgtccaagtacttgtagtcaggaaatgtgaaatataggattcaaatccaggctattcccttacctaatcacctgggaaaatcttaatccaccaacctggggaaattctcctagacgacagattgaagccaggttgatttcatagttcctcatacctttaatcttccaagcttgcccttggggtcctggcattctggcagcacaaatcagcactgctgagcctactgaaagattattttaaatttagagactagctgggttttataaggctaatggaatgcaaagtgaaggtgacagaccttttctcagaggctggaagaaaaggagacggtcagtgcaagcgaggtggtcccaggaatgccctctttagagcagtattttcacttgggggcttcccatgatatatgggatcttcctaatagtttttaatattggtataaaattcaaacataagtgttggttattctctgtgtattgatacataattttttttacatattttgaggtacctgtgatattttgttacatgcataaaatgtgtaatgatgaattcagggtatttgggatatccatcagcttgagcatttatcattttgatgtgttgagaacatttcaagtccttacttttagttgtttgaaaatacatagttaactactcaccctactctactatcaaacgttagaacttattccttctatctagcatatattagtacccgttaaccaaactcttcatcctcctctccctcaccatccttctcagcctttgataactatccttctactctctacctccatgagatcaactttttttagctcccacatttgagtgagtgcatgcgatatttgtcttactttgtctggcttaacataatgacttcaagttccatccacgttactgcaaatgaaaggatttcattttgttatggccaaatagtattccattgtgtacatatactgtgttttatccattcatccattgctggacacttaagttgatttcatatcttgattattgtgaatagtgccttgatttttctttcagctattccctttttctctttctttctttctttctttctttctttctttctttctctttcttcctttctttcttttctttctcttctttttcttcctttctctctctctcttgctcgctttccttcctatcttccttccttccttccttccttccttccttccttccttccttccttccttccttccttccttccttccctccctccctccctccctccctcctctctctctcttgctttcttcgtttcgacagggtctcactctgtcaccaaggctggagtacagtgtgtgatcatggctccttgcagcctcaacctccctgggctcaagcaatcttcctgcctcagcctcccaagtacctgggactacaggcatgtgccaccacagctggctaattttttgtattttttgtagagacagggttttgccatgttgcccaggctggtctcaaactcctaggctgaagccatctgccttcctcagcctcccaaggtgctgggattacagcaactgcgcctagcctcagttctttctttattggtgtatagaaataccactgacttttgtatgttgattttgtatcctgtaactttattgaatttatcagttctaagaggtttttttacttcgatggagtctttcaatttttctaaatataagattgtgtcatctccaaattaaacaattagacttcctcttttccaatttggatgccatttatttctttctcctgcctgattgttgttgctatgacttccaatactatgttgaataggactggtgaaagtgggcatcgttgtttaattccagttcttgcaggaagactttcagcctttccccattcagtatgatgttagctgaaggtttgacatatgttttattatgttgaggtatgttccttctatgcctagtttgttgagagtttgtatcatgaagagatgttgaattttatcagatactttttctacatctcttgaaatgatcatatggattttgtctttcattctgttgatgtgacgtatcacatttattgatttgtgtgtattgaaccacccttgtattcctgggataaatcccacttgttcatggtgtattatagttttgatgtgatgttggattcaatttgctagtattttgtttaggatttttatgtcaatattcatcagggatattggctcttagtttaatgcttttgttatatcttagtctgattttggtatcagtgtaatgctggccttataaaatga

SEQ ID NO: 96173 - DNA, 590475 bp, Homo sapiens
  misc_feature (1)...(590475): n = A,T,C or G
ctcacttcagtcaggtctctgagcacttatcccctcttctgagaggcttgccctgaccaccttgtctaaaatagcatccctttcccaccttactttttaacctgctttgtggtcttcgtacttacctctatctgacttctccactagaatgcagaccatgtgaaggcagatttgctgacttcatcacatcaactatgtgtacctagaacagtccttggatggttgacgtgcttgataaataaatatttgttgcatgaatgaatgagtgaatatttagagctctatgtcaaatttctggttcagatgttcagggatgttctcagttggaccttttaataaaaaaaacaataaatgaccaaattctactttaagttattttagggttccaacagtcacccacagactgaacaaactccgaagatttggcttcatgtaagaatgtcactgcaaagaagcttcagtacccattgtgatatcatttgctaatttggagattgtgatgccaaaagtataagccccatgctcagtcagcatctaggtccaatagctctcagaggaaccatacatcaaagcaaactttctgcaatgcggaaaagaacatccatgcatttttaaaatgaattttaaattttaaataatttttaaaagtggtttcatctcttgtaatggaaaatattcaaaattctcatgctgattcatgaagtatacttatataattagacaaaataagaacattgaaagaagcagactccttgtttcatcgctttaagcaaataataaaaatggactcgtgcaagtcacaccactaatttaaatacattttgtaaaaagatagcaaataaatgaaataaaaatatttgctttagtttttttaaacaaagatttattaactctgaattttttaggttaaggaccatgcaatatatatctcctacaccgaagtgtccaagaaatgtttttggagtaaattaatgaactgctttagaatgttgctcagaaattaagctagaaattcagagcaatattctcagggcttgatttacaccaaatccaagttcgcaatgtattaacatgaaggaataggccattgctttctgaaaaccttccttttataaaagaaatactttaatattatgaattctcttggtctgtgtaaaatattatttgcattataaaaattgattttttggtataattgttcataggcaatattttcaccaggatgggttcacaagtgttaatggaaggcgaattatgtgtgggacagtcttctagggaatatgtgaggggtttttaagatggataacattttgtacctgcttttgagttgcaaatgatctggactgttggttaaacatcgcagacaagatcaggtgaagaacattactagaagttcagtgattaagaaataaagccacgtaccccacggagtgaaatttgaattccttaaattccctcaaattattttatgttggattttacaccaggataggaatgtctttaaaagtaagaaatatttgacataaggtagaaaatttcaaaggagtgtttgacttgttgctggatgtgtcaccacatttcatgtgtctgagaaatataaatttctacagcacatttttagtgccttaaacagactacaatgatgtaaatggttgaacagttgaaatttagtctggaactgggacagatgacttgccacatagagtggctcccaacataaagtgatctgtgatggcaggactttcagcgtgtttcactattagcatgtgtcatccaagcatgcctttcaacatctgtggagaaaagacatgttacaaatacaaaacaccaccatgatgaattgggaatgtcaaaaacctctgccttggctgtgatccagtgttgttattggcaagtagattcatccttctaggttggttgctccataagtaatcttcaagaaaagcaagtccaacacccttttttctccttactgtgaacttggtcaaaattaccaaatgtttggtaaccatttatggtatcaggaatgcaccaataactccttctgactctttaagagcaatcatcttgtggaatgcaatttcccttcttattattgtgggtatttttaggtacctatgcttgaccttttttaaagagagtaaggatctgtgatttaaactaggatagaagctgttccagagataacaaaaagctgttgctttctatattccaacaggaactaggtaaaacgataaatgtgataactcaaaataatgtgtatgtttatcttccaggctttctaatagttaattggttaaataaaacattatttacagaaatagaagagccactcctcaactgttcaaacactgcaaagtaaactaatgcaagtgcagtgacctcttcatccagccacaaaatcatatatatttttaattctccaaggagtttgagatagtaaagttggatatcatgtagctaaacaaaggcttttaccttttctcttggaaaatagttaaaatgaatagaaatctgataattaatctgggaaatttaaccctgctctacttacctaatgcccccccaaaagatgatcttttttttcttcattgattttataccttaaaaagaaattactgaattgcagatatacaactagtatctacagacagaaatgaaggtcagttttagaagaaaccagtgtcaaatgaaaacacagatttctacatggtcacattcatatcacacactcttgacccaaggtgagaaagtaggtcattccttatttcttatttattccctggcacaatcagaccacactacaagtttcttttaccagttgccaaaatgaaatcatgacacccttcagagctactgtcgttacatgcaactcaagacaacgagcagcatcataaccattgtcaacaggcaaactccaacaatgtctgggtttggatttggttttatgttgagagaagcagatttcctctgattttaataatccataagaaacagaaatcataatatattgactccatattacctaaaaagagtcaaaagaagcagaagttctcccccgattcatcctcttgttccacagacattttgaaaataaaagaagacaaaatagaaaggaaagggtgtgagaaagaacacagaaatgacttgaacgatttcaaatccttattaagcatcactgaggttgcattttacccattagactgactgaatttagttctcactgctcagaccttgcaaagaaactggacgtacatggttttgccttccagggttgatctagaactgtaagggtgcatgtgaatgtgggtatgcatgtgtgtgtgctttaagtccattttataaacactgacacaagacaattctcatcattggtaatagtctttggagtccaatcatgcagaaaaacaggcaggtgcaagttaggtctcattgcaagatggacatggcaaggtgaacagataatcctacataaggattgggagatttgtgtccattagaatatactggccattggtcccacataagtaaagttacatatacaagattctatatataaacagaggcccctcacttcagtttggctgaccaaagaaacaggtcaaagtgagccattttcagatagttaaaggactaagtaccaaaagaaataacaaaatcttatcctctaatcacaaagaaaatagctaaaataactatttacattgcaacttttttgttgtttttacagagaggagtttccttgcttggcttaatgatatctgtggaaaatgttgaactcttataattaaaatgtgtgtgggggattgtgagtggggagttgggttcctctttggatgcaaagtggctgagatcaaaaatttctagagcaattttactcctctttctgagctgtagaagaatacatttttcagcaaagctggctaataacatgccttacagagcataatgcacttaagatgtggcttttcatatgttaagagattcaaatcgaaatagattttgtataatttaggttttgcaatgaatatttacaattttaaaacaaatcaagtttgcttatttttttttccttgacaggacataaaaggttttacatatttttatctattttttactagttccatttactaaggccaactttcagttttaccagtcagctgctatcagtgtctttagataatatttttctgataacagattgaaaaaactatcgagcttcttaaccctcaattaaatagcttactccaattggtgggaactggccaggctctggtccaactgttgggtacattcctacaaaactcagtcatcagattcttgaagatgaaaggttattatcagtttttattccacaagaagaaattccgttgtaaggctagtgtattcctatttaaaattgaacacgctgacccacaaaacacatataaaaatagtaaagacatattaatagtaaagtggtggcggttttgccaaactcttgcagcagtttaattttccctgcacatgagtacacagccatccttcctacaaaatactgcaaactattttattaaggatcactgcaaaccaactgccccaaaggaagcctaacagaaggttaggctcctcagagtgccaacttcatgttccaaaatgagccccaaccccaggtagaaccttcactttttttcaggaatattgtccaggtgacttgacacttgcctaccggaaaagttgggatgttcttgggaaataacaggtgactatttaagaaatatttggggtgtgtgtgtgtgtgtgtgtgtgtgtgtgtgtgtgtgtgtgttaagacagacaagtgaatgcagaacatattatattctgtgaatttgataatatcatcacctcctagacatattataggaaagcagacctagtgggcaaaggactggggggcttttacagtggtgattctctttgttgttccatcatctgccttgctttaatcacctaataaaactgatcctgcaaaaattctgggggccaaatccttacctctatttgtaaatgatacttatattcaaggaatttgttccatttttctcttgtccataagggaaatctggctaaagctaaccagctcccaagagccatgcacagaagatgtaagactaattgagctttgggaaggtactaacagcgggggaggggccctgtctagttcttgcctggtttactctgagggggaaattcaccacttatgcaggtacgagagatagcctgtcaagcactttgaagatgctggctggagacttccttctgtcttgtgatgtcatcttgcggctgatgaaattccccttgagactctctttaaagcagcttcctgctctccgcacttaatcccatgtggtataaagtaagggaggggagaagccacagatatatcaagagaaaagtaccgagaaagaaaatcagtaaagaattagagatacagagaggagaagtttttaaaaaaaaaaaaaaaaaacaggaatatgaaagagagggagctcaagtgactgaggaggcatttttaacaatcaggttatctgcaatattaaccagaaaaaaaatggtagcaaaatagagaaaatgggccatttttattccaggggacaagctgcacaaaggaatgttcttctatttattttaaacaaatgactgcgtgtactgaatctgactgtgtgaaataatctcagaatggcagcaccactggcatggcgatggtgcaggtgggtgcagttccctgtggtctctattgcttgaagagagaaagaaagttccctattattatatttaaggcagttttcagagcactggcattcttgtttgctctgttttggggatattctatttgccaatcagttcacactcatcaaccatccacttcctgtctttcacttcttcaggtgaaatatcaccactctagtgagcaccaacatggtcagagtgcaaataactgtgatggatacttcgaagtgaataagaagggaagcctgattattgctgagatcaccttggtattgccttgtacataaccaagatgtttcacagtgcctccttaagtgctcaggaaagcactttcatttaatttaatttaagctaaattctggagattttgctaaacattgacattaatgcttcatggcttttaagacaaactcatattgctaaaactatttggcagcagtaaatttatgggcagagttattgctcttacatctactgcagtacaaaactcagatgatcagcccttcgattgctcatacttattaaaataaataaataaacatgaaacatcagccacattaaggagtcagggaaactcctgaggaataacaatgtctctggagatgttttcaaatgctaacctgagactcacactgtggtttgggggtttcattmttattattattwttttatttcagaagaggaaagtaatattatttctcaaaataaaactttggcagagtatgaatcagggaagcagcccacacatggaaaacacaatccacaatctgaaagtagtctaggcaggctcatttttttgttgaaggaattcacatggaggcaattctgctcagttccagagagagattcttatcatcaaaagcacacacaataaccttgcttcaccacctgccactttctccagtggcctcttgttgtgaccagtaattgagaaatgacaaatgggtatagagccaaatctctaaaacagggacaccagtgtctcctagtatctgggtaataacctcctttcagtcttagtccacaccacacactaccctccagtctctcctactctttactgtcacagaaaagactctcagcttttattcacacctgccttcwgaaggccaaaccattttgtgcctgaaaactgttacccactcsccccacactttacataagtatcacatatgttctttctacaaattggtatacaggtgccatttaatccattcaaatttggaagctacatcttcaagggtctgagagagctcactccccccatatattccccctttacatgttttcttataagacatacagtttaatcaattaacaaactaaacagcttatatactggcaatatattacagatgggtttatgtcagagtaatagatcacatgaaatggacyatgtggtaccccagtgcattatgtcttggtagagccytgaggacactgacagtagcatctctaagtaagtagtgctgtatgaatacagacacatgcggatctgtatctacatccatctgactaggccaaggagcaggtagatgcaagatagagacacacacatgctggatggggccactgcacaccttgtcatgccatttaaaagggcagttacaggttgccggttttgcagccattaaaattacactttatggaaaaggcttctctaattgtgtctgatttgctttctgtagtaagcatcattggaagaagaccaaagcaagagcaactagaagttaaatayacatttgagcttagctgcaatacagaaccctggggaagaagcaggctgaaagatttatttaattttaggcttggattctctcccttgctgttttcttgatgttgtgtgtctgcatttgtgtgtgtgtgtgtgtctgcgtgtgtgtgtgttccatcacatcatctcctgaagaacgctgggtttcgcaggcaggcggctagtcacctgcaacaacccaggggtcctgccgaggcttccaggctgctgtcagtgtcagatgccagggtctggtcggtggacatggaggagatgtcattgacagacgaggatggagggagactctcactgctgttcactgctgcacctgtgctaagaaaatgaagaccaacatgactcaatctagaaccagacccatcttaatgccattcaggattcagggatgggcaaatacaataggggatgtccagtccatcaatcatttggcaagcctttatagagcagctgacataggggagcatatcaaatggtgacaatcaagacatagcaataaaaagtccttcatcacaagttatcaaatctcactctatatttgaaatcacctgcaacactttctattaaaaaacactaatatctggtcacattgcctcccctgcccccactgcactgcatatattttaatataattggccttgggtgaggccaaggtatttgcatttttatttatttattttttttgagatggagtctcgctctgtcgccaggctggagtgcagcggcacaatctcggctcactgcaacctctgcctcccaggttcaagctattctcctgcctcagcctcccgagtagctgggagtacaggtgcgcaccaccacacccagctaatttttgtacttttagtagagatgaggtttcaacatgttggccagaatggtctcgatctcttgacctcatgatccgcccacctctgcctcccaaagtgctgggattacaggcgtgagccaccacgccccgcgggcatttgcattttttaaaagctcctcagagactgtattcagccaagcattgaaagcctctggcttatgcaggagacaaataagcaaaaccccttaatggagccatctgagcctggttgtttttaatgcagggagcttttaaaacaaacatatgcaagggtcctatcccagaaatagaagctgaagtgaagttcagaaatctgaattacttggggaccacatctctagagaaaggaagatatataaatactattatgtcatcattaatgacaccaaacttaaaatgcatatagaaaagccagtaggacataagtaggactgttgatgaaagttacaaaaaaaaaaaaaaataggagaagccttagcacagcttttgcttatgagctaactctccagcaggcttgcttacctgggatctccaaataagaactccaaattattaacttagattaacttgaaaaaattgtttatctgttatgcgggagtataaggttgaaaccctgagaagaaacctgcccayggtaatcactcagtaaaggctagctgagttgccagtagctttgagatcaacaaaagaaagatgaaccaaaggcattgtgcgatayaattaaaccagagcaccctggaaacaatccatttactttttttctttgtatattctttatacctaagcaatctgagtggtaacacacttgctttgtgaaatagctcgctattaaaaatctgtagtatagtcccctaatcaaataagagatgaggaattctcactaaaattatatcttatttgagcaaatatagtgtgcaagatctatttggtgaaaaataataactccaaagtcagttataatagtgttatcacatagacctaataaatcagaaagacaaaataaaactaaattaaggaagrgragtggttaacataatccttgctcctggagtagacwtttcttgcctgtgagaaaagtgtgatgaaaatgtatcagttatctagagaggacacaaacacctaaactaagacagatcacctgtatcttccatgtatttttaagttgtatttgttgactataaatatatggacgtactctatgggaaatgtgaaaaaatataggaaataaagataatgatatgcaccgatcttcaaataaayggtaagaactgttaaacttttcatatatttcttcccggtcattctttttgcctggaagtttccctggtcgtgatcttttaatatgtatttttttgggatcttgatatttttakatacagaaaagcttatgaatttttcatgttctttaaactcctaaaaatacccatcctttctaatcttaaatgtctctagaaaaggtttttaaagtcctcytgttattgtctttctgtaaataattactctatcaggacaatgtataaagttataatattccataatattccaactttgaatggctttaatttattccaactttacttaattatatcccccatagctatggtacagagctggttcatttcccctcatgataagattttatctcctagcagacagcccttggttcctttacattgcccaaatgccctgctctgtttttcacccccgattctggattaaattataccaayatccttcatattctttcataagttgctaataatttagtgtcactatgatggactcctcagaattctcttccatttatccacactcttattaaaagacagagattaaaactggacacaggactctattataaaggcctgatcaattgtgagcctagcagagggaaattgcttttttcttactatttgtctgctggatgacatatccctagactatggatgcctttcaaattatggtgctacagcttaatttagttttgacttgaggtatagaatgatgctcatatattttttgtaacagctttattaagatataatccacatatataattaagaaatttaattttcatgattcagtgttttttagtatattcacaacattgtgcagccatcaccacaatccattttgcagcatttcatcatccctaaagaaaaccctgcactccattcctcacctaccctgtagctctaggcaatgactcatctactttttgcctctataaaattgcctgttctgaacatttcatgtaaatggaagcatatcatatgtgatcatttatgactggccactttcatatagcagaatgtttttaaggcttatccatgctgtggcatgtatctgtatttcatatctttgtatggctgcataatattccattgtatggayacatcacattttgtttatttattagttgataggcatttgatggatatttaggttgtttcaactttttggctattacraataatgctgttatgaacattcatgcacgagttttgtatggacatgtgttcatttctcttgggtatacacctagaagtggaattgctggggcayagagtaattctagctttaacacttgaggaactgacaaactgtgtccggaattggtgggttcttggtctcactgacttcaagattgaagccgcggaccctcgcggtgagtgytacagctcttaaggtggcgcgtctggagtctgtcccttctgatgttcagatgtgttcggagtttcttccttctggtgggttcgtggtctcgctggctcaggagtgaagctgcagaccttcacggtgagtgttacagctcttaaggcagcgagtctggagcttttcgttcctcccagtgggctcgtggtctcactggggtcaggagtgaagctgcagaccttcgtggtgagtgttacagctcataaaagcagcatggacccagagtgagcagtagcaacatctactgcaaagagcaaagaacaaagcttccacactgtggaaggggacccaagtgggttgccaatgctggctcgggcagcctgcttttattctcttatctggccccacccacatcctgctgattggtagagccgagtggcctgttttgacagggtgctgactggtgcatttacaatccctgagctagatacaaaggttctccacgtccccatcagattagatacagagtatcaacacaaaggttctccaaggccccaccagagcagctagatacagagtgtggattggtgcactcacaaaccttgagctaaacacagggtgctgattggtgtgtttacaaaccttgagctagatacacagtgccgattggtatatttacaatccctgagctagacataaaggttttccaaggccccaccagagcagctagatacagagtgtcsattggtgcactcacaaaccctgagctagacacagagtgctgaytggtatgtttacaatccctgagctagacataaaggttctccaaggccccaccagagcagctaaatacagagtgtcgattggtgcactcacaaaccttgagctaaacacagggtgctgactggtgtatttacaatccctgagctagacataaagactctccacgtcctcaccagactcaggagcccagctggcttcacctagtggatcccgyaccagggctgcaggtggagctgcctgccagtcctgcgctgtgcgctcgcattcctcagcccttgggtggtcgctgggactgggcgccatggagcagggggtggtgctcgtcggggaggctcgggcygcacaggagcccatggagtgggtgggaggctcaggcatggcgggctgcaggtcctgagccttgccccgcaggaaggcagctamrgcccggcgagaaatcgagcacagcgccggtgggccggcactgctgggggacccagtacaccttccgcagccactggcccgggtgctaagtccctcactgcccggggccagcagggctggctggctgtcccgagtgcgggggcccgccaagcccacgcctacctgcaactccagctggcccgcaagcgccgcacgcrgcccgggttcccgctcgtgcctctccctccacacctccctgcaagctgagggagtgggctccagccttggccagcccagaaaggggctcccacagtgcagtggggggctgaaaggctcctcaaatgccrccaaagtaggagcccaggcaggggaggtgccgagagcaagcgagggctctgaggactgccagcacgctctcacctctcaaaactgttttctaaagtgggtgcaccattttacattactaccagcagtatatgaggattccaatttctctacatcctcaccaacacttattatctgtctttttatctagccatcctagtgtgcatgaaatggtatctcattgtggtttgatttgcatttgcctgatagctaataatgttgagtatattttttcatgtgcttgtcagccattagtatatcttctttggagaaagtttactcagctcctttggccattttttaattgctttattttctttttattattgagttgtaagctctttagctctttcttcctttctttcttgctttctttcttctttatttctttttttaaggacagggtctcagtcgcccagcctgtagcacagtggcatagtcatgtttcactgtatcctctaactccagggctcaggcaattctcctgccccagcctcccaagtagctaggactacaggcacataccaccacacctggctaattaaaaaaaagattttttgtagagacaggagcttgccatgttgcccaagctggtctcaaactcctggyctcaagtgatcttccgatttctgcctcccaaaatgctgggtctacaggcatgagccactgtgacaggcctgtaagagctctttatataatctgggtacaagttacttaatgagatatgtattttcaaatgtttttcctctatgctatggtttatcttttcattttcttgaaggtgtcttttgaagcacacatatttttaatttttatgaaatagcatttatctgttgtttcttttatcacttgtgttttagtgtcatatctaataaaccattttctaatycaagattataaaaacttactcctatgtttttgcctaagagttttataatgttagaccttatacttaagtctatgattcatttttagttcatttttgtatatgatatgaggcaggggcccaccttcattcttttgcatgtatatatccaatcatcccagcaccatatattgaaaaggctattctttgtccatgtcttacatccttatcagaaatcaattgatcataaatgtaggtatttattcctggactctcaatttgattccgttgatctatttgtgtatcttcatgcaaatagcactctgtcttgaatattgtagctttgtagtaagttttgaaatcagaacatgtaaatttcccagctgtgttgtttttcaaggttattttggatattctgtatcctttgcatttccacacaaattttaagatggggcttgtcaatttctgcaaaaaagacagctatgattttgataagtattggcttaatctgtacatcaattyggggagtatctgtcatttcttgacaatattaaatattctaatccatgagcaatgaaatgtttttccagttattagatcctctttaatttctttcaacaatgtttcgtagttttcagagtacaaaacttgtacttcttttgctaactttattcctaaatatgtatttcttgatgctattctaaatggaattgttttatgttcattgctaatgtgtagaaatacaattatactgaggacttatttgaataagaagtttcagtgtcagtggattggatgttaaaaacagatcaaatgaatatatatatatatatatatatatatatatatatatawaatgaatgttgtaattaactagaaagccagtggaaccaggcgattatgatagcatgctttatttatgagaaaataaccagttttaaaaataactggttttatgagaaaataaccagttttaaaactttaaaaagttttaaaataaaattgtggcataatacaaaccaaaaagtatttttaagtctttaataataatcttggtcttctcttgagataggctttttcccctatcctggctggagttgattatgtagacacattcttattgtcacaattaaagttgagtaatgattcaaataagggtgagataagtcttagctgaaataaggctcccttatagtaaaacaatttgatgtttacaaataaacacaaacccacaacaatggcagctagagaaattaaacaaagagcattgaagaaatttctccaaaacacaaatttatatctacaaataatattgaatgtatgtaacaaaagccaaagtagcttttaataagctcttcataaacaggatcgtgctgcaggctatgcttataaaacacacagcactcctactgcacttattttcaaaatcagcatattttcagcacacttctggaatattccgagtgttatgccataccagtcagccccttattatatgtagttttsttatggattacctcaagcatatatttcccctgcttctttttactgctttcattatacttcatttctcctgtcttccacaatgtctactgctgagtagtagcacagagtaagtattcgagttaacaaaacagtattgagtatcttatgtgtactcttctagataggttctgtgaggaaaagcaagttccttcctgctttccaactagtgaaactgttaagctatttttggccaaaggaaatcactttgttgcagttgtctttcttctccttttgttcatcagcagcttctctctaattcctatcctctgtgttggaatggtcctgccctctagtttatcaatgttgaatgcaaatataattagtgttcaactactcaaagttcaaaatctatcaaagtctttatcagctgtatttctagggatccatagactattgcttctgattttatatggcacaaattcattaagagaagtcttcagtgcttyctttgtaaaagttcccatgacatctgcttgtttcatgggaatggttccttgctatccagtgtgatggtgggagagaaccgtgcactgtctatggtgtcctggagctggcttttagtggcttcttagaacgaattattagcatctctttccaactctgcatccattgatgttacattgttgcttaaaattggtcacagtgagaatatttataccacaggaattgttaagtgctactagtcaattctttttttaaatatagttgttaaatgttaaccagtccaccactattagatgaaaactatttgcttctgtatgactccctctattgcgctataataaatgcctccttgcctgcagccacttctgctggatgatccattcaagwctattttcatgtaggcaataaacaggagttctaaaccataaacccaaacacaaacgtaagggacaagacatgggccttggctttaagttgttaaattactgccaagcagtttgcgaaaatctcttaaacagaattgaactgaattgaatatgatcatwgtgttcagttgtccagtcaatgtgagaaatatctcttctttctatattatttaagagaaaacagtagagatacacattttcaaaaatgttttgccatcaataaagcattacaaatttttgtctataaaaatggcattaaaaggaactgaaaatgtcaatagggttgcaaatgaggaatattagctaccttcaactttacctaaaaaatcagatttcatagaaagaagtaacatatgctaaagaaaatttctcagctacaagttattcaaccaaaaaacattgttatgggggaaaatgttgttctgctttttttaaaggcaatgattttcctgataacccccaatcccaacaacaacaaaaaaatatggtagacacagaattagaaaaagcacaagaatgaaaaaatagtgtcttttttatctacatgatcttgagccacaatttgtctgggcctgagattttttaataaaaagtaaataaaattaatggactatattagtgaccctaagacatattcccatggtggggaatgtggtcctcactggggagagaatggttgcatattaaaatcacccagaagctttatctttgayttagagattttgaaaaatctctgcccatcctgttgttcagcatccttatcttagtgagtcactgttagttttgggagctttacttctcaggtggaagagggctggtgaacaaactcagaattggtgaatcagatgctctcctgtattttttctagttctaacgtactataacaaatgcttttagaagaaaattaatttcaattcatggactgctagtccctcagcaattgttacagatcaattcaggaagcaagcagctatgccatccttgaaaataaattactatgcaagtgaaatcagatagcagaagggaatacaattatttatttggaaatgtatctgaartttagatttatctcttattgacatacaacaatttcatcaataaatttcaaacctataaattattctgcaaatgcacatttaacttcctatttacattttaaaagcatcgcataacatgggtttcgtattagaagtacktggcccctgagatactgcattaacttactcccttgctgcagaattcccagtattgccataactgaatactaacagagtgtgtgttataaaaataccacagctattttcaaaataaaatatgctacgtgaacattaatgaaaaaaagctgaatataatgaacaatgcaaaaaagctgacttttcaaacttttttttagaattgctttttctttccagcatagtttattayacacacaaaaacgcatacacacagtggtgcgccaataaaaatttaacaattggctctgcagggggcaacaaaaacgccctgatttgtagggtctgccaatttccatgttgtaaatccttcgtgcctgatttcacgttgccaacacaccaacaataaatgcatagttgggaagagaggtacagagttggccgtcatgagctggtagagtcagcgccagcacatggctgccctagagcctctccatcatgcacataaatatgtcatacagaaatgcatcccataatgtgtagyatacatatgatttctcacgaaagagaaagtcatactacatgacttataactaagtcatgaatatttttcctagatttaatccacaatcattttaactataaattggttaagccagtcaactatagtttagggcatatgtattacatagataatttttaattgttaaggtagttggaatggttaaaaagtggcttagccttctcactcaggtagagcctaagttgcatattttagaattaatcattaacacactaagcaggcctgcaaaacatccatgaatatatatttcccaaaatgaataaatcaaacacctgaaagctgcaaacctttatgtgaagcatgaaaaaatgccaatagcaagaatttatatactttatgcttggcctgtttatcttcatggagattaatagagtgaataaatatttataataatggtgtaagaacatgctgaatagtatactgtattaaagttacatgatcttgtcttgaattttgtgtttggaatagtactaagaaatatgctgagggagaaattgagtggcaattttcaaattaatatatatttaytgagctactactatgtgcaaggcacagcacccaggcactacatgggacacaaagataaatgcatacagtcttctcaatgaaattacaatcaatamgggataataagacaagaggtcaaatatttaacatacagggactagtaggacctatagaaaggaaagatcctattctttgggaagatataaaaagtcttttgggataaggtggtatgaaaaggaaatgaagtaatgataacttgaactgaagatgaatagaataggttctactaaaatttgtccaggcccagcctaacatgctaggttacccgtggctacattctgttatttctgctgcttaatgagtacatgacaatatgttctggtcattataggaattcttaaaacaaggagtcattctgccttagcaggtggcatcttgaggcttttggattctgtcttcaagttttttaatgagcaacaggccaaacgtggattagtttgaagcagcttctgtggactgtgtcaatctgtatgcgagggtgaatgagtagagagggtggtatggaaaacaactcctgtgattcccttaaccttctttgaggaagggaaaaacttgggataaaactgagtattttttcaagtctactggtgagaaaagcatgtcataaccgaattgcatctgtttgggtatcatagtggtttggggtgtaaattagttattcgaagagtagtatcgatatgaataattgattaattatttcattctacatcttttttcctaaaataatttaggaaaacaacaccctaatcagtttttctcaaaactaggcatttgtagcccccatttttgctagcaggagttgaatgtagtttttaaagctgaaaataaaccawcacattttctaaaactctttatagtgagagcataggtcttaggaaaaaatatattagcattaataagtaaattgtctcaagtcatactaaagcacattactaggatcagtaaaaaatatatatgcacaattgtgtattagattctgtggctagcaaacgaaaaattttccaagctgacyttaaccggagcccatcttggtagatgtttcaactattgtcacatcaaccttgagaagagttcaaacactaagaatgaatgagggaagaggtagcggctgaaaggattactgagctccacattgacttgatggtcaaaagggcattatggctctgaattttgatgaggcacatttaccctttagcccatgttaacattttcttcaggattcattactattaaaattatttatgaaaaagtttttgtrctggatcattaccatcagaataatcagaatgaatgccacactgaatatcaaaagaaataaaactaaaatcattataaggacacaaccatgtgatatttgtccatctgctctttaagcaatgttatgttatttcttgcaacccctacacaaaggccaagaaattacacaagtactagtttattggttattcacggagagtgagtacctgaaggagaaggctgtccttttactacaccatttttagtcttttcttctgaattcattacttccttgtagataagttctgtaagaaacagctgtgttattatagaaaacaaatttatccttcatccacagggaaattcattacttaatgccaaataattacgttttgatggggttgagtaaattaaaaatcaattgagattcctttactgctctatttctatttctatattgccttgtaattagcagagagcctggcacaaataggtatctagtaaagcagttgaagaaatcaatgcatgaaaatttatttctacgtacatgaaacatactatttatttccatatacatagtatttatttctacatacatttctacataaataacatttatttctacatgcatgaaatatttctacataaatgaaacaagtaatacatgttttacttgttttctgaattctttgggggaagtactaatacattctagctcaatctagcaacaatttttatggctttgaacatccatttttctttatacttatttcctatgaaatgcacacattctcatgastttaaattattaccaatccttacaacttccatctcttactgcatctttttttttttccagactcatatcttggacttgtaaatctaaacttgccaaaaaccaaacacattaaaaaatttagttcatttactctcagactggcatccatttttggctttctgaatgctagagttaaattggatagtttcagttctgtttactytgtccctttagctaaaaatcattccgccctactcattcttgctttgcaatggcttataatctgtataatcatcatcctttacatgtacttctttctccaatttctcacaatttagtccatgtcctcctcaaatgatggttatatcctatcacccacctattcatgagcccctaaggagtgccttcctgtccttacttggatcaaagcaactctttttcatctatatcaagcatcttttttcacttgatccactttttgtatatgttcatttttccatattcaccaacatgaccctggaatctctggaccagtggaatctctttagtatcttttaaaatttttttattttattttttattttacatatatatatagagagaggcagagactttctctgtcacccaggcttgagtacaatggcacaatcatggctcaccgcagcctcaacttcctggactcaagtgatcctcccacctcagcctcccaagtagctgggactacaggtgtgtaccactatgcccggctaatttttgtatgtttctagcagagacagggtctccctatgttgcccaggttggttctgaactcccgggctcaagtgatcccccagcctcagcctcccaaactgctgggattacaggtgtgagtcatcgctcctggccctgtttagtatctttataacattttctgcttattcctgtcctttgttttcctcttagtcctttatctgatattttcttaatattttttcttttcctaatttacacttattaattcctgcaaggtagctcaaatgttccttcccttcagctcttcccattttgatctgatcatttgctacaatctgcatttgactttctcatatttattctattctgtagtgatttagattagtagattagattaataggctactcagatacacatattttctatgtaaattctcaagtcttatcaatccaatgagtaaactcatatattgactatcttttattttctaaagtctaaaaccatctcagaattaattttaatttcatgcttcatatgatgattttatgtacaaacatagaaagttgtattctggaattctgaactaaagcttgccccccaccatgacaaacactgacaatcagtaccattttaaaaggtatcgacaaacactgacaatcagtaccattttaaaaggtatcaatggtaaatgcctttcattcttgagcaaatgtgacattgctttcggcmtgaaaagacagatgaagttttaggagctttaaaaatggtctaagagaatagcagtcagcaaatcattttttagtaaattgttttacaaggaaaagccttgttgatactttctgagttcaataaaataaaaagtatacttttttaagtagtagacttacctttccattcttcaattgtgtgttctctttcatccaactgcttgtcatatatctgaggtggaggctgccraataaaaacaaaaaataatctttgtgtgataatgtaaacataactaaactcttacaaygcacgagaataccttgccctcatttatttcggtgatttsaaccgtatataagttatgaggaaattacagtagttcagaagttaaaattttcytgtaaacttayggaggattcattcatattgcaatatttgctgctgacccaatattgctgcaatatttgcagcagaacgcaaatcccgagagctcactttccgacatcttctgatttagaacccacgcctaagcaattaatgactggtcttttaaaaaacagacaaaacacttgattacaatgrcccagaagctacttttccttcaytcacttgccttataacagaaccatgctaaaattcttctaggctaataagattttgttctatttttagaccttccctaaagaaaagtttatatttctcaacagaccatagtactagtcctcaatataaaaaaaattgagatcaaatcaacctttttatttttcatgaaataccatagaatgtctttatatattgctgtgtgccctatacttaaacgattttaagctttttggtttgtttgtttatttgttttaacctgcagaagctgccatgactgtagaggtaggtcaccttgaatccctgaatggcccttggttagtcctctctagcagaaatgatgcaatagggccttcagtctgacttatagagccagcatttctcttcccatgtggagttcaaatgtggaaaaggagggattttcacaaacctgcgtgcctactggaaagtggaatctcaaataaattctctgacctcttcttcctgatatttaggctttgggagatctaccatggcggctagggtagctccaattcaggccaagtgatatggaaagaaaaaaaaaaggctcttggaaaaataaatcaccatgaggtagagaaagaggaggctgaggggctacactggctggcaccggtttaagcgcaaagaagagctatcaagtttttgctaccccgtccaatactccaaaagcaatagtttttgtgaaaaactaaaagagtcactcaataagagtgatgcaacccctttaggacacagacctttcaaaaatggctattatagtaaggaaagctctggacaagattttcagagacagcttctggcttctgtgagagctttttggctcatgaacagcaccctcgggctamagtgacccttctctaattcatgcagaatctgtggtagcttgaatcatgacagacacaaatattcatcctagccctggcatgctggggcctcacatcstgcaaagtatctggctatgaaaatagaagactttgccyggctgtggtgaagtaacttagcataatactgaagtattgagaaataactactcacggagccagacattcttttagcacgtttgactgatactggggcagaaggctgtaaacctcacctactgcaattcagatgtggctggctgagcagctctcagcagccgtcagcactgacaactaagcaaaatgagactctcacaccaccccagacaatagtaagaacacaacacattgaacgtatataaggtgacaggactgggatagtcaggcactgctctcaggacctgactgaggtagaaccttccacctctataaaggactctcaaataatagaaacattctgacttagtgagtgaatgagtaaaatgaagttatttttgaaaaattgtgaaaccattacctaaggaagctaccacaaagccaaactctggttttgtaargacgctttgccaagtggtaaatttccggctttgcctcttcctgagcatgtataatgctgtggttaggccgctatccaagcgaccttgtccaggacccctgcaggacacagtgtacataagctctcagagcccccagagccctctgagctgttggcacctccttcttcttctaacaatagatccagctcatgatcctgcctggctggcttctccatgcagtggatttttccattcaagttttaaaattgaacatggctcaagagtacagttcctgccaaagttcataaatgccattttctttttgcaacaaagctattttcaggaggtttccctaggagcctcagtgtacagctgttgctgatatataaagcacaaagtacatagacactaatcacaaacaaactacaagagagaatgcaaagtgctgagttcaagatttttcctttcaacaaaccaagagggctgctttaaaccacttgatttayagtatttgttcgacggcctctgcaaatttactacatattcagatttttgattgtttgttttttgaagaggaaatgcgaatgtcacctccagtgaaagggcacattcacatacagatgtcttctatgtgacaatataaaagaataattgaccaataatccagagagagcaatgttacaacacacacgtataagtgctgggcagcaatcatcaggatgagatagttcaaaacattccctgcctccttccgctaaggagaagttggtatttgagcactcgcttgtgctctttccctatcttatttaataggaattattcttttgctaagtgacaatctaaataaaaaataaatgaggagtggggataaagaaaaatgccccagaggtgtctgttgagagagtattttaggagagtttagcagataagagtaattgagatgtgagaaatgaaggataagaggacattaaagatagtatatgaacagttatcagggcctgtgactttcaccctttgaatattttttcaaaagactgtaaacttctttcatattattttggaagatttgaacttccttggttgaaattattgcagaaattcaaacacaaatttatatggattgcataaacaataacttaaaatggattagacacatttttattgatggttaatttcatatgaatttatattggtggtcaattatatgaattttatactgatgaaacatgtccaaattgtttcaattaaatgaggaaaaaaacacaaacaagtacatggtcactgtgaattaataaatactagaatttatttatttctttattaaatgtattcattcagtaaaggtcttgggcacctaacacatggcagactatataaaaaactgagatttcaaaattgaataaggtgactgctgaccacaaggagttcacaatttactggggtaagactgatgcaaaacagatcattagtatacaacatgataaatgatagaaacctgtatatggtctaagggaacagggtggagaagtcctaacaaagcctagatttgatttcctggagtaaagtgatgcttattcagtgagcgaaagatgtgtgggaggttgtcaagataaaagaaggaggaaaaaagtgactccatgccaagagcacattataagccaagtyacagtatgtagaaaacagaataggggtggtggtggtggtggtggtagtggtagtggtggtgcatgtgtttctctgtgtgtacatgcatgccaagaaaacaagaaggaattttgtcacagtaaaataaaacatgtcgtcagaagtgacaagatatamgagctgtacttagagaagcagaagggtcagacaaagggtggatcaaggatgatccagggggccaggcgctgtggctcatgcctgtaatcccagaactctgggaggccgaggtgggtggattatttgaagtcaggagttcaagaccagcctggccaacatggtgaaaccccacctctactaaaaatacaaaaattagccgggcatggtggcaggcacctgtaatcccagctactcgggaggctgaggcaggagaatcgcttgaacccgggaggtggaggttgcagtgagcccagattgtgccactgcactccagcctgggtgatagagtgagactctgtctcaaaaaaaaaaaaaaaaaaaaaaaaatgatccagggtatcatgatacggaagaaagaagaagagaaaccactgaggaatgtaagagaacggaacagtgaaatttacagctggattgaagaaagatgtaactgtaagcagagagaagaggtagggagccattgcacgatctataaaaaaatattgaaagttctgactgcggttaaaaaaaaaaaaagatgagggtgaacgaaagacacagattcaggaataattaataaatgttaataaataaacttggtagaagttggtttttgattgaacatatgtgatgggagagaagaatatgagtccccaatttctaagytgagtacctgggaagatgatcgtgttggtgaagccatctaaagaaatagagaatggaaaaggggaaatgagattggtagaggtgagcctaagtgttatgtgagaagagatgatgatttgaaagttaagtatataatctgaagttcagaggaatgctgttggctagagatgtgtatagatttgagactaacagcaagtgatgtttgttgaaactatgacagtggatgaggtcacccagggaagatatgtgggtatagagagtaaatggccraattaaaatttaaagattggacagaggaaggtaagttcactaaggcaaaagagaatagctaaagaaatacatgaaaaatgagaatattgcaatgttatagaagtcaagcaagtagaatttcacaaaaagctagtaattggccatttcttgcaaatgaagcacatgaggattttgactcgcagggcaccagaaaggcatgatagaaagcatgcctctgaaccctttgaaagctttccaaactttaaattgctatcacccccagaaagatccagatagatcttcggtggaggacgttaatatgagacatcacctaaacaattgaataaaatgtagaaaaagatcctcaacaccaatataattaaaaggaaagaaaccatagaacaattgtgacactagaaaaactataatgatctcagatctactctctcaagtctctgagaacttgataaaaaaaaaaacactgttctctatctagttaaaggaagtcactttttttctgagaaaccaccatatgttaagctgtctttatatagaccttaataatcctcacagtcaggaaactaagattcaaggaaattttaaaaaatatatcatgaagtcatatagctaattaatgatgaaacttttattaaaacccaatttaaagagtaatccagagcaagtgtcaatactgttgaatctaaaataaagactaataaaacaatatttaaagtgaacatctttgtaaaacaagaaatagaaacataagccaatagggtgaccatatttcccagtttgtacaaaatagttccattttatgcttattgtccttgtaattattagtagcacttacgcccttcgctcctttaagtgttgtggtttggagaataaatatgtggacactctacatagcaatgttgtgacatggcatgttagagatctaaggtatacagtaatttgaggacaaagaaaacaactgaattgcaatgtttttctaccactgaggtttcaacaattgcagctgtaccttttccttctctgagacagcacgtcagcatttccttccattttctctatttttagaaacgtaaaattcagctataaaatatggctgttggcagacagtacagacaagagtagaattctgcataataaatctatagttgaaaaatatggattctgtgggcattctatggagttcttgctgttggccatgactttctactaaagcgatctctttaacaagtacctgttcaattcctaattgagctttcgaaggtaaaagttgctctttctgcctgtaatcccaggcctttgggaggccgaggtgggcagatcacgaggtcaggagatcgagaccatcctggctaacacagtgaaaccccatctctactaaaagtataaaaaattagccgggcattgtggcaggtgcctgtgttcccagctactcgggaggctgaggcaggagaatggcataaacttgggaggtggagcttgcagtgagccaagatcacaccactgcattccagcctgggtgactgagcgagactccgtctaaaaaaaaaaaaaagttgccctttcttgtgacttcattcattttatcccatatatataagtaatattcattgagtaaaatgtgtgaatttattttttactgaatctttgagataattttcaaagatacatgggaagtatctttttcaacagcattataggatattagtggtaaaagaaagttcagagattatctaatgccacccttattcaattttcaaatgagaatatagaaactgagaaagcataagtgatttgcccacaatcacagagttaattagtgacagatgaatacatttatggtctcttatgggaaaagacagaataatggaattcttatggttgaagaaacattaaactggataatttgacacctgtaaaagatattcattaaagacaaatttgtgcctgccacacactgatttctgttccaattttctgtcagtctacacttacagctagagctggcaactatcatacaagcagtcaacacttacattcttaaacacttttttgtcaaagtatcatggacatcaaagacctctaaacacatgaatctctaaagagataaaaaccagatatgagaaatctaagttgtacaaagttgttcctttgattcttctttgagccctgaactgacatttttccctaacacttatgctctgaaccatatgacagtccatcaagttgttggtgtttgtctgctttgtcctaattaaggatctccctgtgttctgctgccttgtttaaaatgtcaacaaaagctttaaatagcactgtatctcagtgtgtgcactcattattaattcaacatctggatcaaagtaaatgatattatatcttactgaaatatgctttgttttttcttattaagcttggcagttagatgattgtcaaaagatgcatgctttattaaaacgctttaagcaagaagggtatatcttagtacaaaattagatagaacaggaaatccattaaggaaatatacaacattttgattttatatttccttgaatctctacacatagagttttctaatttttttttcttaatttgatgactaggacttgttaaattttcaccaattaattagaaaataaaaattttggtaaaatgactctgatgaagcacaaaatgatatgcacttttattgttttatttggctaatggcacagtttagcatgtccaatttttctctaaagccttatattctctgtggcaccaasagcagttcattaccccaaaatggagctcagtatttgtttcacaaatagtcttaccaacaatcgccaaaataatgaaaatattattgcaatatgcacaattatcaaaakaattgattagatataattaattcctatgatttctcagtaatgtgaccttactatgcattaagcaatgacctggtttccaattaccaaaaacttcattgccttctgaatgtagatatatggcattttgtgatgtactatccgttgattattaaaaattgcttcagcaagtttcaggaactatgtctgtgttctcaaacagaaattaaataatatactactacagattaaataaatgccttttaaaagtatgatttgaggagatgtcagcaagatgataaaataaggctctccagtgctccctctctcacagaaacatcaatttgaacaactatccgcacacaaaaataccttcacaaaagtgaaggaaaccaggtgagagatttcagcacctgggtatagcacggaaacaagaaaagatgcactggagagagaggaaggacagtttcacattacctgcttcacttttcccccaattaccagacagcacagcatggagacagataccctccacatgatggtaggagaaggaagtgagcatcagactttgccttagaccccaacactgggcctgccacagaaaaacccagcaccaaagagaccctcacagccctagacaccaggctagtacttgtggactgagcttccacacctttcccagcactgatcaggggcttatagccttagactcaaggtctatacagcagacttggtctctgggccactctactgccaggtcyaccttagcagcccagcctctggaacttctccagcactgggctgtcccctataatcctggacatcagatccatcccagtaactgactatttcctgcagactcagactcaaagccaatcccagagccaagtagccccctgtggacccaaggataaggccagcctctacagatgtaggcaaatatttgcagacataggcgtcaggtctgcccttgtgtacccaggtttcaggcctatccatggggactcaatcaataggtccacacttgtggatctagacttaggcccaaccctatagacccacccacctgctgacccaggcacccagacaccaagcccagccaacctacctgaggactccaacagcaggcctacccttagacgacaccaaatggcatgcacaggttctatggaaaggctgactgataaagagttttcccagacaaagccagtctgcaaagactggaataagcccttacttcttcagatgcacagacatcagtgtaaggaaataagaaacatgaaaagctgaggtgacataaaccaccaaaaaaatacaaaaatctcccagtggctgagtcaagagaagtggaaatatataaactaagagacaaaaaagtcaaaataattgttttaaggaagctcaacaaacttcaaaaaaattacagggaaacaatttcataaaatcaagaaaacaataaataaaacaaatttaatagagagattgaaattatttttcaaagacaaagagaaatcctattgccgaatataatgaatgaatgaaaaatgcaatagtaggattgatgaaggagaagaaagaatttgtagccttgaagacaagttatttaaaaatatatggtcagaagagaaaaaatgaaaacaaatagagaaagtttatgtgatttatgggagagcatcaaaagagcacattttttagttcaagaagagaaagacaaaggggtaggaagtatgtttaaggaaataataacagaaatgttttcatatcttgggaaagacatattcacgtagaggaaagttaaagttctctaatcagattcaattcaaacaagattacaccaagatatatcataatgaaatcaacaaaaatcaaagacaaagaaaggatcctaaaggcaccaagagaaaagaagcaaataacatttaagggaatgttcctatcaagctagcagatttttcggcagaaaccttacaggccaggagtgtatgggacaacataatcaaaatgttaaaataaaataaaaaaactatcaattaggaatactgtaccccacaaagttgtccttcagaaaaggagagataaagtctttccacaacaaaagttgagggagttcaccaccagacctgtctcacaagaagatgcttaagagagttcttcaggctaaaagaaaagcattctaattagtgacacaaaaacatgtgaaagtgtaaaactcacttacaaagataagtacacagtcaaactcacaacaccctaatactgtaatggtggtatgtaattcacctatatctttaccatgaaggtgaaaagaaaaaaactactaagaataacaatagctacaataatgtgttaaggcatctacaaccacctgatcttcgacaaacctgacaaaaacaagcaatggggaaaagattccctatttaataaatgatgctgggaaaactgcctagccatatgcagaaaactgaaaccagactcgttccttacaccttatacaaaaattaactcaagatcgattaaagacttaaatgtaaaacccaaaaccataaaaaccctagaagaaaacytaggcaataccattcaggacataggcatgggcaaagacytcattactaaaacaccaaaagcaattgcaacaaaagaaaaattgacaattgggatctaattaaactaaagagcttctgcacagcaaaagaaactatcatcagactgaacaggcaacctacagaaagggagaaaatttttgcaatctactcatttgacaaaggtctaatatccagaatctaccaaatttacaagaaaaaaacaaacaaccccatcaaaaagtgggcgaaggacatgaacagacacttctcaaaagaagacatttatgtggccaacaaacatgtgaaaaaaagctcatcatcactggtcattggagaagtgcaaatcaaaaccacagtgagataccatctcatgccagttacaatggtgattattaaaaaggaaacaacagatgctggcgaggctgtggagaaacaggaacgcttttacactgttgctgggagtgtaaattagttcagcaattgtggaagacaatgtagtgattcctcaaagatctagaaccagaaataccatttgaccyggcaatcccattactgggtatatatccgaaggattctaaattattctgttctaaagacacatgcacacatatgtttattgcagcactatatacaatagcaaatacttggaaccaacccaaatgcccatcaatgatagactggataaagaaaatgtggcacatatacaccttggaatactatgcagcaataaaaaagaatgagttcatgtcctttgcagggatatggatgaagctagaagccatcatcctcagcaaactaacaactagcacaggaacaaaaaaccaaacactgcgtgttctcactcataagtgagagttgaacaatgagaacacatggacacagggaggagaacatcacacaccaggacctgtcagagggttgggggcaagggaagggagagcattaggaccatacctaatgcatgctgggcttaaaacctagaagctgggttgataggtgcagcaaaccaccatggcacatatttacctatgtaacaaacctgcacgttctgcacatgtatcccagaacttaaagtaaaattttaaaaaaaagtgttaagggatacacaatataaaaatatgttaattgtgacatcaaaaattttaaatgtgggaggaatggtggagtaaaagtatagttttttaaaaatgcaagcaaaaagttgttatcagcttaaagtagyttgttataactataagatgtttttgtaattctcatggtaaccacaaagtaaaaatttatggtagagacaaaaaagatacaaagtagggaatcaaagcataccaccagagaaaattattttatcagaaaaaaaagacaaaaaaagaggggaagaaatgaacaaagaacctacaaaacaaccagaaaacaatgagctaaatggcagtattaagtccttacctattaataattaccttgaatgcaaattgattaaattttccagtcaccttggatgtgaagggggctgagggaatagaaagaaaagactccaaggtatctcattatccagatgaaaacctggatagaaagtagtgccatgaattggaaggaggaagcatagatttggtgtrgagaggagatatggccagtttaatatttaatatgttgattttgcaatgccaatttcaattccagtgactgttagatttatacatctggaactcaggccagctctatgggacgatgtgtagaattgagccatttatgataattaaaattaaggctgtggtggaagataagactcccagagagaaaagaaataagggctataaagaaaaaatttctgagatgcacaattctaagggaagagagaacaacccacattgagcaatggaggctgcaggagaacaggtgtgctgccaccacagaaattaacatgcaggggtgcagaaaggaaggtgttgtcagcttattcaaatgggcaaatacatgagatacccatttttttggacttggcacctaagaggccactggtgaatttagagaaagcagtgtcaatgtttaaaaagtgaactggagtaattgtgagtaaacaaggactaatgttttatagagacttggctataaagctataagtcatacttccattgctaaaggtagaagtgtagttaaaaataaaggtttgctttgattctttgttctttgaaatgaaagagactagaacatgtttatttgtaagaagtaattgccactggaaactgaaacataggacacacacagagaaggaagagacccacatgcagaaaacaaaggctataaataaaagagtacagtgtcctgggttttcctggatcttgtgtaaatgactccatcacagcattatcatgttttcttctcaacatcttcatcattctactaccattcgtagaaartggattttcatatattatctcatttagtctttgtgacaaacctcctattccaagtatgcaactgaggcacacaaagatttaaaaatctatgagttagtagcagaggccatatttaaacccaaatctaactgaatacaatgtctgtgttctttgcatttttccaccccaggcttatagttcctactaattcaacctattgaaatatattttaacgttttattaggcaaacaaagcaacagagaacagcagggaaaaaggcgactttatctctagctgacggggctcttgaaatgctgttaatcaggattctagatacaaatttccacgtccactcagaggggcgagaatgtgcaatatattgtgatgctgccaccttgtggcaagaaaaaatgaaaacattaagaggtgctttgtgtgcatatttatcattttcaattaaattgctctagtttatggttcagctacggctgcacattgaaatcatctgggagttttaaaaatactgctgcctagatcccacctcagagattctgatttaattgttctggggtgaggccttggtgtcaggatatttttaaacttcccaaatgattctaacatgcagcaaagattaagacctctgctctaaccacttatacagtagagaagcaagtcttgtcatttgcctagttatgtttcatttgtatagacgcaaaagaaaacattctagagaaagtaggtgattttctctcaatctttaatggcatctagttcttggtagaatacaatgatttctggacagatatatcatatactatgattttaaagaacaggacaaagaaatttgtgaattgtaatcaaagtggacacaagatttgtgtctcataatcaaatgcagtccgtagactaaagtgagcagggagaatctctgagcctcataatgcgtcacaggttttctgaaaggaacaatggaaagagcactgaagcaccattgactctggcactagtaagatgagtgaccttgagcaagtcactcagtttgcaatgaaagattttcatctactgctttattcaagagaaactagttccaaatgttcaacaaatatcataccaggtaattcaacaaaactttcttaagtacttgcaatgcaaaaagcatggaattataatgtgttataaatggaaagcactaatgttgcttagagacatcatagcattaggtgaccagaggaacctttgaaagctagtaatgcaaattttaattatgatctgaactgagtgtaattagaaagcttaattacataatgctccagtggtttggcaaagaagttgaattcagttttctctatttttcattctgttctgtagttttctcagatttatttattagctctacaccatcaaaaagtgtaatcatgtcttgaaaatgaaatttctctttcctgctccttggaaattaaaattttctatggttctttaactgaaaagtttcagtaattgcaccaccaatcacccagtgccttggtcaggaatctttctttcttcattcgttcatttaacacatatttattaaccctctaccatatgatattactcatctttgaattccacctcccttaaattccaaatttaattatttacaattcatgtcaattattagcttctaaacatctcttgaatattctgyccatgtctacagtgatttagattactacagatctatcctcctgccttctagctcccttttctcaactccagtcccacactgcagacagtggccctttgaaacttcaaatctgctaatgctattgccccacttcctagtgaatggcttcccttcaccctaggatagcatgcatggtmcatgacaatgcttgggaactccttccttatctggtccctgcttaccagcccaaaataatttctcacccttctccattaagtcactcagaaagcttaaagctttgcaattctctccaccctctcttgaccctgggatttttgcatataccctttcttctgcttgcctttcttcacttggataatttcttttttagcccttcatgttcctgtttgaaaattaatcactccaagcagccttctgtaacccacattactgggttatttttatgtgtttccaatgtacaataagcttaaaatttggaatacgtatcatcaacatttacttatttatcttctcactagaccatgggacaaagaattgagaataaaagacctaggaatccaacttacaagggatgtgaaggacctcttcaaggagaactacaaaccactgctctctatttgtctgttattcgtgtataagaatgcttgtgatttttgtacattgattttgtatcctgagactttgctgaagttgcttatcagcttaaggagattttggactgagatgatggggttttctaaatatgcaatcatgtcatctgcaaacagggacaatttgacttcctgtcttcctatttgaatacgctttatttctttctcttgcctgactgccctggccagaacttccaatactatgttgaataggagtggtgagagagggcatccttgtcttgtgctggttttcaaagggaatgtttccagcttctgcccattcagtatgatatttgctatgggtttgtcataaatagctgttattattttgagattttgggctgagacaatggggttttctagatatacaattgaaaatctagaagaaatggaagcacagtatatagtacatagtagatatccaacaagtatgaaccattgatgaagaacaattatttgcattcaaaaatctacgatatattaactcggaaaaattggtcaggtaaagagatgaaataaattatgacatgtctgacattattcaaataatttttaaaaagtagattccagcttttgatatacacatattagccacacaatcatgggcaatgtgcttaacatccattaacatcctgagctttagtgtcttcaattctaaacacagatacattcattcagcaaatattgattatatgactactaagggccagacagtgttctaggtagttgggatacagcagtgccccaaagagtcactgtctctctttttacgcatcttaaattctagttgatgagacagataataaaaagagatatataatgtcaaacagtgacacatagagaaaaaagattaagaggctagagtgtaacagagtactattctattttttctttttagtttttttctttttgtttttgttttactttttaaactattattagtattatttttacaaacacttgtaccaagggctgactttcaatagatcacagcaaggatcccctctgctacatatgaaaccctgacccagaagcaggtcatctacttatgttttagtgccaggttacacacgaatgtgtgttacatgacgggcaagggggcggccgaagagtactattttagaaaggatggtcataaaaggcttytttgagaaggtaacatttgagcagagatttgaatgaagtaaaggagggagcaatgtgaatatctggaggaagaatgtcccaggcagaaggaaatacaatgcaaagaccctaaagggggagcttgcttggtgtggtaaggaaaccgcaaggatgccatatactggtgcagagtggaaaagggaagcctaaaggtgatatcagaaaagtaggcaggagccagactaagtagagccatgttttccaaactgcagtcatgaaaacaaattggtgtcatcactagcaccttttagtgtaactaagaagagtaaaatgagatagaaaatatcagtgtatggtttttcttttgtgtgtgtgtacgtgtgtgtgtgcacgcacgtgcacttgtacacgcatgctgggttgcaatgtaaaacacccttcttactatgggttatgataaaatttgaaacaacactgtggtagggccttgcaagccatgataagtactttgagttttgttataaatatgataagaagccattggaagatgggaaggtgttagctgaggaattatgtgaatgtaacgtgttttacattttaaaaggaaaattctaggcattctgcagaatggaccacaagggacaagagtggtgctgagagataagtcccagaatattacatggtccagggtagaaatgatgtttgcatagatgaaaggatgagaagtgatctgagtcaaggtatatttagaaagtaagttcagttaagagttgttgaggatagtcatcattttctagagtttttatgaggcttaaataagattggatatcagaaagggttttataaacactagagaagtgctcakcagagtacagctgagttcaattcaaagggcatttactgaccatacactatgcacctgccattactctcactgttttctctgcactcggtagataaaactgaatttctgctcccaaggaactttacagcagtagagttgtggaagatagacataaaaatgaatcactgcagcataatgcacaayatgataatggcatatggaaggttctaaagaaaatgagttaacttaaaattcygagaagcagtagcttttgttgcaagcctttcttttcataggtaaaagatcacattagccccaaggatattctgtaggacaaatatgagctaaaaatgaactagaaaatagctctaggtgaaaaacacatcgaacacagatattgctgagttagtctattaaagccacatgtcatttgcacttttgccctacagtcacaaaacaaaagcaaatgaacaagggaaagaggatcttcagccctcctacataagtaacatgaatcaataaggagtcatcctggagaccacagaaaaccacactcttccagttagcatcaatgaatagccccaggatacaaatccacagtgaatgaagaaacatagctacagaattagaaacattattaaggaaaattgatttgagtatacttcactaatgttagagggataatattatattttaggttgaaatgtaataatttttttaattccaaagtgtctattaattttaaaatatacatactttttgttacaaatatttatttttccccttcataccactaatctctgtgaaaaagtttagaatgtgacataaaggttctaggttaatgaagtctttcaatcaagcataaagacttctgctaatctagtaaaaaccgccccttctacctacatggattcaatatatttgttgcattatataagaaagcatttgtgtaccacatttacatatgagatgtttatcagaaagaaagtggtgctctgaggagagggagatggggaacagaatcacttgagagtgaggatttatttccaattaattaacatgcccacaagaatctgccataccccacatgaagaatcattgctttaatatagattgatgagttgataacgttaatgagttgatgactgtctctcaggtatgttggggaacaaaaaagtttgagaaacaaatacagtcataaagaactatattctaataataaggcgttaccattgctcctactttttaatgtattatatacattattatataatactttttaatgtatttaataaatatatctcatagtggattttcttaaaacagagcttgccttttcattaagtaattactccaaggagtaattttaaaagaaaataagtctaactgagcttttgtgttaacatgataggaactgataacatttccatttttcttatgtcacatagactaaaactgttcagtttaaaatagttcaattacctccataarctttaagaaaaccttctttaataacatcctatgttttcaaagttaattgggtactttcacatttttttcctttaaaacattattagacaggacatttcatgggtaaagattagtgatgcaattataccaccatctctgaatgtcattctttcttcatctccattgccattgaagtccattttgtcatcttttatttcaactacttcactagcttcctaaatcatctttctactattttatcacttcatcagtcagaaagaatgatctacctaaaacacgaatcccattgtgttactccctgattaaaatctgttcccccaagcctgcagcttgggtaccctctgggaatgacttaaaaggtgtttcctgaccrggaccctgcttacatttccagctgcatttctcaccattcccttccctgctcacagtgaattaactcatagttccccaggtgtgtcctggttcatcttctctcctggccattgagcaggctgcttcctttgcctaccagattctactcttccacctccatttcacttggtaactcttgcccatccttttggtcccatttgaggcttttcttcctcctaaaaacctcctatgtctgctataggatgagttatgccttattcctttgtgtttctatggcactagtactatggttatagtatcttacttacttacatattaactctactacaaactactaaataacagaaactatgtctttttatcattagaattagtcaatcttcaatggcagcgtacacttgaagcttaacaaaagtttaagtgaatgaatgtggtggacctgtccaaggtatgatgagactttgagtccatgtcctctaattgttgacccacagtggtttccactgtgctctactgtctcccagtgccatgaccttggtctccacactctgtaactcttggtcctcctcccattgtctgtctacagtcctttgctttgggaaagctagactaagtaaggcaatattttaaattaactaattgcaagccaagttttttgcctggatttgagcttagccttccattcttgggggagctattcattacttaagaaaacctacctgtgactatgcatgtaagaattctggctaggaataaactattgttcatgattaaacaggaatggtgcaagaggcatgagcaggcctacctcagaaaaagaagtggtaacagattgctgtactatgaaaacagcattctggcatataygtcctgaaagaaagtcaccaaaagttctttacgctaacttagtcaaaaacaacacataccttaggtaagaaattttcagaaaaagtgcttgaggsttagctaatttatctctcactttttacagaggaacatcgaaggaattcagctttcaaaatgcacctaaagatagaaatcagattcttcttggaattagaaactgtggggagcatcttttgattgttgattgaactcatgttgttttacatacattatattctctttcacaatatattgtgggtcattattctacaaacaaccctctgagtctcatatgaaacctgcagcaagttatggaagtggcttttatcattcttacaattgccctaccattagaaagggacataataattttattatagcacatactcctggaaagaccataaacttttaatagacttgtaaaaagggagtgtaaccttttcaatattctgtctcatctattctaccttctcctcacatataacgaatgccctagggcctaagtcatggatctacacttgggaagaaaatgttgagattcagccttttccctgaatctgaaggttaccatgatttagcacccaggaatagtttctgcctatcctttttctggttcttttgcagctctgcaacttccagacttgtggtctatgtagagttgtgatgacattccgacttcatgtctatagctttcatttagggatttttaaatgtcagcataaacatcctacagcgtttaaagttgtcttcacatcaccacacatattcattttcagcatcattaatgattacactttctgattattttcctttctctgctagactgtcaaacttcttagtttacttcctaatattgatagcatcaccagctctaagcatgacttctcaaacaagatgtttggttaattttctgtgtgtttttgttgttgttcatttgatcgtctcaactttttgttgcaatgcacaacataaccaccttcttagatcatggacaaagaaacaaacaaaaatctttggagacaaacatggcagaggaaaataaatatcgcaaaggaagtgagtgcttccgaaaaacaaagtggaaacaaagtatgaggaacccctgaaagcctcacagcataagaaaagaactagctacttgaagagtagacagtggctattaatttctatttcttgaaaaaaaaataccattttaaaattgtcagggaccacaagaaactgtttttataatgttaatagtttttttaaatcacaataataaaaattgaaagcataatattttacatttatcagttacttctgcctccaccactttccttaaaaaaagtaggacttttacagatgaaagagcattttaatacaaattttaaaattacccgaagacaataaattatttcctaaaacgtgtattaaatctttttgttatgtctataaatgataatctagtctaagagtaacttatcagcatttttgcagtcccctccccccatccactgaaaactttctttactagactcatgattttcaaaattttaagaattaaatttggagtaaaggaactccgaagatctgaaaaagcctgtgaactggatgtccagaaagatgtaaatacataattattgatagaaaattttgggatgtttttcaaaagcccccagaagttcctctaaggaacccttaggggtcataggaaagctcagtgctgggtagtgagctcctaagagcagagaaatgccctcctgtgtgcatctctagatctggtacagtttcagcattcataggggtgctataaacatttgttacgttgaatcatggaggataagtatgtatatactcgggtgttgttgttgctgttgtttgagatagagtcttcctctgtcacctaggctggagtgctgtggtgcaatcttggttcactgcaaactccrcctcccaggtttaagccattctcccaccacagcctcccaagtagctagtgtaagccaccatgcctggctaatttttgtatytttagtagagacgggatttcgctatgctgcccaggctggtctcaaactcctgagttcaagtgatccacccgccttggcctcccaaagtgctaggattacaggcctgagccactgtgcctggagggtattttttttttaaaaagaagaatgtagtatttaaaagttcatcatgcaattaaacctcattgattttgagagcaaaggagcaaagaaaaatctggcaaatagcaaacctactacttaaagtaaacctttaggaacttaagcagggctgctcaccaaataattctgctgggtacagaactgatgtggcctttaaattacagagtttatgtataataattaacatccaggccttgcagaaaacaatattacctctgcagagcatatcattttctttattgataaatgctctttactgaaaacacaatgatatgaggatgggtaggagtgccttagagctctccttgaacatgtatacacagtggttaagaggagattctttgatgatggacaaaaattcaagtctagtttgattgttttagcaacattacaggtaagcaaacaaggcaggaatgcaaattaccaaaagagttatgcttcctagagattccccaattttgtagcctctacttatctcgaggcaaagctgtctgacagagattctgtcttctgacatactcctattcttttctcttttttattcttcctcttagtataaaatttggtaaattttagttaacagaacatctcacaagttcccaccctgacttctttgcttatttcatagaaggaatgctaaaaaagaaaaatatatatttttttctcccacagtttatggattacatcctatgcagatgacacgttggataatctctttttttccaggatgaaacatattaagaaaataaaayacactctcacaaatgcccactacctcaagataaataggtagatctcacaatatctcagatatcacctaggagagaagaaataaaatcaagtatttggaagaacctgacagaataccttagccatacctcagcytttcagagagcaacaggcatgaaatgttttagaaaaataatttctgttcccttcccccttttcataaagtattctctctcagtgatccattcaaaagattaatagcactcatggtctaaagtgttcaagataaaacatgaaaacaaaaaccaaagcatggattctactagacaacaaaacatgtctctcctaagaatgaacaattcaaccattccagcttttcacacctgagaatcttggattcagtggattctgaatatcccaatgaattaaaattaagatgaacctttctcttcaggaatagaacttgctaaaattagagataaatgagttacatattttcagtgaaatwcatattcctattataagtcatatagggagtgaggctcctaaaagcaggtggctaactctatctacaacaaacattttgacaagctcccaccaacataatacatggcatcaaaacaatccgaaggcaattcaaacgatagcttcacgttaagcagctgaggcactgggcaagcaaaatctaatgaagctatattttctctggaaggcaattagtaaactgctcatattttgctgctgaaagaatacatcagcatgaacagatggaaatttagaactccacaaatggaattacagacattgatttaactttccccaagcaaatgaaaaccacaaaatacgaattgctctttctataattaagcacataattagagtgcatcagattcatatccattgtagctcatatttcttcctcctcatttctaaatttatatatattctgagtctaacaaacctacttagagttcaactccacactgaaagagtcttctatgacagatagatggtactaaactatttctcaaattaagcctgccatgggtcacactagctttttcacagcatgacacatgcggcaataataagaaatccaaagactcaaagaggtagtccttgtggcaggacagatggagagaacagctgagggaggaattcagccagtttattaactccatgtgagtagaacaaatcatatttaaaagaattcataaggacatctggtcgaaaaacagaatttaaatgatggcagttttagaatggagaaaagagaatcatgatgtctcacagtacaatatcactgagttacctctttgtttttctacttccaggaaacaaaaggtcaccagtgacctgcacacagattatagaccaaactggtgrtgggcacttgggaaatacttggactaattgtcaagtttaaaatatacaagaaatactaaaacatattatggaaataaaatcactaacatgctaaacattacagatacttgaaattattcayattgttaattattcttttcctcattctaggatacagtagtttgtcttacttgtgaaaatatttaggggaacttagataaaatttttgtttgatattcctaaaatgctagaaatgacctcagaaatctttttgagaataagccctttataaaaacctccaaataggtctttcctgagaaaactcaattgatgtgctttatcaagtataatagtatgtttcatttataagctttccaagttgaaatccaaagtaataagcatgtttcaaaaaaaatctaaacaagtaaaaatggggaaacttactaaaactgtgcacacatatatagcatcaagaaataaactagcagtaaaatccaaggtcatattcagtgtgataggcactgcagatcttttctattaataaaaagcaacagaggctttttctayccatgaaatgtttttttaaaagagctttcttattattttagtgaaatgaagtttttccttcttaataaaaattttcaaatttctaccaaaaaaaatccttaagtaactcaagttttgcagtttatgcttatttaaatatttgataggtattttctgccacttgagagttgctattaaattttatataataaacttcacttgcaaactgacttccttctcagacaaatcaaatgacagcaaacaaaaataatgcctattaactattttaagtacattactgtaccctgtggggaaaatcaggaaacaaaaactgtagtttcagaatttcagatggattagttattcagaaattgtcttgaggacatgccctaaccttttgatatcactcatcaaaggaaaatgtgactcacaaagactttaatcccctttcctcccaacrggagatacagtctgtatagagagctgtttgcatttataactcayttaaatcatgtcttccagatacttcaggtttaactcacagtgctacactcaaactaaccaatttaataaaaggattataaaatatttgaagcaaacttatgcatattttattcaatggtttatctccaaacagtagatatctactgatgaactatttgaacattagatgcatcaaattcatattcattgtagctcatatttttccttatcattcctaaattcatatatactgagtctaacaaagtacattgcttctagttataatcaaatatatttataagtctattcttcaccatgttgtttcaggaatttattatggattcaagagaattcagtaaaagacaactggttaagccacagttaataaaggtagaaacaatgcaaacaagaactcattcatggagtagatttaatagagcaagtaacacaggatattcataatcaaatgatattagcttttacagtaaaaatgtatttgagagaattaaaagtcagtgataataaggaatgagaataactccttcccatcatcctcagtcatgtgaactatgctcaaaggcttcagatggtcaataaattaatacatgaatctttaaaatataaattaaatatttttatttagttgctatagtaaatagaaagatttaatttatagtttaaagattgtatacttttatgtttagtatagcaactttaggattctttggttttcagtaataatctatgcatttgggtaaccaaacttagtcagcttggtcaggacttttttgtttatttattttattttattttattttattttatttattttttttaagacggtctcactctgtctcccaggctggagtgcagtggtgcgatctcggctcactgcaacttctgtctcccgggttcaagcgattctcctgcctcagccttcccagtacctggcactacaggtggctaatttttgtatttttagtagagatggggttttgccgtgttggccaggcccaaactcctgatatcaagtgatccacccgccttggcatcccaaagtgctgggattacaggtgtgagccactgtgcccagcaggacattattttatattcagtcaaataatagtttaaaaatcatagctaaaagtggataagcataacttgttaattatgattcaaagcagttgatgcacatctggttgaagattagcagattctcactgcagtttagttataactgattaacatttcaagggacataggatttcagattctacagtcaggaaaccatacaccaaacaagttaaataatcaagtaaggtagataattcatatttggaggagtttattttgtttcttcaggagatgataagttatcaaagattctcattcaatagaaattgctattaactattagaaacctaccaagaacaataaaagcagggacctgtttttttttcattttttgtttaaaaattcaatgctgaatcactatcatctaggtcagtgtggaacacaaagtgtgggttcagtcaatatttatagaataagtgaataaatactaaactgttaacaaatagtcaaagcttatgtgaataactctgttggataaaaaagagaaaagggtaagaagtgaagaagagataaaaaaggaagaaataaaaaagaggtgagtgagaggaaagtgaaaagttctttcctagtgaaagaggtctttcctatggcagcagaagagtagatttacagcaacctaaaagaaaacagatggctgaatcctttcaytccccttacgtacatgtggtccaacattgtctcaacaagactgtagccctacaaccaacaatcgmaagagtgacatcaacacataaaaggaaggaagtgcacattcagtggaaaccccaatgagaaatacgcttctgccaagactatcaggttggtatagtacttgcgatktcttggcaagaaatcatgaaatacttgaagaaattaaataattattagggggatgcttacttcactttactaggggaggtccttgagtacctcttctaacatctaaagtcttctcctctccagaggaattgtgctccgttccctggttacttctcctttacttagggatttcagaattgtgaataaggaaagaatgacctggtaagtgccagccctggacacatttgcccacagatgctgtcctccccctttctttagttgctctttttctcagggggctggactctattaggccatatttcccagatttgtctgtcagttgccttaggkttggtctcagccaataggagggagatatcaccaggagacagaggggagaatctaggccatttctccccacccttttctctagaagcagctgtatcttacctgtgttagtgactctagctcccattggacaggccattactacctgggctccagtaaatcgccccctagctctcaggttggtagtggcttcccatttttgcttatctctgtgttggtccaagagtgtctgcttttgacttctgcattgcaatatgagaacatccttatctctgacacctttaaataccccttagggtctcatctacttagatctctgatcttagaccacatgtctctcctgactrcccagctggtcttgactgcttggcctacatatctgcatcagctgtctctctggaatgcccagatcaagctctggaacctgttctactttgaccacaggcttctgattcccttctctctttcttctgatcccrtctagctctattccattcacttcatcatggttgctggtcctatagctgctcaaagttgaaaagttgctactctgaatgctgatgtttgctgaactgcaggacaaaaccactctataattatctctaagttcccacttcagatttaccttgaatagattttaggcataataggcatacacaatatcaaagtttacatrtttgtgtcacaagaagattaaaaataaagtatatttcccacatgattggtcatcccttccatgcatcctctttggtaatatccagtaagatataatggcagacaagaagatggataaaataatgtcagatagtaactctgctcacagggcatggaatctatgatggccttgtaataaaatagcttaatatagccaggttaacttgtttctataaattctttcaccgtaggcaaaaataacataatccctaaagtagtgaactagtaaataataataattaagcatttaagaccctcttaatcactttacattataaacaaacagtaaatgtgtaatagtgttgactattctgggctcatgtttcttaagtgtttattttaattgaacttcagcactaatacatgtaactgttactctgtttcccaggttatactctccctgggaatctgaagatcatgttgtttaattcaggatctgtatcggtagattaaattcccacccaaccctgtcccaattcccaaattaatcttgagttaggtgaaaaaataacaagcaagctcagcactggccctgtttaccaaatcaccttccagccaaattggttgaattagttacaccttttctcttagtctagtggaggatgtcgtgtgtccttagattcccaaacaaaacwtgcccgctctctctctgtggtctacattatagctggagtacaatttccaggcctcatttccagcattctcttctggaactttcatttggctgccacacagaaggccctatgtttcctgccagctgtcctctgggttctcaagtaccccaggttcacctactagagaaaagaattccaaaatgccagctgcccaagcagctctacctgcctctctgccctgattcccagagtaaggtttcagccattaagaactgtctctgggcatctctgaaacacagccttcaacacaatggtctatctggttgatcaccactggccatgaagcttggcctcaacgcctgtcccatcttaggggatggttctaatctcaggtctagctccttccttttagtcaagaattgaggaatcatgaagtgttctctgactccatatgtttgtactaggcttcttcatgatgatttatttgagttttgatgtacttggttttggctgaactcacatctccctctcctgctccctctccctatgcccttgcaaggaacaagaactacaaaatggagccttttgtaaggccgttgcactcaggagctttcttgaagtgctctgaaatttctggcagaaataaagctatttaaaaaaaatagttacagcttatgttcctcttcttctgtgccctgagaaatagttaatcaactcttccttagcttggagttcacccagatgctccttaaggcttatctgtagctccactctcagtggtaaagccaccactggatcctagcagggtgcctaaactcagtaatgtggtaagagataaggcaacaaagcttcatgaacattgtattttcttccaacagggcacaaggaagatattaaactgagttccccccaaaatcccaaaaatctcctactgataatcaagatttgtggaayctataatgtgtctttattttggtttaaactaatgacactakattttcttctacctggcaaagaagaggtaggtatacattaaacaaaagaaaatgaaaaaaatggacctaaaatcatgtgggaaatagatcattgtcatcattgttcaaaaaagaaatgttgtggaatatttctgcaatttcctggccagctagtctttttcaccagacgcatatatctttttcaaatatcaaaagatagtaaagctatgcatgtaaaagtcataatartaatagtaattataagtattataagggtaagaataatttacatgattcttactgactcccaagcatttgctaagcactttaacttttcaaaatctcagaatgctatgctgtacatatgataagaaaggagaactttcttagtttagaaaactgagttgcagaaaggttaagcaacttgatcaaagcaaattagtaatgggaagagcagaaatttaaacctaactcatctttcatacctatgaagatgcaaataagtcaaccaattacatttgtgtgtaatatatttgccctcttgatgaataytgaaccagagttagagcatcttctatttgtttcatgaaaaagcattgacattatacacgatttgtgtgttctactttgaaatcacactttgttactctaaacattatttgaataagaagttgctaataatttgagcagttatttcaaaatatttatgtactattactacacagatggattactcttgagcttggcatccaatttttaaaattttctaactcatgtgtacatgactaattttccctctcagaattatgacaacattcattcatatgctcttctctcttgatttttgtactttggtagtttgggaaacatgataagatagmtcgtagtataactaatagcttagcacacatagcatatctatactcttttgacttttcctctaaatatcaccttatcatagtttgttctttatcccctatccacttgccattatttccatccaatgaaacttatttttcttctctctcatctttgaatttccttccctccctaacagcatgtgagttacttgaaagctctttgatcagaataaaaatcccaattatttgatacttccatttatttggattataaagacatacgggggtatattttgcaaaacagtcttgtcagccccggcagaagatatatcactatattatagctttgccatgtgtccatagagaaaggttatcttatgttaaacacatgttcatatgcaataacagagacatgaattctaaggatattgcagaaagcatagctgactactgattctagcaccttcaggatctttctcttcttagttgygaccactgtaatgcacttcatagagtaataaattgttcttgccctgggatcatgattcccatctcttcactacaacatgtctagatgtaagacatgtttacccttgtataatcaatgatctgagtctagatgtcaagtacttgcttgttctgtgcattaactgtcttctttttctggaactgcaggctctatcagatccttcccctaaaattcatacatcctgccttgttactatccgtgccccagcatgaccaatatcaaagtggttaagaaaaaggctccagctattttagtatcctaaattttatcttttcattctacaaagaagtttttcataaaaagttaaaataaatttaaaaactcattgatactattcagtaagatgttatagattccaagcaactatctcttttataggcaacataattaaaagtgaattacaaatgcagactttatgactctaattaaactctaggccacaatgcattaaaaacagattatacatattaagttagatataagaaaaaataaatatgccacatagtgaggcataagttaatatgcctcaaaataaatgaggagaaacaatttcagataatacatatttatataaaatgtttatcaacataacctaaaatattttcttgaatttcatcagagataaaatttttatacttaatttttgtaaacatatacatcatactttctctcacttacttcactacttcattccatcccaagaacatctgtgcaagtatttcccaagtgtgggagactggaagaggttctatattttggttgtaagaatatatattaatttttagaacattataattaaactcagaaatatttaattgtagggatattatttggtaagaatcaaataaaatgactaaaaattaacttgaggcaacatgaaatctcaacatcattgtaaaactaagagagcagatcttaaacaaaatgtagtgcagtcttcacacttgggagattcattaatcacttaagtgttttctctgaagtttttaaatgcttaaagattgggttacattatgaaaaggacctgtttaatattgtgtctgtaaagttcaattctacctagttctcactttctttcgtatcttctctagtgaagaatgaagaaatgagaattatgtgtttgaatctagcacctctgacatggaaaaacacatggtgaagcagaggaaagaaaactgaaagaaagtgaaaatatctttaagaatacyttggggaaacaaacagtatttcaaatgaaagattaagaacaaatccaaacaaatggattggaaggtattatgtaaaaaaatatgagatgctttagcacaggtactctaagaatttgagaagcttctcatgtttaagggagaaggtaacattcctgatagaaacatttaaaggcagtgcagaaaggaaattctcatcaggaggcctatagaacacacatgggcaacagcaagccccccttgccctgctcagccctggatccatacagaggaaaggagagaggtaaagatgaaagaaagaggttgaacagaagatagtaaatggttgaaaaatatttttaaaatagaaagagttatgcttctgagaagattctccatgtctgggtatcagacatggagatacatcatactgatcaacctgaagtaatgtacttactgaaatacccacttctagttcatcwagttcatgcaaggtttcacaaagccaccaatcgttttaatcatcttataaaagctttctaattgaaatattcttaagtatcacattttactagtggcaggtatcttttcaaaaaaaaaatacaagctaagcaacttgtcctctgttgtttcctaccactaagtttgcattagaagagactggcagtcaaacacacaagaagaaacacaagtattggcaatttaacagaaacaaatggtagtgtatcatggacatctaaggtttgtaggactaaatcataccctcttctagtaagtcctgaaaaaaatgtatttaaaacatatgttgaagaaaatagcttttagaggggcagataataggctttggacttagaaattttataaaaatccattgtgcattctttaggcttctagtcctattcagtttttgctatgagctatgatttgtttgtggaagcaaagtaaaggcagcctatttcttaccgcctccacttcggctgggtcataccagacrttgatgtagggatgctgtaaggcgtcgtccactgatattctttttgctgggtcaatcactagcatctttgacaacaagtccctggcttggctggctgaaacaataaatgagaaaaacaattagtaagattttgatttcagtaaggaaatttgtcagagaggaaatttaagaaaacaaagtatggaatagtatcttcctkccaaacatcaggtaaatcccttgatgtgatggaaaagaaaatgcattttacacctgtttctttgtgtctctaagcctaaggcttcattctgaggctctccaagggttgtaacactttgggtatataattattcacgcaaacttcttagtaaaatgtatcaacctggagagtttatgtaagcaaagtcatcttctttggtaacctgcatgaatataggataaacagaataaagagcacagagtgcaaatgcatgatgttcaacaaatgtgtggacggctgtttgaagttaatcaacacgtgtgtctctatattcttatttatacaacggaattatcagaattttagtatataaattgacttaagagtttgtatcatacaaatttttcttttctttttgtttttgtttatttatttatttatttatttttgagacagggtatccctctgttgccaggctggagtgtagtggaatgatcacagctcactgcagcctggaactcctgcgctcaaaggatcctcccatcccagcttcccgagtaactggaactacaggcatgcaccaccatgcctggctattttttctttctttctttttttttgtaaagataagatctccctacattgcccaagctggtctcgaactctgggctcaaagatcctcccacctcagcctcccaaaatgctgggattaaaggagtgagccactgctcccagccacaaatttcttatatacataaaaacaatcaaagaattgaagtgatagaaataatatcattcaactactgaattttattttaacattctgtaatcatcaggtatttttaatcaatggaatcatgacttgatgaaatccagtagttaaagactgaagccagtctaatgctacaccagacactaatgagaaactctatattatgtaaaggttatcataattaattttatggttgtgggcagtaacagttataaaattatatggtgatagctatttatttagtaagattgttaaaagacacattaattttaacctctaaaaatatgtaaattttttaaattattatactttaagttctgggatacatgtgcacaacatgcaggtttgttacataggtatacacatgccatagtggtttgctgcacccaccaacctgtcatctacattaggtatttctcctaaagctatccctcccctagtcttttacataaagttttaacagaaatgaatatctcaaatcaatattgttactcaactgatctgaaagttgaaccgtgaaaatattcagtttattctaactatatggtaaaacatcaaattaaagataacaaaatttaaatggatttttcaaaaaatcaacatagatgactctggatacatatcaatttttatttaatcaatttttcagattaaaacaacttggctaattctacaaatttgaaaattatataaaatacaaaawtcaggaaataatatctaaccccactagctagaggcaatgactgtgattattggcatattttttctagtgccgttcatgtatttttcacgtaatattaaccatactatagttaaaatgtagcaattaattttttacctgtaagtattttcttggtaattacatcaataaatatatcttttaattttctgaacaaatatgaaaaatcactagttaaacttgagaattttttatttctattaatcatttttctgggaaactcaatcctagaaactgattatcattactttcaaattaaaactctgtaccgcacaggaataacaaaaatacagaaatacttatacattaattcaatatttaatttttctcattgccaatggcctcctaatagcctaacagggctgtgtttatttattcattgctttaaagacctctttaatttgtaactgattttacatccaaattcatgtaccattctcataagattctctcatcaaatctatccatttttctgctcttagaaagggctggggttagccgggcgtggtcgtggctgacacctgcaatcccagcactttggaaggccgaggcaggcagaccacgaagtcaggaggtcgagacgatcctggctaccacggtgaaaccccatctctactaaaaatacaaaaattagctgggcgtggtggcgggcgcctgtagtcccagctactcgggaggttgaggcaggagaatggagtgaacctgggagacggagcttgcagtgagcctagatcggtatcccgggcgacagagcgagactctgtctcaaaaaaaaaaaaaaaaaaaaaaagaaagggctggggttacaatggattcttcatgaatagggtcatgaactacaccaatacaaaatcatcttgctaagaaacaatactatttttaggaaacaatatgggaaaatgtttcaatgctttatctttcattctttcatttgaaagcaaatgtgttatgctcttttccaaacacagtagaatacattcttctctttggttatttgtatattaagattatttataatttgccaattttatattaaaaattaaattcaataatcaaatatgcaaactagtttatcatttacaaacataattgcagagattcaaattgatttaaaaagtaaactcaagaaaattggaattacattatgaagtataatatatatctattttttgagacggagtcttgctcactctatctctaggctggaatgcagttgcccgatctcggctcactgcaacctcttcctcctaggttcaagcgactctcctgcctcagcctcctgagtagctgggactagaggtgtgtgccaccatgcccagctaatttttttatatttttaggagagacgcagtttcaccatgttggccaggatggtctgtctcgatttcctgacctcttgatcctcccgcctccgccttccaaagtgctgaggttacagacttgagccaccgcccccggccctgaatatccagacaattctaaaatccgtggctactcccctttgtaggaacgatctttgaagaaatatttctttaacttgaggctgtgccaattaaagaattgatcaatgttttaggtgatgggttatgctaattgctctgatttgaccattatacctctatacatgtttcaaaaataccaccctatatcccacaaaaatgtacgattatcatgtgtcaactaaaaataaaagggaacaaagagaaagagatagaggtctctatactgtgtgcttgtttggcccgtcaccctcatagttgtcctcaagtcattcctgaagggcatacctttgagtttattgtgctcggagtccgctgggaagagggaatctgggaagagtttggggaaggtgagtcccgcatacttgggccgattctccacatagtttcttactgtgggttgcaatttcttcatgaattctggacatggtgttcctagttgttcaattaccttattccactggtcaatatctgagaattgaacagttaagggaaaaaagaagagcagaccactagcctttcaacaattgggagactaactcttctcaaagtcctcaacagtcattaatgcaactgtagttttaataagcaacaaagaatgaaaatataaaatcagacttgcaggctatgagtcttcttgaaattttaaattcacttttgaaacttatatacttttggaaaactagcaattatttaacaaaataagatatcatgaaatagtctttggggtgtacagataaaaagtcattcagataacacaagatgaatctcatattctgcagataaacttctatataaatcatgtgattcagaagaaaaatatataatgacacatcatagtgacatttttatcctgaagttacctcaattatttatatttttaaaatgacaaatacacaaatattttagattatattcatttacattttcctaaactatctttaagatattttttcttctctaaaaatctggaatttttttctatttttatgcatatcaacataacttttatagtaaaacaactcattagttctttgtcagattcctaaaaatcatatttattaaacaaagaagccacctatttcatacctattgttttactgatgatatcactgaatattgttttcaatgaaatataagggtgaacagaggaatattcaatttaaaacaacagatttctatccaagtacatccaagtttagaaagtacattaagcatggggaataccacagaaaaaatattacctctctatgaaaattaatacccttttaaattggagctagctctttttgcagacatactcaatgattgagattctcttttttatctgtcattaatattcgatatatcagagccttgataatgataaacaccatctactctgaagaaycaactggaaacaactgatttaaacagatttcctcgccatgtgccagtgaataatagagatcttggaaattcccttaaatccaatactgcaagcagtattctctcctacattgcttattcttctacaactgttctttggtgttaagttagttaactcatttccactaaggtaaggtgtgacagttaagggactcttaccataatattacttagttgaagtttgtcaagtctttactcctagctattcaagaggtttggactgaaaaagattgtcagtcctgattaaagataaacttaactgtattcaacaaaaagaaatatataatacaaacagtagataggagattgaacaaagataaaatcaaactaatttgcaaatccttttcttcatctctataatctggctgaataaaacttaaattattacatattctgtcagttattggaataaaaaatatataaccatggactatgaagatatgaaatgaaggtgggaaaaacaataatattccttaataaagcagtagtaataattaaacaagaacatgctttgatagaagctcatctaattatcatgtgcatgagaaaatacagcagtaattcagaatcactagaaataatgaaactaaaacattatataaggttagagttacaaattactcttagacatgagcctgtattaatactatggatataggtaagctataagtacttagacatacttaaatagaatacattagtgtagttaaataaaacctaagtgcttgtcattataaattatgaagagacattttttaaacagttaggttagcatgccctaccaagctatcatttcatcattgatcaaacttcctcaaaattctaaccactcgatgtcaaacttaaaatagaggcaaagaagatgtcagattttctgtaaataagtcatttaacaaagttggcaaaataatcccaacacagtattatatcctaattacatttgctataattataaagatatacagtaaataattgattttaaagaagtactcccaaaacaaaaaaaactgatacttttatattaaagtttaaggagagtcagatattctggaatttgttaaataagaattgttaaaatgtttcttgtaataaatcataattagaatctagagacacactcagcgctctttcctaccttaggttgcttttaaatgaaacactgttgtgattcttgatgcaatggtttacaaaaagaagggtggcaaaaatctttatcattgtcaatgaaatagttaaatgttcatactgcaaatctgagttacagtgatctttaaaagtctgtgtctttattttaaccaatccatttcaagatttttcttcccaaaaacatatgtgtgtgtatatctacatatggtaagtacttgttttctagatgttcatagaatacaaacatgaacaactatgtccaatttagttgagcacatgatttttctttctttttttttttgtagcacttgaagggctttatttttttttctttttcttttttttattatactttaagttttagggtacatgtgcacattgtgcaggttagttacatatgtatacatgtgccatgctggtgcgctgcacccactaactcgtcatctagcattaggtatatctcccaatgctatccttcccccctccccccaccccaccacagtccccagagtgtcatattccccttcctgtgtccatgtgatctcattgttcaattcccacctatgagtgagaatatgcggtgtttggttttttgttcttgcaatagtttactgagaatgatgatttccagtttcatccatgtccctacaaaggacatgaactcatcattttttatggctgcatagtattccatggtgtatatgtgccacattttcttaatccagtctatcattgttggacatttgggttggttccaagtctttgctattgtgaataatgccataataaaaatacgtgtgcatgtgtctttatagcagcatgatttatagtcatttgggtatatacccagtaatgggatggctgggtcaaatggtatttctagttctagatccctgaggaatcgccacactgacttccacaatggttgaaccagtttacagtcccaccaacagtgtaaaagtgttgctatttctccacatcctctccagcacctgttgtttcctgactttttaatgattgccattctaactggtgtgagatggtatctcatagtggttttgatttgcatttctctgatggccagtgatgatgagcattttttcatgtgttttttggctgcataaatgtcttcttttgagaagtctctgttgatgaccttcgcccactttttaatggggttgtttgtttttttcttgtaaatttgtttgagttcattgtagattctggatattagccctttgtcagatgagtaggttgcgaacattttctcccattttgtaggttgcctgttcactctgatggtagtttcttttgctgtgcagaagctctttagtttaattagatcccatttgtcaattttgtcttttgttgccgttgcttttggtgttttggacatgaagtccttgcccatgcctatgtcctgaatggtaatgcctaggttttcttctagggtttttatggttttaggtctaacgtttaagtctttaatccatcttgaattgatttttgtataaggtgtaaggaagggatccagtttcagcttcctacatatggctagccagttttcccagcaccatttattaaatagggaatcctttccccattgttgtttttctcaggtttgtcaaagatcagatagttgtaggtatgcggcgttatttctgagggctctgttctgttccattgatctatatctctgtttaggtaccagtaccatgctgttttggttactgtagccttgtagtatagtttgaagtcaggtagtgtgattcctccagctttgttcttttggcttaggattgacttggcaatgcgggctcttttttggttccatatgaactttaaagtagttttttccaattctgtgaagaaaggcattggtagcttgatggggatggcattgaatctgtaaattaccttgggcagtatggccattttcacgatattgattcttcctacccatgagcatggaatgttcttccatttgtttgtatcctcttttatttccttgagcagtggtttgtagttctccttgaagaggtccttcacatcccttgtaagttggattcctaggtattttattctctttgaagcaattgtgaatgggagttcactcttgatttggctctctgtttgtctgttgttggtgtataagaatgcttgtgatttttgtacattgattttgtatcctgagactttgctgaagttgcttatcagcttaaggatattttgggctgagacgatggggttttctagatatacaatcatgtcgtctccaaacagggacaatttgacttcctctgttcctaattgaataccgtttatttccttctcctgtctaattgccctggccagaacttccaacactatgttgaataggagtggtgagagagggcatccctgtcttgtgccagttttcaaagggaatgcttccagtttttgcccattcagtatgatattggctgtgggtttgtcatagatagctcttattattttgaaatacgtcccatcaatacctaatttattgagagtttttagcatgaagggttgttgaattttgtcaaaggcttttcctgcatctattgagataatcatgtggtttttgtctttggctctgtttatatgctggattacatttattgatttgcgtatattgaaccagccttgcatcccagggatgaagcccacttgatcatggtggataagctttttgatgtgctgctggattcggtttgccagtattttattgaggatttttgcatcaatgttcatcgaggatattggtctaaaattctcttttttggttgtgtctctgcccggctttggtatcagaatgatgctggcctcataaaatgagttagggaggattccctctttttctattgattggaatagtttcagaaggaatggtaccagttcctccttgtacctctggtagaattcggctgtgaatccatctggtccttgactctttttggttggtaaactattgattattgccacaatttcagctcctgttattggtctattcagagattcaacttcttcctggtttagtcttgggagagtgtatgtgtcgaggaatttatccatttcttctagattttctagtttatttgcgtagaggtgtttgtagtattctctgatggtagtttgtatttctgtgggatcggtggtgatatcccctttatcattttttattgtgtctatttggttcttctctctttttttctttattagtcttgctagcggtctatcaattttgttgatcctttcaaaaaaccagctcctggattcactgatcttttgaagggttttttgtgtctctatttccttcagttctgctctgatttttgttatttcttgccttctgctagcttttgaatgtgtttgctcttgcttttctagttcttttaattgtgatgttagggtgtcaattttggatctttcctgctttctcttgtgggcatttagtgctataaatttccctctacacactgctttgaatgcatcccagagattctggtatgttgtgtctttgttctcgttggtttcaaagaacatctttatttctgccttcatttcgttatgtacccagtagtcattcaggagcaggttgttcagtttccatgtagttgagtggttttgagtgggattcttaatcctgagttctagtttgattgcactgtggtctgagagatagtttgttataatttctgttcttttacatttgctgaggagagctttacttccaactatgtggtcaattttggaataggtgtggtgtggtgctgaaaaaaatgtatattctgttgatttggggtggtgagttctgtagatgtctattaggtccgcttggtgcagagctgagttcaattcctgggtatccttgttgactttctgtctcgttgatctgtctaatgttgacagtggggtgttaaagtctcccattattaatgtgtgggagtctaagtctctttgtaggtcactcaggacttgctttatgaatctgggtgctcctgtattgggtgcatatatatttaggatagttagctcttcttgttgaattgatccctttaccattatgtaatgaccttctttgtctcttttgatctttgttggcttaaagtctgttttatcagagactaggattgcaacccctgccttttttgttttccattggcttggtagatcttcctccatccttttattttgagcctatgtgtgtctctgcacgtgagatgggtttcctgaatacagcacactgatggatcttgactctttatccaatttgccagtctgtgtcttttaattggagcatttagtccatttacatttaaagttaatattgttatgtgtgaatttgattctgtcatcatgatgttagctggtgattttgctcgttagttgatgcagtttcttcctagtctcgatggtctttacattttggcatgattttgcagtggctggtactggttgttcctttccatgtttagcgcttccttcaggagctcttttagggcaggcctggtggtgacaaaatctgtcagcatttgcttgtctgtaaagtattttatttctccttcacttatgaagctcagtttggcctgatatgaaattctgggttgaaaattcttttctttaagaatgttgaatattagcccccactctcttctggcttgtagggtttctgccgagagatccgctgttagtctgatgggcttccctttgagggtaacccgacctttctctctggctgcccttaacattttttccttcatttcaactttggtgaatctgacaattatgtgtcttggagttgctcttctcgaggagtatctttgtggcgttctctgtatttcctgaatctgaacgttggcctgccttgctagattggggaagttctcctggataatatcctgcagagtgttttccaacttggttccattctcctcatcactttcaggtacaccaatcagacgtagatttggtcttttcatatagtcccatatttcttggaggctttgctcatttctttttattcttttttctctaaacttcccttctcgcttcatttcattcatttcatcttccatcactgataccctttcttccagttgatcgcatcggctcctgaggcttctgcattcctcacatagttctcgagccttggttttcagctccatcagctcctttaagcacttctctgtattggttattctagttatacattcttctaaatttttttcaaagtttttaacttctttgcctttggtttgaatgtcctcccgtagctcagagtaatttgatcatctgaagccttcttctctcagctcgtcaaagtcattctccatccagctttgttctgttgctggtgaggaactgtgttcctttggaggaggagagaygctctgcgttttagagtttccagtttttctgttctgttttttccccatctttgtggttttatctacttttggtctttgatgatagtgatgtacagatgggttttcagtgtggatgtcctttctgtttgttagttttccttctaacagacaggaccctcagctgcaggtctgttggaataccctgcygtgtgaggtggcagtgtgcccctrctgggggatgcctcccagttagacttctcgggggtcaggggtcagggacccacttgaggaggcagtctgcccattctcagatctccagctgcgtgctgggagaaccactgctctcttcaaagctgtcagacaggggcatttaagtctgcagaggttactgctgtctttttgtttgtctgtgccctgcccccagaggtggggcctacagtggcaggcaggcctccttgagctgtggtgggctccacccagttcgagyttccaggctgctttgtttacctaagcaagcctgggcaatggcgggcgcccctcccccagccctcctggggccttgcagtttgatctcagactgctgtgctagcaatcagcgagattccgtgggcgtaggaccctccgagccaggtgtgggatatagtctcgtggtgcgctgctttttaagccggtctgaaaagtgcaatattcgggtgggagtgacccgattttccaggtgcgtctgtcacccgtttctttgactcggaaagggaactccctgaccccttgtgcttcccaggtgaggcaatgcctcgccctgcttcggctcgcgcacggtgcgcgcacccactggcctgcgcccactgtctggcactccctagtgagatgcacccagtacctcagatggaaatgcagaaatcacccatcttctgcgtcgctcacgctgggagctgtagaccggagctgttcctattcagccatcttggctcctccccatgatttttctttataataacaattaacctaacataaacgaagactggaactcctatctcctgtttccatgttcagtgcttgtttcaagtattccagtaagaaaaagtaaatttggaattgatatggtaaaaaattgttttaatttggccataaagttaatggtgtgttttgtcacaagcaactcccttaaagaatgtttctgaagccccttccttagtctatcaggccaacatattcctgtaaaacaattaattttatcaatattttatatagaaaataaggtgatttttaaatgggaaaacagatttccacaaggattacatttttaaagtacataaaatattaactagattttatgattatgtattaattgttaacatggtaaatatgtttttaaagaatgaccaaaaccattttttgtagaagaatttatttgctttagaatacccataaattaccatttttataccacatagagtaaggatttacagatcttagccctgtgaggttatcagaaaagcaataagtatattttttatatttttgatgtgctgtttcagaaattatcacccttaacataaattatgaaatgcattgaatacaaatggaaaaatggcatttaataagaattatttgacagtaaatcacctgatataattctaaattgactacataaaagtagagttatatkgtaagaagttcaattttataagtagggcatgatgtccagataatgtacaaatgtgatattactaaggtattcaataaatagtattataatrgaataaaacaaagtaaatatgaatagtaaaaatgagtatctgaaatcctaagattgaaaatttttccaattaatattatcaattagctaataacttatatttcaagcacttctcttactttagcttcctttgttagggaactttctaaaacgataatgccttgaacataatatatgaaaagggcaatttttgggcctctcatttgcacaggccccttataagactaatccttttctgcgtattgtgggtcaaaattatgaacagaatttatgccatccatatttaagccttcagaacttactaagtggaatcataaggaactatttaatggcctcatccaattgtttcctttgaatgactatatcttctgtttatgttttcttctatcattgattgctttttgttactatgaatgtgatttccagagccaacacctcatagtttctgacttgctttgtactctgctctaggccttatatccaatactttgtgcaaaaattttctgacctctctttgcaatttaaagaacatcagtgtttatctctaaattattagctatgttcttaaagacaatattgcctaatagcaatgtcgttatagaatagttccaggagaggcttttatcatgcacgccaaacagctgtttaggcacaatgttgagtaggcttgtgtggctttatattagcttcgtaggaaagaattttgtgatcagttagtaatgtctgcaacagatgcacaataaggaaattgaagcacatatgccatgtgttaagcatcattatattaaactgtggttcccaaacttgaatattcgtaacgcagggaacttacaaaaatacatatccctcctccctactcattgatctacaagattctgagtccacaggtctgggctgatatcataaaaaacaccagtggtaattgtaatcaaggatgggattatattttgagaaatactaatgtagaatatactaaaaagtctcttgtgagttactaagtccaaatgtaagagtaaaatactaacatgtttcagttttatgacacaaattagaataggatcaaattcaccaaaagattattccacacctgtttgttaacttgggggtcattcacctgagaatactcagagaaagaaaagtgctcatctttatttctttgccccatgtaattttcctgcaaaggccatgggaaattacagtaagtggcacatgcagtctcctagtagagggagaagaattctgcccctcatcatctgtgggagaactgaaattgtatgctgctattacctggggagtagtacccatggaaagtactaattatagttctttgtgattaaatttgttgttaaaagaatttttttctaaaaacaagtataaggaaatacatatgtatatatatatatmcacacacacacacacacacacacaaacatatgatagagttctgaatctagattttcatggttatgtttctaattgttttgtttctttaaaaatgtttttaggggccagggacagaggctcatgcatgtaatcctagcactttgggaggccaaggcgggaggatcacctgagcctgggagttcaagaccagcctgaccaacatagagaaaccccgtctctactaaaaatacaaaagcagctgggtgtggtggcacatgcctgtaatcccagctactcaggaggctgaggcaagagaatcacctgaacccatgaggcacaggttgcagtaagcagaggtagcaccattgcactccagcctgggcaacgagagtgaaactttgtcccccacccccccaaaaaaagaaaaagaaaaatgtttttagggtattttttatttgaaaatgttcttttcctctcaaaagtccttgtcagattctggtaacaggaaatatgaataagtgacttaataaacaattgtaactaacatctgttttaattataaatgagcataggaagaggaattataagccaaaacacatccaaaatatgaagctggcaaattaagtaaaaggctatttgtacactgacactagcacattgctagtgttataataagggacatggaatatccaaaggctgtttgaagcatgctataaatctattcactattataatctatctttacttacaaataaaaaaatggagagacatgtaacatatatattaatatgtgtagcaatggcagaattttcattaagctgttgaaggttaatctttggggtgttccatttgcacaggcctcttacaagactaattttttactggtaattttattttttgtaaatagcacccaccttcagttgtatgatattctgacctcaaaaatgctggatttgattctctcagcctgtgatagtattttgaaaatgagaagaggccttggagatcatgtaatttggcatctctattttaaagctgaaaaatattaaagtccttttcaatttggtaaataattataaacaaagaagctgatacaaacagcctacacgaacagaaatatagaatctacttaagagaaatttaaggacactgtactctgttctgtaagaccaaatcgggaaagatactttcacttctgtatataacactacatacaatggaagttaagaagaggcaatcaagcttatatgaggtaagaaaacctgccacttaaagcatagctgaaaaaacttttgatatttaaatttaaaaaggaagatagaagtaatccctgcccccatgctagcattttggtcttttggtctctcttactctgcagctattatcaccttcttctagtattctgcaccttttaatgtaagtatcatggtaataagaatttttatctgttttgtttactaatatatctctggagacaaaaagtacccagtacatagtaggtactcaaaaatatttatgttataaatgaatgtctattttatgtccagagttttgtacacacataatataaagaatgaaaaaaataaaatattcgaagaaacgacagctgagaaattccagtaattgaataaaggttggaatctaggaaacaatgactctcaaggaagataaataaaaagaaatccatgcctagtctcgtagtagagaaacagcagataatcaaagaccaaaaaaaaaaatcccaaatgaaggaaaagagcagattatctcctaaaatgactattacactgacaactctttatttaccagcaatactgtaaacaaaaagcaagtagaataatatctttaagatgccaaaaataaaataaatttcaatgtaaaattctatatctaactaaactatatttcaggtaagggaacctcaattaaaaataagagttttattatcaaggactccactaaagatacttccaaaatacgtacttcgggagaaaaaaataataatctcaaaataaaaggtcaaaatgtaagaagtagtggtaagccaaacaaatggcaatcataagggtgaatctaaacaaactayctttatgcaaaaaaatcataatattgtcaatttatgagcctaaaaagaaaactaaaatactgaacatcgatagcatatttaagtcaggacaacaactatctaaatgaacatgtgccaagatccttttatgttgagaagaaagattaaaagaatcatcttaattaaaatagcattktatacaaaattgagctttaaatacgactccaaaataaataccaatagggatctttttttaaagttagtaagccaattctaaaatcttaatagaagagcaatggtgcattaagagtcaagataattctgaagatgacaaaaatgaaaggtatttaccttacctaatataagtgcagagcatacatttatattcattaagaaagggtgttcatggtgcagagatagacaaacaaaccagtggaacagaatatacagcccaggacttaacatccccctgcaaatatgtggaaacttattagagagacagaattatagatctgtgaagaaagagtaagttagtcaataaatgaaactggaataaagtaggtccttctttcacacatacacaaaaaaatcaattccatgtggactaatggtttaaatgtaagagactaaactttaaaatatttccagtaaagttatagcacaatataatgttataaaaggattcttaagacataaaacatataaattataggaaaagacagattgccaacttctaaaactattataaaataaaatgggaaaataatccaaatacaagaagatatttgcaacacataaaactcacaaaaattaggtgccaaattatataaggaatgtctactaatcaacagaaaaaaaaagcacaatagaaaaaaatgtgttcattctttgtttataaaaaagatattttaccaagggaaaataatagtggccaatgaacacaggaaaagatccttagcctcccttgtagacaaggaaatgtaaattaaacctccagtgaaatagtattttatatccaagggattggtaacaaatttaaaaataaatatgacaatggcaaaagttgatgaggatgtggagcagacagctacatactactctagaaatcaatttgatgttacacagcaaagtttaaaatgtgtatgcctatgacccctggcattgttattaagaaaaccttgcacatgtgctcttataagcatatatttatagtaccatggtttataaaagaaaaaaaaaaacagtaaaatccgtatatattccaaagtctacttataggataatgggttagttatagatactcatagactgaaatactattcagcaatgaaaatgagttaactatgtccagtccatgaacaggaataaatctaaaaaatataatgttaattttttaaaaagtgagtcacaagataacgatgacagtatggtatgtaaaataaataaaactaaaccatagattgcttaaggataaatatgcaggtagtaaaaacataaggaaagtcacagagatagtaaaaagaaatatttagaactgtggctaactctgtgtggaaaaggaaggttgtggtaggtggagcacataaaaatatttgaaagtattggtaatggtctattttttaacctgagtggtagcatatgtgtgtctatttattaatcttcttcaaaagctatgcatttcatattaactcacttgtttaatataaaatattttataatttcttaagtaaaaatgtcagctatgataaaattcattacatctccccctccttccaaattatcccaacagttaaatgttgattcatttgtagagcattaaaaacacatttgattgaataaaattcaattaacatatatgtaggagttcagtcagggtggcgggaaaagttgtaagaaaaagttatagggaaagactcaaaccttcttggaaggccaggaggttttgcaaaagcttcgaaggagaaatggctgaaggcagccaaattctgttatccagaacctgaaggcaaagggtagataacaagggaatgtaaaggaacttatctagataagttggtttacttatgtctccagaaaccaacctttgatcattcctgcacaggactgctctctactcagggggttggcaaagttaattacccacaaattgtgtttgctccaatcctttgtcattaaatctgtactaaataaatgcaagtgtcacaggcttatgggggctgcactctgggttgcactgcactttcattggcagtgctaaggggtgcagtccatctagccatgctgtcaggcaaaatacctgtgtcagagtacttttgtcatccatcactcagccagagtctgcgggasagacttggcacatatacttaaaatacctactaaaaacaatgtgttaaacctttttaggcccaaaagataaaagatataatatctttttaacattttaagttttgttcttgagttagttcatatattaagaagacgtgtctggggaggcagagcaggatggcaaaatagaaggctccaccaatcatcccccctgaaaggaccccaatttaacaactacctacaccaaaaagcaccttcataaggaccaaaaatcagatgaccactcacagtatctggttttaattccacattgctgaaagaagcactgaagaggcaggagaaactgtctttaaytgccagcgccaccccttccccatcctccagcaacaattcygtgtgctggggasagggagagcatagcatttgtgaggaaatgaactcagtgctgcccttgttatagcagaaagtaaaaacaaaccaaattcagctgacacctgcccacggaaggagcatttaaaccagccctkgccagaggggaatcgccaatcccagcagtcagaacttgagatcccacaagccttaccactgcaggctaaactgctctgaggctgagaataaacttgaaaggcaggtcactgcctttctaggtcactaggactgcaactcctaggaaagtcctagtcctgaactgggcccagagtcaatggacttttggggcatgtgacctactgagataccagccagggcagctaagggggtgctggcatcacccctcctctacccccatggtgcatagctcatggctccaaaagagacctcttccatccacatgaggagaggaaaggaaagagtgaaaagaactttgtcttgcattttggatatcagctcaaccacagtaggctagggcaccagtcagagttgtgaggcctcccttccaggccccagttcccagatgatatttctagacacaccctgggacagaagggaacccatggccttaaacagaaagacccagtcatatcaggattcatcacctgctaactgaagagtccttggtccctgaataaccagcagcatacccaggtactatgctgagggccttgggtgaaactctgagacttgctggcctcaggtgagactcagcacattcccagttgtggtgactatggggcgagacaaaaaagcagagggaaagtaaaggggactttgtcttgtaccttaggtaccagcttggccacagtgtgggtagagtgccaagcaggctcttgagttaccaatttcaagatttggctcttggaccgcctttctgggccactcaacttggaaaagaagaagtcaagtaactcttgtttgcagatgatatgatgttatgcttgcaaaagcaaagactccatcaaaaaactattcaaattgataaattcagtaaagttgcaggattcaaaatcaacatacaaaaatcagtagcatttctatatgacagcagtgaacaatctgaaraagaaatcaaaagtgtaatcccatttataatatctacaaataaaataaaatacctaagaagtaacttaagcaaacaagtgaaagatctctacaataaaaactataaaacactgataaaaaaattgaataggaaacaaaaaattgaaagatattacatattcattgattggaaaaaccaatattgttaaaatgtccatactacccaaagcaatctacagattcaatgcagtccctatcaaaatacgaatggtgttcttcacagatagaaaacacaatcctgaagtttatatggaaccacaaaagacccagaacagccaaagctatcctaagcaaaaagaacaaaatgggaggaaatcacattacctgacttcaaattatactacagaactatagtaaccaaacagcatgatactggcataaaaacagacacatagatcaatagaacagaagatagaacccagaaacaaatccacacacctacagtgaactcattttcaacaaaggtgccaagaacatacactggggaaaagacagtcccttcaataaatggtgtggaaaaactggatatccacatgcagaagaataaaactagatccctatctctcaccatatacaaagatccaatcaagatgaattaaagacataaatataaggcttcaaattatcaatcttctttaagaaatcactggggaaattttctaggacagtggtcagggcaaaaatttmttgagtaatacctcccaaacacaagcaaccaaagtaaaaatggacaaatgggatcatatcaagctaaaaacttmtgcacagcaaagaaaacaatcaacaaagtgaagagacaacctacagaatgagagaaaatatttgcaaactactcatctgacaaggaattaataaccagaatatataaggagctcaaacaactctataggaaaaaaatctaataatccgattaaaaatgggcaaaagatttaaatagacatctctcagaagaagatatgcaaataacaaacaggcatatgaaaaagtgctcaacatcactgatcatcagagaaatgcaaatcaaaactacaatgagatatcatctcaccccggttaaaagagcttatatccaaaaacaggcaacaacaaatgctggtgaagatgtggagaaaagggaacacttgcacattcctggaagtgtaaattatcataataactaggagaacagttctgtggttcctcaaaaaactaaaaatagagctaccatatgatctggcaatcccactgctgggtatataaacaaaagaaaggaaatcagtatatcgaagagatatctgcactgccgtgtttgttgcagcactgttgacgatagccaagatttggaagcaacctaagcatccatcaacagatgaatggataaagaaaatgtggtacatttaaaaatgttaagtgaaataagcgaggcacagaaagacaaacactgcatgttctcatttacaagtgggagatgaacaatgagaacacatggacacagggaggggaataatacacactggggcctgtcaggggagctgggtgggtggagggagagcattaggaaaactagctaatgcatgctgggcttaatacctaggtaatgggtggataggtgcagcaaaccaccacggtacacgtttacctgtgtaacaaacctgcatatcctgcacatgtaccctggaacttaaaattaaaattaatttaaaaaatcaaaacaattgaactcatcgagatagacagtagaaggatggttaccagaggctggaaaggatagcagaggaggtggtgggtggggatggttaacggctaaaataaaaagttagaaagaattaataagatctagtatttggtagcacaacagggtgactacagtaaataataatttaattgtacattttaaaataactaaaagagtataattgaattgtttgtaacacaaaggataaatacttgagggagtggatattccatcttccatgatgtgattattatgcattgcatgcctgtatcaaaacatctcatgtgccccataaatatacacagctattatgtacccagaaaaattaaaaattaaaaaaagtcatgcatagctcatattccaagagcttttagaaatcattgttttgagaatgcttttatataaatgaggatatattgactaaaaataacataactccttataatgtactatataggtatacattataatatggcatatctccagctctattttaatgtctctatttaatagatttaggtataattttattgtattttcagtaactcatttctaataacagaattttttaaatcagtaatgtcttatacattaagaggttaattatttgatattcagtgttcaaaatttgtttgctttaagactgatttaaaactttaaccaacatgtttgaaatcattgagaccacagcccacgatcagaagacatactttagaaaatgattcctatttgtcctccaagaaatttacaaatatgtccccatacaagagctccataaaggacttcatatccaaatatcaagggctttgaacaggatactgccacattacccgagccctaaagcattgtttacaaggaattttgacacccaagttaaaaaatgacacacgagcaacttttcccaagaaactattctaaaaaatgttaaattgtatttggtaattcagttgtagaaatctgttttaatttttcttaatagaaacataacaaagatcataaaaacactcattttaatttacaggtggcaaatattcattttagtcaccaattattcaaccacaatgaacttctggaaaagcaaagagtactaagttaacaaattgagtctattttcatcaaattatctaaaatcagccaaaacttaaagacaatttcatattcatgcccaaaggccaaacacaagtttataattcattgggaataaaagaagtcctgttttttaaaatccctcctgatttttaagaaatctgaaggaattcagtttttataaagccagctagtttcaaatagcattaatgttgatgtggtaaattatagaygtcatttaataaaatgtatatttagaagacaaaacagcactatagacagaaagactttttaaaatgtgtgtcaaacagaagattagaaaaaagtttttagtaagaataatcagaagtaaaaacagtgtaactatttttaactgaagtattttaagtcctttcttccaacaaaaattgagtgcctaatacagccatttccagaactttttcttttaatatgtagagagaatatatgtatgaagccatatatatatattcatatatgtaaaaccagatacaaatattaatcctcaagtgtgtatattacattatagacatttgataaaaaattataatgtagatattagaaacaacgcaaatggctaatcataatatggtatggatgcactatattagtaattagatttagtctaattacacattaaaaccccattattataggctcaattttatttttgaagtgttttattaaagcagaggttttacctttagtaggatgaagacataaaactttcataagtgactaagtgtagagggatatttaacaggacccatgacacatccatatactaatcactaatcgcacactattcatatctatttaatactgcagaacctctggaatctttttgtttgtttgtctgtttgtttagagacagggtctcactctgttgcctacctaggctgcagtgcagcagcacgatcactgctcactgcagctttgacactgggggctcaagctatcctcccagctagtttctttgttgctgagactacagggactttcaycgtgcccggctaaattttttatttttgttttttgtagagacaagggtcttgctctcttgcctaggctggtctcaaactcctgggctcaagtgatccttccacttcagccttccaaagtgttgggggttacaggcatgagctaccacatctggtcttgatctttacttgttaattatttgctgcttaagagagaatcacttttacttattcaagtgatttcaatgtatttcttcagatattttatataaccattattaatgaggttttaattattgcacttgttaataatatgcagaaaataagagaaggaattagagctattattcccataaatggagtgaataagaaaaataattttagaaaaacttgatcaattgtaaaatgaaattcacatccatgctctctgaatatatgttaaaataaaccaattagtatttgtggaggaacatgaatctgataaaaatttccatgccaaatgaatatttctcattatatcaaagtataaatcttcagtcttagaactgaaagactttatttattatctagctatgaatatatcttcattttgaaacatctacaacaaaaacaagaaagaagagtactcaatgttatcagtttggtagaactgaattaaggcagaccttttgatatcaggttgactctttcatatttgttactgtattatccacataaggtcttactaggagacaaagttactctgccataatgccaacttgtaaatatttgacattgagtctcatagaaactctctaaggacagtgaacaaataccataagcagtactgcatttgagacaaaagggaattaattgagagtgacacccatagataccactggctgctaagaaggatacgatcagtgccaggaaacagcactgcaccttttatcatttctcccatgatgcaccctactgaccacatgtcaactgaaaacaaaaatgaaatgaagataaacaagaacacaggaatagaacaacaaataaatgaaaacactgggctactcatgccatagagcaatagtctgacttttcactgactggatgagaggccagtggcatgatcattagcattttaaatggtggaaaggggagaacataggctctcaaggcccttttctgtcatataacagaaataacaacactacccaatgctacctaatgtagaataatattactttgcaattataactcaatgattaatttaggttttgatttaaaaggtctaatttgcattcatttactagaatcctactgatttttatcataaattattctagatagtgttaatatgcaaatcagtttcttttttactcttgtatacatatttgaaaaaagaaaaaagaaaagctgagctgccagcaacctcaaaagagtttcttttataaaacacatttacccttatttataaatataaatacagttccagaagtgaaaagccagttcaagaatgaatgtttcagaatatgttgtcttagtgtcattgactctcatcaaaggagcatgtttctcagcaggaagccttgtcttattcttataaacacagttgccttataatgataagaaaagctggctttcaaaatgggatcgctcaatgtgaaataaacaacatgactaaagagctgatacttcttctgaaactgtgaatcaaaagaaacctggaattcaaggtggaattataatggtctctctgttattgccaagtatcatccagaacttaaaaccaggaagccagggcagagcgcacagagggaggggcaaaatggggaagggtgaagcaagaaagtgaaatctctctcttgarctacacttggttactcacttgttgtacttaaaaatcagaaagagagggcattcttgtggggggaaaaataaacagaagaattagggatgctgggggggagcaaatagggaaaggcattaagatagcagcacaatataattttgctccacttacttttcaaattacatcttgtaatttggcagtgaccttaaagagatcctcatgagattcattccaatgtgaaaatctcactcgggttaaactcaaagtttccattgtttgatttaacacctaaacaaagtgatcactgcaaagaaacggttacggctttgaaggtgataagcatacccaaagaagcaaatttgttttgcttccagtttaggaaagcaactgacatgcagaaatatcagggaaagatagagcaaacagttgtgcatccctttattattaacgtgtttgtaatttcaagtaatatctgtctcacaacaggatggtattgagaaatctttgattaaagaaaaaaacggaaaacatatttatttttaaattccaagtattcctatcatactgtccaaagagaccagtttgactaaattgctatttatggattatctatattttatagatattgtggaagagatatacaaaaaacattgagaccaaaaatctcaatatgcagtgttttctcttgcctgtctccattcaaatgtttagaaaaaaaatggtttctgccattaacctgtctgggacttaggaaacatctatttctatttctcatttagtataaaattgttttttacaatatctctggcaatatattcatctttttctgctagagaaccaattctattactttccaactatgtgaccttggccaggttacttctctctaaacctcaattttatcccctaaaatattgatgataagctgtatttattatgtagagttttataaaagacttgaaaaagttatgtctgataaagatccttgcacaactgcctggtacatagcaagtccccaataaatattatttacatatcaaatcatcatgtattaaataatatattaaaattatatttgggaattaaatatctttggaaaaggtttatttattttaaatttacataattatattatatatttacatctataataaagaaatctttccagtggaggaatctcaccactcactaggcaatctattttattgttgaaaccacttagaaaggcatcctacatattgactcacattgactctatggaacttctcttcactatgtaaacaggaactactgtgtttcctcatccaaataagaaccttaaagtatgtaactataacctgtaatccctaaccattcctctcctaaaactggccaattttatctttcaggctaaaatcccttgatttttttttttttttttttttttttttttgctgttcttcacatgcctttaaacaacagcaacaacaataacaacagatggcctaaattaaattctggtctctatgttgctttagcaccagttggttctatacagttgttaatttttttttttctttgagccagtgtctagctctgtcactagactggattgcagtggcacgatcttggctcactgcaacctctgccccctgggttcaagtgattctcttgcatcagcctccctagtagctgagattacaggcacacgccaccacgcccagctaatttttgtatttttagtagaggtggggtttcaccatgttggccaggatggtcttgatctcctgaccttgtgatctgcccacctcggcctcccaaagtgctgggattacaggcatgagacaccatgcctggcccagttgttgatttaataactggtattaataactggtatatctcacarttctctttttggtgtgggggatctgggagatactccaatgtaaaagaagaatatttatttaaaatatatatcttcatgggcagaactcaaaatagatttaatagatcacaaatcttttgcataaaaataatgcagagatgtaggctctagatctgaaattctgatgtacatattgaatttcattttctttattttaatatatctttatgggtgataatatcctggaaatctttctaattcccattttaactttactcaccattcactattcctagagaatatttatatctatgctaccaaaatgctaagccttgtgcctagaaatgataagctctgttatcttgaattacaaaaattgaatatatgcacataaatttatatagatttttatgtattcaagacaggattatggctcaagataaactcattgtaccaaacttcatgaatttgccatctccactaacagaaaatgtataataaaagaatttgataccaactcttattgaacaggaaggtagtagtagtaagccttccctctactaatatctctatattaggatacataaacatactaatacaatatgtatctgaatatattagtgatatatatatatatatattgctaatgaagttaagaatagattattttatgaaattgtcaggtattacaatgaatagggactgtgcatagaccttagaagtaattagcaaattcaatcactgttggaaactgcattttatgctttctgaaacaatctgatacagcatctgggtctctgtaagagttctgtacactaatgctgccaaggtagaattctgttggcttttaaaattctgattcatcacattctttcatcatcattctatcattcccataggcagaaggcagattcacttgcaactgtaacaatcagatgctgagtcactttccttagaagaaatgttgagtaaattttggtgttaccaaaatatgattaattttcagagtgagaacctctgaaaatctcatgtcacattatttgtcagaaattagcttataataaattatctttcttctacttctaaccaagagatagaaattatacaatgtaagccctggaagttaaatctaaataaataaagaactatattgctacttccacactccatctaatagcttaaattatgatccacaattaaataattttgagactatgtgagcttctatcctggaaaatgtttcctctctgggggattacgtaactcttttatcacaatttctgagacttctccttaacacacctaagtatattttcatttagtgtagaatttagacaaattttctctcaatgaatgactcaacacacaatagcaagaagatttaatatagttttctaaaatcagaacatttctttgaaaattatttgttataatttttataaaaattataagttataaagttagcagttataaaattagaacatttcttttaaaattagttaactaagtcataaatttagttgtttaacaaaaggaccttgtactaaacttcagttcaaagacagaattctaaaagacyactgatatacataaataaactaagaatgtacatattttgcacatgtgaatctaagtaagaaaaataagcaacaattsgcagaacttaatgctaaatattgtaatgccaggaaatcagaaaaagactttctccttgaatctacctattaaacttgcttttatttctttacaacctcagaatctccagctcccattctggtgaaccctgcctcacattttcataaaataataacaaaagagaagagttagcaggcacactagtggtaaaaatgtattcttttaaacaaattcaaataataattttatttttaaatatttatttataattacatgcaatttgcttatagatttgaaagaatgcctactaaattgtttcatcctaactttatttaaaaccataaattttatattgtttgaaataactctgtattgtcttaattctaagaaaaagagttagactatatagtaagttgttagttgcaaaagtttattaggaattaagcactattatttcaaagaggtaagaagaattttaaaatatctctgtgctagattgatataacaatctgtaaccacaaatttttgttcattttactttgatccttcctaatgttcatattcaaactttaaaaagatayagcattcagttaatttgagggtgtttttcttatttcttcaaatatacttttggaaaaccatttacctattccttaataacttggctccttggcaaggttatatgtatatctctttcattctaactgcaatttcctgttcttcagagggaaaggcaagaggagctattttagcagtccagctgttagctttggatataatatacttgaggtccagaattttcaaatgcatgcagtatgcctgtctttaactttatatccagagaatattggccaagaacttagataaagggacatcacagggtttgctcaaagaaggtgctatcatttgaagtagaatggaaaaaataaggttgaagaatgtatctaaaagaagcaggtttgaggaaaggactcatgaaaattatactgggactataggagtctttgataatcaacaagatggcatgtcctggttggggtttggggtggtggaggcagtgaatgactggatagttcttagaaaaaacttctaaggaagcattgtaaagctgctttcctgtaaattttattgaaaggaacaaaatctgagtgaagctaaagtcactgatttcttttatctgttctttggactacataaaaaaaaataatggacttggcctatttactactctctaacttgaaagtcagcatgcgtttaagaatgtttaaagaatgtttagtaacatatttaaatatgaatgtgcattataatgttcaaataaactacattatgtaaaaatatatgctatgaaatgttttaatcataaaactatagtgaaaattaagtgtatgatagtgtatgcataattaagaaacactttacacaagaaaaataagtattaagaagtgatcctctggatattaaagtaattagcaaattaataagtggaaaagcaaatatgtattgtttattttgttcaattttattttgccaacattctaattcagtaaccaagacaattccctgtgatatcatctagatcatatcaaccaccaagaaacccccacgatgtttctcaaaatgcaaagatagtttgaatgtgggaaagtagttaaacttcagtcatcaatgacaatttcataagattctctgatttgtcaagacattttactatttttgcttagggttcaagtttaaaagttctgtgaagagagaagaaaaatgttgattattatgatagtattatcacatcatttttcagcctcaaagtaatttaatataaattactctgaataattctaggtgaaagacatgagaacctctgattgttttttgaaatttctgcagagtcctggaagtagtcaaggtatcaattagcatatacttagctttgatatttcttccaataaatgttagactaatttcaatatgcttaaaattgtgtaattcttctgccgataaataacttgaatcagccctcagccttgtgtctgatagtcatagtttgagaggttatctgactgctcagttgttggtaggaagtcctgtgcataaaatgataataatttcatttaaagattaataaaacaattctactcaaaattaacaaagcacattgtttaactgagatttctataggtttattttttaaatgtaactataactttaaacattaagttataattttaattataggtaaaaggggctaagaaatccaaatggaaacattttcaaaaaggaaacattttttctaacctatttcattggaaaatatctactcattttttggtaaaatttaacttaagtaaaaggctttccattgtaggtgtctttatgcaattttttttaacttttaggtccacatgcagggtcattatcacatatggcactaggctatcaaagactgctgtactatgtaatcatcacttgagataaagaaatatatatatttatataataaatgcaaacctttattataatctacattatctgtattagagattatttaaatgtctaggttcatacatatcaaggatataaatgttatgtattaattttcacacaatttaatttcagctccaaaaatttttctaaaacaaactaggattaaaaaaggtgggaggggcacctccaagagaaaaatttttaaaagaaaataaaattatcaatatggtgctttgtttttttgtttgtttttctgaagggttagattgagtttaaaactttttgctttttttctcttttattggcttttaaatttaatattgtcaaaatagaagaaaagcaatccgcataaatgcctgaagagctaaataagatctcagagaacaacctcgctacatgaaatcaagtgacatgtaacaaaatgtcacatggaaatgagaaatcctgtggctttttgctttccactgacaagtgcatgagagagatgtggctgtgcaacttcactctgagtattgattgagaggttccttttttgtctaaaatgtgttatataccaaaggcaaaagcataaagaaaataattcctacttttgaataaagtcagcacatttaaatatgaatgtgcactataatattgttcaaataaactatattaggtatataattaatccccaaactatagataagtaaagtgaaataaattttcctaagtagccatatgaaatctaatggtgaaaatgatacttcacactatagataggaaaggaacatggagcaaacagagattcaagaccttaagattggttataaataaatggttgccatgtggttttcttatcttctagaccagcactgtccaatagaaaaatgacagtcacaaatgccaatcatatacgtagttttaagtttaatgtccacattcaaaagaataaaaaaagatatatatatttaacccaatatattcataatgctatcaccttaacacaagctatataagattattagtaatatattttacatgcttttaaaaatatcttcaaaatctggtatgcattttacacataaaacacatttcaatttagactataatttcaagtgctgaataaccacatgtggctagtggctacctactagacagtgsagttctagaatatgtcatcactcttacattactagtggattttagagactatctcattaatatccagcagaatgaatayatacctacctaaatacaagcttattatggtacccacttcttgttgagtcaggtttttttgtttttgttttttactattggactttttaaacacctcaataaaaatcataacctttcttacataatagaaggattccttaataaaactttcttatcaatcaaatagaatggttaatagagttatgggtcacatggttattgccaatttccaaaacatccatatgtaataaatatactaaattcaatcctgtattataattgttaaagttgtcaatggtgattgtacttagatttgcactagtatttgtagtaaggtatttttgtatttttaaaagtatattatactattatatgtaaactttattgtctatatattacaaacacaaatctgtacctttactagagagtgaatttttggccatttaagaaatgtatcagttcatttgataattccaaatcatagatagctctacaagaaatttctgatggactctattgcaggactcagtagtagaacttaaatccaaattgctttatgaaattataaatttagttgggaaaacaagcatgtatgtctatgtcacatctccaagtcaggtgagagaagtctacattaaactcacctgaccactagcaacttgaacaataattacaatttttaaatgcagaagttcatgttttgaggaagatatgctatattgacctgttaaagacttgatttagtgtcgagtaatttaaatcaacaaagccrtagacagaagcttagaatgtcagcaaggagagcaattattatgcctaaatattgtagaagcacaaaatagttttagaaaggagatggaaaatgacttgcaaatagtgacttattttgctagttataaaggtaaatatattttaatcatttgggatctggtagcctttgttattaaagaaaaatagcatttctatttttagttgcaggcaagaaagtaattttagaagaaaaaagcccattgaaatttaattaaaagaaatcattgtggtaggcagtcttcagtactggtcagattatagaaattatcacttttttattacaataacaccacttacccaactttttgcttctatctttactctcctggtaaaatcattatgtgtttaaaagggagagagaacaaaacaggtaaagctgtagcaaaaggtacaaggatacagtcccttcctggaaagaggattttgtggcgaaccatttctcccataatgcatcccacagaccatatatccactagaacaggagagagagggtagtgaagaaaagggaggaaagtaaagttaactaagataattgacttctgaaggaggaggaaaaagaacagtttgattaaaagtacaattttcacctcccaccaaaagttggccaaaatgtgaattcaaaccagcrctatgctattacataaacagtgtttagtatgagaactcaaattaatgtttaaaaacccattactttgtgggtgccttacattgcctctcagcagtgccacaaagtggtgacattggtgactgagaaaagcaatagctaaaccaaaagtatctccatggcaggtgacagctaaaagccaccaaagggttttctgtgtcattttccggatgcatagaaaacaatattaacttgtagagttggctattttcattttctattctattcagttacagagaatagggcaacaagagaccaccttttttttcagggggccagggggccggggcaaaacaagataaattcaaccaaatccaataaaccaggaaatgactggaaccatggtttagaggcaaaagaattggaattcctggtatttgggacttagcttttccttcagaagtttattcttgtaaataaacatcagttttagtttccatttgaaatatttcaagaaaaaagacatatgatgaattagcacatgtataaaggagtcatctggaaggaaagtgaaaaaagtattaaaggtgttaaaaattgttatgtacrtatatttatttccaaattgtcaaacttgttaggaaaacatgctttgccttctcttaccaatctttacccctttccaacttgcttttcattatggacaaagggaacttttgggcagaatcatttggccgaattgttccatggggaaggaaggcggggctaggtgcaggggacagcagggcatgcctgatgtgggagcaagcaggtttttctgcatgataaccttcctcccattggtgggagggcagcaccagggtgctaggcaggcctcctccatggacttagagaagtcaaaaacctaaggcagcaacttgcaattccttctagtgagggaagggaaagggattttaataccagctattggtagtgccaagatctgaaagcccaaataggcaaattcagaccgccccaccccccagtctcctgtacattcttgattcttgactttgtttctcctttgactttttaaaaataactcgtgaagaaagtataaaaatgtcttcttttctgaataaattagatgtggtattgcctagcaaggagggctagattcatctcttctgagtcaaaaggtaccagaactccgatattgcccaccagggtgaacctgacctttgtaagaggtgactttttaacttcctctgtataaatgcatacatacattatctgtcttctaatctaagagtatacaaagaagtttctgtaaacttcagtggccagggaattttcacaaaagtaccctgtagcacctgtacataaaaatacactgattatttttataaaacttattaatacagactgctaaaaactaaatagaatagaatataaaaataaatattaaagatacactgaatacatatacaatcctaatttaaaactattttaattcctaagtatattgaatatgttttcaatatggtgcattacttgtaagatatagtctcatcaaaataatacattgcaatgctttctaacatatttaataaatccttagttttaatcaactacactcaattgtaatacatttttaagattccttccatagccttcattttaaagtgttcatgaacattaagttttctttatgaaagcagtagtgtcaaatttgacattttccttttttacgatttttggaatatataaggatttattaggcaattgctactctaaatgtttcttacagagcagcttaaattattacagaaattcttattcagtttaaataatttggattatttcaaagttgtctatgaagattttcactctaaggatttgtgtcacttttttgcttgtctttttctagaactacagccatcagtctgagatacaacataaaagccacatggctaactgtggtagattcctttctgctttcacactcatgctcagctgagctgcaacccaaatagcaatttttctcaatatctaggcacgtgtgctaatcagcatccrcttgactgtttaatcagactccatttacaattctttttcactattaacatttagtgctcttctagcaaaactgacttctcaataacatccttcacatttttaatgagtgtttcttaccagtagtattaaaaaaaaccctgaatatgctatctggcagccctactttataaaagcatgtacataaaagagaacattccccttggctatctacaacgtgcacccgtttcattcatggttttgatgctgctctcccgaagcatccctaccgttctccttgtagcccatccccaggatgacctcaggggctctgtaataacgtgtcaccacatatggagtcatcatgaagcttgtgcctgctgtcctggccagtccaaagtccaggattttcaatgtgcaatcagacttgactacaatgttacttggttttaaatcctaacagtaaggataagggaaaaaattaaaagccagtatcaagtgaaatgttatttccattgactcaatcaacatagccattttgcagtagcactgatgaggtcccccttgcctacagagctctaaataaggcaaaygattactgctacaaataagttaactattagtttttggaaagtgttttaatcccagaaaagaattgtattatcattttcacaatttacactaatcttgggaagaggttttagaaaaaaaaatatttattgtcttctgttaggtttctccttaggacaacataaatctttcaacatatatatcatttctaggcctgacagaagaacagatcagggaagctgtctttatgctgccagaaacatctatggaaatgaattttcttatttcagttgcacatatgacttctgccaatcaaggagctgaaagcatgaggcttctaagaagctgcatctcaatgagccaaaacataacattgaacaaactcaactacaatataactagaatttccttctacaattagtgaactaggtgctaattctagtatcaaagaaatgaggaagtatattatatttgaccaatgccccccgtataaagaaaataatctacagttactcttcctcttaaagcatttgaattgtaatcctagagaaggtgttcttaccctgtgaataattccagcagaatggaggtgcttaatgccacacaacatttggtacagcaggtaagacattcgctcatggtctaattccatctgaatcacttgacataagttggcatccatcagttccattactaagtaactagaagggtgaatccacagtgttagttccagatcacaagatctatgaagtcctttgatttagtcagaatgctctcctaactctgtaagtcttctgaacttcttagctctgcctttgacttaatcaagactgagcatttccaggtattgcatgtgtgttagctatacgaaccctaccaaaaggttgctagtagaaaaagcatttattartgtctggttcatgtccacagatttgttaccttaattttgctttcactttcccctgtattccctcaactcttttgtgaatattataatttcaaataagaaaaaaattaaggacagcttcttccattaaattcaatgtatctgtattaaagacaaggtgctagggaatcacttcctctcctccatctgttgtcactactgggtagactttgcacaaaatcaatgacactataaagatagaaagaataaagataattttcacgtcccttttattactatttctttttgtttgtttgttttgagacggagtctcgctccgtcacccaggctggagtgcagtggtacgatctcagctcactgcaacctccgtctcccgggttcaagcaattctcctgcctcagcctcctgaatagctgggactacaggtgcatgccaccacacctggataatttttgtatttttagtagaggtggggtttcaccatgttggccagcatggtcttgatctcctgactttgtgatccacctgcctcggcctcccaaagtgctggaattacaggtgtgagccaccatgcctggccttattactatttcttcaggtaaattaactcattgtagaaagtttgtggaatctattaataaatataaataaataagccttccctgagtgaccaagagcatggaacaacaaagtatataaagccacaaggccaaaaggaggcagaatgtctttccaggaagtaaccccacaaacagaatcttctttacatatcactggacccctttcatttgaccccacctcttacctctctttgagcagtataagggatttcaactctgtgtgtgtgtgtgtgtgtgtgtgtgtgtgtgtgtgtgtggtgtgtgattttcccttgggctatctgagtgctgtgctctcccttccttcatgagttttgttacttacacatcttggaactcctccagcgttttctggggtgtgaagacatttaataaactaataatctgaaagagagyggaagggacagaggaaacgagagaaagaaaaaagagagagaatgtattatttttaaattgtatttyaactcaaagtcactcactagtgctatggcagaaatggagaagttggaaaaatgtcttgagctgtctcagaggacacagaaaagtatgctcagaaagaacagatgatctgtcttcaggttaataatgcagctaaaaagctcaattcttgggcagaagcaagagtcagagagatgcataattgttacactgctttcaagtgtgattcctcgtggcagaatatgggccttcgggggattaaacaaaaaaggaagaaatgccatgtgaggagagaggtggcagtaaaacactcagtgagacttagcaaggggatacttctccaaatgaacaaagttgtgttctacttcatgatttttttgtgttgttactttatatttttttttacttctacctcacactcaaatattaaactaatgctccaataatatgtgtggggaaaggtgcattctagatgatatcaatgatggatttaatagaaaattattttaaagttatttaaattcagttaaaagctttttgtttcctgctttattttatatatcagctagtaaaaaaatctaccttctagtataagcaaattttgtaaaaaccccttgtcacatttctcagtagagtacatacatcaataactcaaaatgttcttccagctaaatatttggtactaacgtgccagtaggaaatgaatataaaaatatataaaaatcttatactcacaagatagttgcaactattttataaaaattagataagtacaaggtcaagatttaagcagcttcaaagcatcaatcaatgaatttcagtaaactttataaatgatataaagacatgtggagtaataaacataaaacaaaattagtttaaacacctgagaaattgactcaattctatggaatgttttatgtctcacgtagttttaactgattgagaaattattgacaaaaaataaccacagtaccatccaatattttctagtatacatatatatggcaatgttgtaatatagttttaaaaatacaagatcatctcttctaaagcaaccttgcagtgtggaatattcatatagaaataaaattgttttaaaattatctttataacttgtgattaaagtgccatgttattctgtgtactcagtgctagtgagtgttgaaaaatgactatgaagtacacctttcattggaacatctacagtgggtctgtttctctaggactttatcaatctcataaagtaatttatttcattttgctatttgttcaaacaaaaatattagagactgtgtatacagcacacattacatccacacaaacattcacatgaacactacttaaaaatggaaaaatgctaacccagatcacytagtgaacaaataatctagataatttaaaaaatatagaaaatagcattacaattttaaataaatcaagatttattgttttaaaaggtaatttatcaagatctattccctactgtatgttcttattttcccttttcctatgaccttgttttattactttttactcttcgagaatttctcttctatccttcatttgctctcttgtaaattctaattcctaccaatagtcaattttaaaaaggcatctgtagaaggagattatcacagctataaaatttccattttaatccaacagtttccagacaggaatctcagttcttttattccagcatcttgagacacacagatgtgaatctatgtttgtcaggccccactagttcctggaattgaatatttattttctttttctagataacaattttaatctaattttcagttgataagaaatacagaaaacaggggaccaaactaacaccayaaagaagtattttctaaacagattttcttcactattattaaagatttaatgggattattttgctcttgctttgctttccacagtattaacacagttctacgttcttattaatgcgaaatttacatttggttgtaagtgaatttcctcttcataaaaagttccagaaatgtgtttctgtagacttctgcatacatacatacacacataaaaggaaggtagcaggtgtgatgctatttataaattatcactgcaatctggaactcttttttaggcttcataaatatgagtctccaacatttcagtcaagaatgggaagtattctctcaaactgaccaagtaagtgagcatttctccacattctattgcattacagggtctggaatgaggatgagggaaatataaatacatgtatggaaaactttccatacaattgattcattgcttgtatccatccatttttcattgcccatgttatgctccatcctccttggtataacagaatatattgcattgatcatgtggctaatcttgcacttacctttatttaacatactgaaagaacaaattagtatataactcttcataggaaccatcctttctatcatttctatattcctttctagaagtctcatgtttgttgcatggccatattagatatgagtgtgcagttcataaaatttcaatttcttggtgaggcctttgctgcttggcctatttaaaagggtaaacctatcccaccatacactgaccagcatttttaaatattccttctttgctttgccttacttaatagcacttatcatcacctgacattttacacattgacctgtcttattgtggatcgccttgctcttgccaatagagcataactccacatgggcagcaatttgtctgttttcttcaccatctagatctgttcctggcacattttattcattcaacacatacatgtcaaatgactgaattaaaaaatcatcagggtagagtaacagaggaaaagagaaatactgtcatggggcccgaatctgcatatttgcatttcaaatatctttcaacttaatactaacacatttgtgtcttctcagtgccactggtagatggcgagcattaggacaagatccctggtttataaaaccgcactggtaatgtgttctgtgtaattttcatacataasaactttgtagagagttattatagctattatactatagaataattttacttgtaatgaagttatcttttgatttttaagaaaataaaattttatttataataatttataatttattatatatttatatctaaaatgtatttgatgtatttattataatttatttattaataaaagttattaaaataatgaattatctcctatttatctttattaagaagaagtggagcacagaaagaattctagaggtcttggcctgtgattgaaggagcttagattctgaaatgaagaaagtcctttactggtctacccagctgagttccgatgagaaaaagctcttgatccyattctcaagtggtttgcaaatatgtactcacatacttgcccacccctgaaaaaaataagatgccaacacacagtgaattcactgaacaattagaggcyaccaccaggctacagctgaaataaaaaggagataacatgaataaaactcaaccgttggcaattaaatctaaattataaatctaaattaaatctaaattataaagaaatgtagcatggtgctttgtaggttttttttttctggcttttggctttgyttgtcttgtttctttcttgaagctctcaatttggagcaagataaccaaatatggtaaattttctaactagggaaatatttataaaattcatcacttccacatcatatggtttttaggtgatttttaagcagaaagctaccatgaggacaatgaaatcgaatgtagcatattggcaggataaacaatcttaagaggcaggaattgcaaagcaaagaaagcctttcttactcaagtacagacacattttctttttccaatcttacaaactcccactgccagaagtttaaaaataacaaaactcacgtttttatggttcacacacttcatgagraccagctcccggtacgctctcttggcatgtgtttggttctgaaagggtctgctgagcttcttaatggccacatttctgtcaaggacagcatcatacgcggcactgtagagatccaagagcaactcagaattaagaacaaaagattccttagaactcttgcctacttgattaaggatactggtaaagaaaatgctatttcrgaatcttagatactgtctactctggtcacatgccaatcaggctttaagtaaagatatgagtgactggcataagaatattctacatgctaggaggatgaagaagagttggaggaagggaagaaggagaaacaggagaaggggggaaggagtagaagagggcaaaggagaagaaaaagatcttgccaagaatatagcatataattgcctcagtgagtgggtggaataaagaagtaagacaggcattcaaatttcccactagccatgtgactatggcaagtcatttaatctctctgagcttgaatttctcatctgttaatatatgatatttaatttttatagctataaaatttcattgttctttgtttgttttaaatgaacattttctatacccattcacaagaaccaggtgttttgtttgttattgttttttagaaacagagtcttgctatgttccccaggctagtcttgaactcctgagctcaaggtatcttcctgcctcagtctctttagtagctgtgactacagccacatactatgtcacccaactaagaaccaatttttaagatgtgatgttaattgccataaaagcactggtgggctgatgatcaaagtgtactctcattaacaataacaaagctcaaaataagaaatgcaatcagagagttttagaaacataaataactgcatttaaatacaaagacaaaaataaatgctrttcacatgtgaagctttcacaccgagattgaaaatttacaatgctttgaaaaagcwatctaaatatttggtgctatttctctcatatgcagagtacatgagtttagagatcaaatgagaaagtgagagaggctctttttgccattatacctaatgatgcactcacaaaatatgtgacccatccctgaaactttgagtcctgctgggttttgtcttagttgtcaggaggaaatgcaaaaccagaatccactacaactgatctactaaattagaagtaacattgaccattgaagcctcatgccacagaactaggggcaaaaaatggaatttctgtactgtaagaaaatgatagattcacagaataagrttgaaaaaagtcttagagttcacctggtccatactttcatttaatactcattcctctctaaaatatgtccatgaaaagtttcaccagtctctgtttgcccacctccaaaaacatggaaatcattatatctaagcagctctttctattgttcggcagctttgagaatagaaatgccatcattctaataaacagagttatctttctgcagtttccactgacgactgttagtcctgccttccagggcaactcaaaataaaatgtttcctttccattattaaccataatatatgaaatctattaaaaggctgcacacaatgcgtggcctagagtcaacactcttaactcttagcttttagcatttttcccctaagtctttactttcttaaattaaatattaccagtcccctaccatcacttgtcagatgtggtttcaagtcccgttactatctggtcagtttcctctgaataaactccagtgtgtcaatatgctctgaaaatgtggaccttgtgctaaataaacattgctactctgggtatagagtgttactgaagattagggtagagctagtaactctctcattcattcctttgctcattcattcaacaatcctgttctgacattgtttatacagctaagtctgtcctggaactctttaataatgacattccacactattctttttcactttttaaaaaaatttattttatttaaagttcctgggtacatgtgcagaatgtgcaggtttgttacattggtaaatgtgggacatggtggtttgctgcatctatcaacccatcacctaagtattaagcccagcatgcattagctatttttcctgatgctctccctcctctgcttcctggccccaacgggccccaatgtgtctggttcccgtccctgtgtccatgtcttctcattgttcagctcccacttataagtgagaacatgcagtgtttggttttctgttcctgcattagtttgttaagaataatggcttccagttccatccatgtccctgcaaaggacaagatgtcattcctttttatgactgcatagtatttcatgatgcatatgtaccacattttctttatccagtctatcattgatgggcatttgggttgattccatgtctttgctatcgtgcatagcgctgcaatggacatatgcatgcaagtatctttacaacagaatgatttatattcctttgggtatatacccggtaatggaattgctgggtcaaatgatatttctggttctaggtctttgaggaatgccatactgtcttctacaatggttgaactaatttacattcccaccaacagtgtaaaagcatccctatccgcagccttgccagcatctgtttcttcttgactttttaattatcaccattgtgaatgacataagatggtatctcattatggttttgatttgcatttctctgataaccagtaatgttgagctttttttcatgtttgttggctgcataaatgtcttcttttgagaagtaactgttcatgtcctctgccccctttatatgaggttggtttttttcttgtaaatttgtttaaatttcttgtagactctggatattagacctttgccagatggatagattacaaaagttttctcgcattctgtaggttgtctgttcagtctgatgacagtttcttttgctgtccagaagctctttagtttaattagatcccatttgtccttttttgcttttgttgcaattgcttttgccattttcatcaggaaatttttgcccatgcctatgtcctgaataktattgcctagattttcttctaggatttttatagttttgggttttacatttacttctttaatccatcttgagttaatttttgtataaggtgtaaggaagaggtccagtttcaattttctgcatatggctggtcagttttcccagcaccatttattaaatagggaatgctttccccattgcttgtttttgtcagatttgtcaaagatcagatggttgtaaacgtgcagtcttatttctgagttctctattctgttccattggtctatgtatctttttcatttttttgtaacattaccatgctgttttggttattgcagccttgtagtatagtttgaagtcaggtagtatgatgtctccagctttcttctttttgcttaggattgtcttggctattgggctcttttttggttccatatgattttttaaatagttttttctaattctgtgaagaatgtcaatggtagtttaatgggaattgcattgaatctataaattactttgggcagtatgtccattttcacaatatttgttcttcctatccatgagcacggaatgttttttcatttgtttgtgtcctgatttccttgagcagtggtttgtagttctctttaaagaagtcctttatgtcccttgttagctgtattcctaggtattttattctctttgtagcaattgtgaatgggagttcattcatgatttggctctctgcttatctattggtgtatagaaatgcatgtgactttttcagattaaatttgtatcctgaaagcttgctaaagtcacttagcagcttaaggagcttttgggctgagattatggtgttttctagatataggatcatgccacctgcaaacaaagacaatttgatttcctctcttcttatttgaatatcctctatatttctttctcttgcccgatgttctggtcagaatttccattactatgtttaataggcatgaagagagagggcatccttgtcttgtgtcagttttcagggggagtgcttccagcttttgcccattcagtatgatagtggctgtgggtttgctgtaaatggctgttaatattttgaggtatgttccttcaatacctagtttattgagagttttaacatgaaatgatgctaaattttattgaaggacttttctgcatctattgaaataatcatgtgttttttgtctttagttctgtttgatgtgatgaacttcatttattgatttgcgtatgttaaaccagccttgcatcctggggatgaagcaaacttgattatggtggataagcttttttatgtgctgctggattcagtttgccagtatcttattgaggatttttgcatcaatgctaatcagggatattggcctgaagttttcttttttttgttatatctctgccaggttttggtatcaggataatgctggcctcataaaatgagttaggaagagtccctccttttcaattgtttggactagtttcagaagaaatagtaccagctcctctttgcccctctggtagaattcagctgtaaatccatcttggctttttttggttggtaggctatttattactgctcaatttcagaactcgttattggtctattcagggattcagcttcttcctggttcagtttgaggagggcatatatgtccaggagtttatctgtttcttctagattttctagtttatttgtgtagagttgtttatagtattctctgatggcagtttgtagttctgtggggtgataacccctttatcattttttattgtgtctatttgattattctcttttcttcattattaatctagttagtggtctattttattaacttttccaaaaaaaaaaaaccagctcctgattcattgatttttgtgaaggatttttcgtgtctctatctccttcagttctgctctgagcttggttatttcttgtcttctgctagctttggggtttgttttctcttagttttctagttattttagttgtgatgttagggtatcaatttgagatctttctagcttttcaaagtgggcacttagagctataaatttccctcctgacactgctttagctgcatcccagaggttctggtatgttgtctctttgttctcattggtttcaaagaactgcttgatttctgccttaatttcattatttacccaggagtcattcaggagcatgttgttcacctttctcgtagttgtgtggttttgagtgagtttcttaatcttgagttctactttgattgcactgtagtctgaaagactgtttgttatgatttcacttattttgcatttggtgaggagtgttttacttgtaattatattattaattttagggtaagtgccagtggcactgagaagaatgtatattctgttgttttggggtggaaagttctgtagatatctatcaggtccacttgatccagagctgagttcaagccctgaatatctttgttaattttttgtctcgatgatctgcctaatattgacagtggggtgttaaagtttccactattactgtgtgggagtctaagtctctttgaaagtctccaagaacttcttttatgaaactgtgtgctcctgtattgggtgcatatatatttaggagagttacctcttcttgttgaattgaacccttacaattatgtaatgtccttctttgtctttttttttttatctttgttggttttaaagtctgtttttcagtaaccaggattgcaacccctgcctttttctgctttccatttacttgataaattttcctctatccctttattttgagcctatgtgtgtctgtgcacagagattggcctcttgaatatagcacactgttgggtcttgtctttttatccagcttgccattctgtgtcttttaattagggtatttagcccatttacatttaaagtcaatattgttatgtgtgaatttgatcctgtcatcatgatgctggctggttattttgcaggcttgttaatatagttgcttcatagtgtcattggtctctgtactccagcgtgtttttgtagtggctggtaatggtttttccttttcatatttagtgcttccttcaggggctcttctaaggcagccctggtggtgacaaattccctcagcatttgcttgtctgaaaaggattttatttctccttcatttatgaagattagtgtggccagatatgaaattctgggttggaaactcttttctttaagaatgttgcatattggcctccaatctcttcagacttgtagggtttctgctgagaggtctgttgttagtctgatgggtgtccctttgtaggtgacctggcctttctctttggctgctcttaacattttttccttcattttgaccttggagaatttgattgtgtgtcttggagttgatcttctcatagagtatctcaccggggttctttggatttcctgaatttgaatgttggtctgtcttactaggttggagatgttctcctggatgatattttgaagtatgttttccaacttgcttccattctcctcatctctttcagatgctccaatcagtcatatgttcggtctttttacataatcccatagttctcagaagttttgttcattccttttcattcttttttctctaaccttgcctgcctgtcttatttcagcaagatagtcttcaggctctgagatcctttcctctacttggtctatttggctattgatacttgtggttaaattgtgaagctcttgttttgtgtttttcagctccatcaggtcatttatgttcctctcgaaactggttattctagttaacagctcctgtaatgttttatcatggttcttagcttctttgcattgggttagaacatattcctttagctcagcaaagttcgttattacccaccttttgaagactacttctgtcaattcatccattgcagtctcaccccagttctgtgcccccactggagaggtgctgcaatcatttggaggagaagagggactctggctttttgagttttcagcatatttgcattgattctttcaaatcttcatgggtttttctacctttgatctttgaggctgctgacctttggacggggtttttgtggggtcttttgtttaacagtatggcccaacttccatagggctgctgtggtttactgggggaccactccagacccagttcacctgggtccctcctgcacttggaggtatcaccagtggaggctgccaaacagcaaagatggctgcctgctccttcctctggaagctccataccagaggggcactgagctgatgctggccagaacactcctgtaggaggtgtctggcaacccctgttgggaggtctcactcagtcaggaggcacaggatcagggaactgtttaaagaaccagtctgactaccccttggctgagcaggttgggctgtgctggggagaatccccctcatctggactgccagcaggcaggaaagactaggtgcccccaactgtgagactgtggccgctcctcccctcaggggctccttcccagggatatcagagttctgtctgaaaacccctggctggagatgctacaatttctgcagggaggccctgctcagtgaggagggatggatccaggttccacctaaagaagcagtctggccacgatctgccacagccactgtgatgtgctgctatgggaaattcctctcagttcaaaccacccagtctccctgacaccagcagcgtaaaatggccaactggagttgcagtgatggtgactggccaccccttccccaggcactcggttgtattaggcattgtccagcctgctgctactggttgcaacccaagcaggtggcacagctctgtgcctggaaccaaaggccttggtgatgtgggcccatgaggggatcttctgatccacaggatgcacagatccatggaaaaagcatggtttcccrggcggggcagcgcagtcactcaccacctctcttggctgggtgtgggagttccccttatcccatgcagctcccggatcattgctccaccctgcttttcctcactctgcatgggtcataccaactgcctattcagtcccagtgagagaacctggatacgtcagttgatggagcaggattcactcactgttttcattcttctcagtgggagctgctgactggaactgcttctatttttttggacagttttgctcttgttgcctagaatggagtccaatggcacgatcttggctcaccgcaacctccgacccctgggttcaagtgattctcctgcctcagcctcctgagtagctgggattacagtcatgcgccaccacgcccagcttattttgtatttttagtagagacggggtttctccatgttggtcaggctggtctcaaactcctgacctcaagtaatccgcccatcttggcctcccaaagtgctgggattacaggcatgagccaccaggcccggcctggagctgcttctaatcagccatcttggctcctctccctccatcccaccctattgactcacagtgagcctgtgttaatttaaaatactgtctcttaaaaatcttgtgctgctcttacactaatatgtcagcactggtgcttctgtgcttgtgtttgttctttttcacctaccartggcagcacagataaagagccaagtgggcatgtttcttataggtaacatacaagggcaacagtggatttggaaacacaggaattaaacttactgtctaaagttaagtcattgtattggcagaaaattgatccatcacctcaaagacaagaactaaatcttaagccaaaattaacttagctgaaattattaaaatatcaaaagaaagaatggcaatcagtcatgaaggcatataagggagttggagaggcaaactctggcacttcttggccaaataagaaagtacctttccakgtaggtctagagatcctgtcagccaaccagatggacacattcatattgtgattgtcagaaactacagccagttagcattctgatcagagtctccttgggctgattcgatcctctacagccaacattatactaatcaagacttattcaacattatactaatcaagactttatatgtgtataagaatattgtctatatttggtcagcctgactgttacatctttcataatttcaaaaaacgggcatctggttttatatgtgagatggtagtgaggattgtcagtgtaagtttgagtccctgagatattgaccagatcatgcaagacagtgggccatccccctatctcatgtggaataactgagaaaatcccaccctgtggggtttcttggcaggcaaaaagctagacagttctcctggaaacgttgtggcattctccctctgtctggtacttcctcctcaaagcaattttaggtatgaatgtcagccctgctgcttactaaatgtgggcaagtcatttacactttctgacatcagtttcctcatacttaaaatgaagagaataacaacttgacaagcttgctgtaaggagtaaaagagttaataatgtataaatagtgcctcacctagagtgagcactgagtaaatgatggctattactatttttaaaatcaatgttcttcccagattcattatgtaggacaggataaagcattaattcctacagcataggcaacaattggacacatatctgctaatcagtagttctttagtctttctgctaattacaaatacattcaactgtaccaccatcatgaccacatttttcaagtatatcccatgacatcataaaatacatcttccaaaaagacaaaaagctttgttaaactttaaatacattataagctgggcacagtggcatgtgcctattgtcccagctacccagaaagctgaggcaggaggattgcttgagcccgagagttcaagaccagcatgggcaacatagtgagaccaccccatatcaataaaaataataaatacacgcatacatacatatatacgctgtagccatacagttctctggcttaccactttaataaactatytgtatgatttgtttttaacaaaccccctattcccagtgatcactacaccctgtcttaatggttcacagggtatcttttctaaccaatacaaggaccagtgttgmgttcaggaggtgtctcttataagctatcccttcctctaaagaaataagaacttttggctgtcttgaattgtgtggatactgtggtttggtttactgaacttccatctgactcttctatgtcataccttcctatattaaagataaaacttcagagttaagtgtacaattcccagaagcttttgcagctagcactctggatccaagtaagatcctgcagatgcacctatgagcgatttgtaatgcagaagtgaggattatcagcatcttctgacatgtcttatttgggaagcaaggtcttgtggagatgtgaggttttcttccaaagcaataattcatgtcattctctagattcctggttaagaggaggagtggaagcagagtccccaatgaactccaggttccactcccccgttcacagcataatagagtagccatggcaacagtaagtgcatagttccagctctatgatttcctatctcagctttgattgtatgttctggaaatctgatggttctaggatactctcagaggtgggagctccctggtgattcagctcttgggtgtctgggagtcattcaaggtagcccagagtacagcccacttctccaggccttcctgtaactgcaggcacccatttacagcatttaatctctgctgcttaaaatgcttctgtcttctgccatgaaccttggctgacactacaatctttcccattttctgtaattcctcagtgattactggcagaagtttagcaaatacatctgcaaattggcatcattgatgcggtacagtcacagattcatgtctgaaagttttctattactcttgagtcatctatttttccaagaatcttggcctgtggaatcttactttttttctttcagtatttttttctttctgctatctttatgcaggtaaaaatggagataggtctttatgaagatttttccaacaattctccagccacactgctgaagattttccagcaacttcttggcatacagtactaacacacctccacttctaccaggtttattcctaaaagagtgatagagctttctgctgttatgctcctgtcatttaattcagcttgatgatgctataaagctatgtttacctccttgtatgtatttatataaatacacatacacacacacacacacacacacacacacacacacacatctctgaaggcaaatcttgttctcaatatatttatcaggtatttttttcttctgacaattgcagataacctcttacacaaatgttcttcttcctaagtcataatcatttatttgacaatttttcttgttcctctttccctttacatttaaaatgtttgtaatcatattaaatatttgtgggggaaatccctaagcattactggagcatcttaaacatcttaaatcatagcctggcaaaccaaattctttaataagaatcatgtttttgaacctgccaaattcacttctgccttaggattctgcaattgttccccctaacaggaatgctcttcttgcatcctcacttggctaaccccatttgtgattcagatttcagcccaaatattatctcctcagagaggctttttttagtttttctatcaaaagtcaacagttgatttttttggttaattattttgtcattgaatggtttggctgtacaagtttggttatatttgttgagaatactttcaattacaagtaacagaattctgaataataataacttaagtaataaagatattcattatatcatataacaaagtataaaagtaggcttatcaaagtttcagagatgcacagtgatttttgagggccctacgcacttttgccttcgattttctgcaaatttgttctcagcatgttgggaataaaaagccaatagggccgggcgatgtggctcacgcctgtaatcccagcactttgggaggccgaggcgkatcacgaggtcaggagtttgagatcagcctggccaacatggtgaaacaccgtctctactaaaaatacaaaaattagccaggcgtggtagcacgcacctgtaatcccagctactcagaggctgaggcaggagaattgctggaatccggcaggcagaggttgcagtgagccactgcattccagcctgggtgacagagcaagactccatcacaaaaaaaaaaaaaaaaaaaaagccaataataggagaactctattaatgtatccaagggcaatggtgtaggtgctgtgatgcaagaagattccctgtcaggaataaagggcttattatgtcagatgctaggtgtgctgccagcagacagcctctcagctcttagccccctttgaggatgacctcagctgacaaaagctgcctaacctagcctacacactcttcataggtagccttcattcaatgactgatgaacatgtggttataaaagcctggccacttcaccccaattcaggacagctggtaaggctcattacctcttcagaactcccaatagggtcagcagaggcttctattgagattgtattgcagctgaacttgtctctattttctttttccacaggtgttggcccccaaaatacttcctaataaatctcctgcatgaaatcaccatctcaaagtgtaccttctggagaatacagtgtttggaaagcagtaagtcatggctaaatacagcaatatgctctggagttcacttggatacttccctaggcaaaaggcaagtccaattatggataaacatggctagactacgagctcaacatcaagaaaagccatttcacctatgtaaccaactaacctagatgaccaagcctaattatagagttttcattcaaaaccactttgtgcttggtagacactaaattgaagcaaggcagcaagtgggtctcacagccagtccctcaaagacgtatcaaaagcaggaacttcttaaaacactagaaactgaactagtactttacaacccatcagcaaactaaagacggggaagaccacacaaagattattcaccttaatcaaaaacatgggaccagctcagcagctcatcaccacagaaaatagatgaatggaaagaaaatggctgctctagacacgaggcaatttctggaaatcaggatggtgacattggagaagaaactgaagattcttggagaaatattaacttcatctcagtaaaatggtaggtgatggaatgcacacagactgtctcagtttctcttctttgatctttgtgacaaattgtctcatgcccattctgctcctttactgaccattcaatggaccattcatatatttatctagtcgatgttttagtctacaaaattcacaaagctgccaggctgccaattgatagggtaagctgaaaacttgggaaattagactggccagccctgctataaggcatatagggtgtagttagacagccttgctacactgattttgccatttactgtgtggtataaaccaataattatttggtttttagtgtttagtaaatattttctaactttgcaataaaacccttccgacagaaataaataaaattaaaactacatatttaattaaagtactatatactaaatttctatttcttatatattcttggtcacaaccaaatgaaaaccagaaacagttctcctaaaggaccatcagcatctatttcagttagtaattattgtaagaaggctgtgcctacatacgatgatttaacacatgcagctatgtcttagtctatttgggctgctataacaaaacatctgagaatgggcagcttataaacagcagacatctatttctcacaattcttgagtctgggaagtacaagatcaagaaacagccagatttggtgactggtgagggcttgttcctcatagaaggcaccatcttgttgtgttcttacatggcagaggggataactagctctttggggtctcttttataagggcactaatatcattcatgagggcaaatcctcatgacctaatcacctccctaagatgccactttctaacaatatcacattggagattaagtttcaatatatgaattttggggagacacaaaagatacatttgcagattactctgaatcataacttttcatttagctcaaatgactgttcttctaaattaattttgtttattttcatttttgtgaggattacaaaatatatttttaattgacaaaaattgtatatatttgtggtataaaccatcatattttgatatatgtatacattgcagaactgctaattcaagctaattaacatatatattacctctcatactcagatttttttgggttgagaacaaaaatctccctaagtaatttgtaagtatacaatatattcttatgaactctagtcattatgttgtacaatagatctcttgaacttatttctcctgtcaaactgtctaattttgtgtgctttgacaaacatctctccagtctcccccgcttttggcctccagccactggtaaccaccattctattctctacttctctaaactttatatctcaacataagctccatcaagttcaagacacttttgtaagcaacaatcctgccatttagttcatccctaaagaactcagggccttgggaatttaatcatgttaatacagtcttttttttgggaggggcattattaactgagaaaaatgggtggctttaaacattttctaagattagaaaataaaaaaagtcagatagagccaagtgaggactgtaaggtggatgcctaaaattgcccctgtttgcagagaggaatgagcaggagcattgtcatggtagaaaaagactttctggtgaagtttcccaggcatttatctgctaatgctttggctaactatctcaaaacactctcataataagcagatagtattatattttggctctccagaaagtcaacaagcaaaattccttgagtatccccaaaaactgttgccatgacatttgcttttgaccagttcacttttgctttaactggaccacttccacctcttggtagccattgctgtgactgtgctttgtcttcaggatcatattggtaaagccatgtttcatctcctgttacaattctttgaagaaatgcttcagggtcttgatcccacttgtttaagatttccattgaaagctctgctctctttcatctgcaactgttctggaagcaacatttttggcacccattgagtggaaagtttgctcaactttaatttttcactcagaattgtgtaagctgacacaattgagatgtttatggtgttggcttttgtttctgttattgtcagtcctcttcaattagggaataaataagataaatttttttccttgaaaattgatgtggatggtctgcctctgtgggcttcatcttcaacattgcttcattgtccatttgtaaactcctgatttatttggagcatcatccccataactttgtaaagcatcaatgatgtcttcatttttctacctaagttttactataaatttggtgtttgttcttgcttcaatttttgcagaatttatgtggttctgataggtgctcttttgaaactgatgtcttattctttttagtgcctcaaattagatcctgttcatagctgttataacaaggtactacaagtttattctggtgcaaaaaacatgaaatccatgcataactttttcataatacacactttccataactttttaaagccccctcgtataactgaggtcatacagtatttgtctttccgtgtctggtttattttccttaacataaagtcctccaggtttatccatgytgtcacacataacagggttttcttctttttaaagtctgattattaccttattgtgtatatatgccatattttatttattcattcatcttctgatgaacacttagattgatttcttttcttggctattgtgaataatgctgcaatgaatatgggagtgcagctatctctttgacatactgatttcatttcctttggatttatacccagaagtaggattgctggagcatatggaagttgtagttttagttttttgaggaactgcatactgttttccataatggccgtattaatcacgtgaagattttttcaagaccttgcttacatcaacattgctacaaccccactggtctaagcaagtgacataaccaagtgtcagcatgagagggcactaccgaaaagcatggatacaggaagacataagagattggattacaatcaatatgcattcccttatttatcactattattttcatttaattctgcaaataaattaccagtaagttccataatgaccttcttccacatgtacttacttttaggtcatgtcagtcagaacaaaacaacctaagaatgacagaaagcatgctgttcattctattcaactcccaacttcttaaatatatgtaccataagttaagcaacagttgttaatgtgctgcctctactagcagaaaataattttataaacatttaagttatggctactttatttcattttatcatatgcctcaaacataaaattaatatatttcaatactagtttgattttttaatccaattcaatgactcaaaataaagctatggaaggtcattctatcaaagtttaaaatctgacaatagtgtaaaaagtataacaattttagttgaaaatgttgacattgaagataggttacttattttttcagtgataacacacaaaaaatttttgctgaacataattacactaaaaacagtattcttatcacaataagaaatgtatggagtagaaatgcactctgaatttgttgtggtgcaaatataattcacattgggtccaaataaattgcaatattctacaaatcaaaatagaagataaaggtgacaagatttataaatatttttataattagaatcactttattacaaaattttggagacaaagctgatattgaattaaaaaaatgaaaatactttaacatagcaatcggcatattttcttggcatttctcatacttactattgaaaaataactttttatacataagtcctctaaactttgggtgctttttttttgcaaawttacttggaaatgtttaatcatagtatttcacaaatggagcatcccagtattcagctcttgaaacttttaaggaatagctattattattaacaaaacttgcaacttgaagcccacaagaatgtgctgaaatggactaaagcaagaaattaactgaacaaatcaaatgaaataatgcattctcaaagacaggataagatttgattttgagattccataatcatactttagaatatcttaatttgtgagaacagtctttagataaagttctgaattgtatgatctatttatattctatgtggcacctggtgtaatttctaatttccaaatatttatattctgtgcaggattgaaatatgattttaaaggcctataatttttctgcatctaaatttggcaaaccattaaaaaagccataaatttaggcaatctatttggcaagtgtggtattatgaagttatttcttggataatggaacactaaatgaagggggggaaagctcagtgtctgtgaaaaaccttggactcaaatacttttacattacaatgcaaaaatacattagaattaaaaatattttcaattaataaaaagaatattttcmatttagcaaaatttgttcttagcagatacctaagccccttttgagaacatttttcaaataaaaatattgttatatatattaaatgtgtcaatatttcaaatttattaaccataacaagcaattttgaagattcccagaagtttcattaaaacttaagaataataaattcatattaaaaagctgacttcagaaaaatatcagaaatttcagcagattaatatacatgagatgtaccacagtaattattcttctcattaaaaaaaattaggcaattcatataagttataaaatattaactatttttattttcattttcaaaaatgtttgtttaaaacaatttctaataacattatttttacgaccatcaatataatatattttagcatgtactttcattgacaaaatattcccttttagatataagtgatatgctcccctgctgctcaagggcactgtgcttctggttgaagaggcttttacatgtcactcccccaagaaaaagagttagaactaaggactgctcttccggggttactgctacattcctacctttggccatttcatggcaataaaatttaaagtattatttatgtttagttattttatcttaacaagattcttcttataaatctacatggcaacttggatgagcatcagtgtctggatgatgttggagttagctaaggagtgaaagagtttattgagtatattatgttaactttatttatgccagaagcccaacagtgacacagtgactctcaaagtagccttgtagtaaagaacatgctatgtataaaattaatgacctaaagacattaagatggctcctttggctcacaggttggtgctttcttgagacctgtaaaattgatgagattcattaagtgacccacaggaattagaaatgattcctacatgcaggacatataattacgatagaaataaacttcattgcccagcccatgggcctacttttccttccttaaagcctaccccagcacagtgtctctgactttatgattgtcctccactagtctgacaactgatgcagcactgccaactatgcatgactcctaacatctcttgcctctggaaaatatattttagctattttgtaggcccctggacttctttcctttgttactgctctgtccctctttgtctattctttatcttttcttgttttacttcccatactcaatcactatccaggctgacatttataaattgtattctacctttgcagcagtttatttgtatcataattatgatatacttgtcatctattatgttttatcacatttttatctatcctcaaagttgtgctacttaatggctgaaatcctgaaggacttagctctgtatcccctacatgtttgttgcatgaaattatattcactaatgccaaatgtttatttccaaagctttaaatatgttagaaaaggggcactggataaaataaaggacacaagtttaaataatctaagctagcgtatattaatttaatgctgtgttactcaagatgccaagattttatctctagctaagatatttttcccaaaggtcctaacatactgtattgtatacaactgtataagtatacatatttatatatacaactgaacacctctaattggatgtcttagaaatatcttaaaattagtatgccccaaactgatttctctttaaccttaaatcgccctcctccaatctattgttcaaatacccatttgttcaagttgggaagttatttttgttttcctcatgtgatttccccatatccaatccgtgatttccccatatccaaggcctatttgtacctccagtgtatattttcaaattgaaccacttcactctaattctatttccatcaccatgtgttacactagaaactgccccttatatagtctctgcattaaacctcgctttcctccaatccatacctcatcatcctcataaaatctcatctaaattagactatccctgcacattattttgtgtttgaaaatcctgcttgttgtatttaaagcactgttatgtcctaagtaacacaacatgaataaaataactaatagaattcacctcataaagttgttaggagaattaagttagcttaattaaaaaaaaaaaaaaaagcatcctactacttgactgtaagccccataagggcagggaccatatctgtattgctcacttttgcattgagagcatagtacagtgtctggcatatagttagccttaaataaataattgttacacaagtaaactaattgatgattgatgtactcctaacaccagaggagagtgaatatatagtccttagatttctatgaacatgactcaaataggctttaactagttttcatactttaaaattctgaaaaaatgtgtattttaattccatatacatggaattaaatatgtatataattaggatatgtttgttttaatatgaaatctcatttccccataacacttcatcttctcctaaaatttggatttcaggaaggcttgccatgtttctcctgtggctttgactactcctggcacattgtacctgcaacttccctgcctggccctcaccctgaggcacaaagactccagtttgaaaagtgtgagattaacaaatagattttgttctctttaccaaaattttattatatagcttattctatataatgacaaggtaactgcattttcttccaccagtaaatgttttccaaatatcaaataatttgctgcattcattttagcagagatcaactaaacttaccctcacattgatcactatcaatgtgaaacttagggaagcctacaatgtaaagactagatataattgttgactctaggttttaaaaaactatatgtagggattttttattttattgtagtgttactcaaataattttaggcactgggattagatttctttcagtaagttttattatatatatagcacaggctgtcattagcttagactggaaaaaccatgggtttctaagttttatgcatccaatagtcctataagataggcactcttgttgttcaagtgccaaaatcaagacttaataataatgaataatttttttagttataagcacttttgctcccaactcatttgtttctaaagttcttaakgctttacatacatgagtaacttgattctcactaaaaccatatgaagtaagtattactattgatatggtttggctgtgtccccgccaaatctcatcttgaattgtagttcccataatccccacgtgtcctgagagggaccagatggaggtaatttaatcatgggccggtttccccatcctgttctcatgatagtgagttagttcttatgagatctgatggttttataaggggcttccccctttgctggtctctcattcttctcctttctgccaccatgtgaagaaggacgtgtttgcttccccttctgccatgattgtaattttcctgaaggcctccccagccatcctgagctgtgagccaattaaatctcttttctttataagttaccaagtcttgggtatgacttttttaacagcatgagaatggattaatacaattataatcttgttgtagtcctttttactatgtttgctatttttccataagtttgaaattatttagaaataagaagtaaattttttattataaatatataggagcacaacacatattggaaaaattaagatataactgacatcacttgctgtgatgcatgacaactattaattttcccttggttttctaaggttattagaattttcaacattttaaactttccttattattaaagcaaaaactaaatatttgcaagctattccactaagacggcagtataattctcattataatgaatagtgtaaacaagaaaattcctatatgcctttctgattctaattttacagttaatttgttcatttattcacttggtcaacaaagagttaaataatatttatttagataattgaaagagttgatgatagaaaaataatttcatgttaataactagaagttagacttactttctggacagatgttagcattaacttgctgtatttttacagacatttggcaaaccagtagagataaggaaactgagtcccatggtggttaaataatgtgctcacaaaacaattagtttatggtagaattttctcttattgaaactttacataagcatctttgtgcttgtaaaagaaacaaaaattgagcttccagaaaatactaaaagccaaaagcatataaaagtcacaaaattatttttgataagaccaatgtgtttgagaaacgtagtaaaaccagataaaaggctaacaaattctgcaattgttagctggtttttgtttgttttaaataaacatgaagattgtcaagacaaggtttggtccatatagtagtcttctcacataacctattaatatttctctaagtattttaaaccargattgaagttggcactttgagactacatattgggatttctttgcacaattacctaaaaagtatcacaccaatcaaatacgagtattgattttactcctaaatgcacgtcctgctcttgtactctctacctttttcctgttggttggtgtcattagcagccagtttactgaccccaaatggatttcctgaccagctggttttaacagccctccccaatgcatcctgcttttgtggttttgtgtgtgctcagtttgggaacatgaggcagcaaacattaataagctcaaaaatagaaaagagatttatctatgcactcttttgtgatgcagcttaagtttggagataggtcagaatctgcaagactcactttaaaaattacaaaaattctcttctcaccaatattctttctgggctattggcaaaaatgaaaacgtgtgtatgaatgtgtgcacatgcgtagattcaatgactgctgcatatgtgaaaccatttcaatacttaagttttgtgtcctctgggattacaaaaataatatctctttttcttttgactaagtgctacagggaaatgaaattctattgtagcatttctttttaatttgagctgatactcacttttgacaatcaagttcatttcaagttgttgtgagctatctcttcatttattcaacaacaatttactgatcttctggaatgtctccttttttacttattggacatttttatttagataatataaaaaacttcatatgaggttaaatttaaatgctaataaaccatgtcatgtgttatagtccagcaaaaacttgctgatcaagcaaagtagaagtttcttgtactcaaagaactataccatattgaggaatataagatagattcaaactaaacaaataattaggtcaaaaggagaaaatactagatgctaatggaaaggtcttattttaaggaaatatagagaatgacaaagagaataattgctagataaatgttcttgaggtgaccaaatgaaatgtggtctaatcgcaagagcaagattggcttacatacgataaaatactttgtgcatagcatcagcagggaaagtagattaaagggattcagatgttagtccatggtaaatgtggtgggagccaagagcttatggatattcatttctgatagactttagttttgctgtgaaatgggaagcaagattttcagataagacacaggatggggaagaagatgttggggttttgaggaagaggtgaaggaatgaaattgtcacttagggcagtaggaatgtaaatgggctggagatcctgaacagtgataaaggctcagtcattcctgttggtattaaatttagaagagaccatacaatctgaatgtttttctccaggcttgttcacagattctagtgctgaggagctggactgaacaagtattttaattttgccaagaagaaagaggggaagatagtgaaagcttataaatgggatagatcataatataaggcacaagatctaagcagtataaggagggaaatgagtacatgagggtagtcagggacagataaattatggcagattgtaggtggttggagaattactgaaaataagtgctagtatcaaatcaaatgtttcactttttctagaaacaaaaaatttcaaggaattgagatggttaacttactttcattttgatagatgaaaaacacgcacaaacaagacctagtgggtgtttttgcctgttttgtttttattatctagctaacaggcatacagacagtttaagtgtttaagaggagtasagaaaataataaacatgaagaattattactgcagaatgtgggattgaacttgaggatttaataaaacccaaactgtatttcgagattaatctatcagttctgaaaagcacagttaggaatggacctacttagctagggatttatcctagcatctggactaattgctgtacttttacaacaagaattataattctcccccagtttttatcatagactatagctttattacagtttcaaggtagaaaataaaaagaaaaaaagaggcttcacaactctatgattgaattactggcagcatgttgtgccaagaatgcaattagtcaattgtttcagcataaatcctgtttgtaggccagtaagtaatgtaaaatgttaacattaaaaagtgttcttctttacactaaatattttaaaataatgttatttacgagacgatgcaaatagcattttatatggatgagctaacatggactatcaaaatgctacatttacattatgaaataggactctgaaacactgagaaaacacagccaaaatgcttgataaaagccacgaaataaattgaaatgtaccagatcagaaaagattatcaaatatgaacctaaaggaatacaaaactggaacttaactccaagggttatctcatctcctttctgcttctagtcagtagacgatacactgctggtcctagtccataaagtctaaatgagttaataaagatctcaatgagttaataacttacttatttaactattcatacatatatgaaacttggatataattcttagttcataaaggtctcaatgagttaataacctagttcataaaggtctcgatgagttaataacctaattatttaatcattgatacatgtatgaaacttggatataaatcttctgtaactttattactgatgtatgttgagttaaaatattgagtagtagagtagttattcctctaatgattttatgttgccctttatcgactgttgaaaagaaaactcaaactgaacacatttttttgtattgggaaatgcatataaccaaatatatttaccttattgaggaataacaggtcatgtgcctttgaaactatacattgactatgttagtcataaaaatgcatttttaaggctaagtccaactgatttttgtcatgaagtcaacaaaaatttacctctaatattttctgatcttaagttctattccaattcctttaacttataaataatataagacaagggtccccaaccgggccacacagtaggaggtgagctgtgggtgagcaagcaaagcttcaactgtatttacagccactcaccatgactcacattacaacctgagctctgtcccctgtgaaatcatcgtcagcattagattctcataggagcgtgcaccctattgtgaactgcgcatatgagggatctaggttgaacactccttgtgaggatctaatatctgatgatctgtcactgtctcctataacctcagatgggaccatctagctgcaggaaaacaagttcagggctcccactgattctacattatgatgagttgtattattatgtcattatatattacaatgtaataatgatagaaataaagtgcacaataaatgtaatgtgcttgaatcatccccaaaccacccctcaagccccaggcccatggaaaaactgtcttccacgaaatcggtccctggtgccaaaaaggttggagaccactcaaatttgacaattctaaacatgtatatgacattatcagtaatgaattgtgaagctgaaaaaaatattttccaaactatcaataacaaaagatatgtttaaactgatcatagtatggaagatactgaatttctgttttctctacagataatgatattacaaaatcatcttcatgtggagacatattaaaagagtatgcagccaaaagtatatagtaaaaagggtattatatcagagagctgaaaaataaagtattatctttttagattttatgattctgtggtatttatcagcttttttacaatttgtgatttgttgtaatgtatttattctaagtaaataattcactttcattcttaattttgtatttgtgatttttcttaaagagggagctccaaaattttataagcttaatgtgcaatcataatacaaattttcctgtctgcaacataaaaatttttaatgcctacagccaaaacagtttacagggtatgaccaagagctagaactaaactacttgacctttctcaaataaatgtgtctacagttttatgtttagaagagaatttgaactctaaaaaactctttttgtgggtattaacacgtatgaatctatcacacttagccagaacttttggctcagattttgggtgttgagccagacatcttgctggtggctccaactgagattaagtcagtccttactgaccatgtggtaaataagttgaggagataacccattccaaatctgaacatcaaagtacctcagacacatcgtggctagagattctttgcttaaaagcattggtagtccataaataatgattctcgggtaacaaaaaaatatgtaatcttagaatgggatgaaaatttaagatttcatttaatccaacattctaccaaatgaagaaattctatgtaaagtacaatattcctaagaaatgttcatctggccatcttttgcatgcaaactatcagtcaccaactgcttacaccttcacaaggaagccaacccatgatgaatagctttcactctgataaaattattttcttacattgagccaaaatctaagtcctattaattctgtgaatgtgctctggagtcaagctgagtaagtctacacatttattgacacttgtgacttcaaatatttgaagatatctttcatctccctgaagagccaatctctctacaaattaagtatctgtagctctaatttcattaaccattcccttcctatgtatattttcaaggaaactagaagtgtgataactacattatatatttatagaccactaatctagccagccagacaaattgaaaatttctctgaaaaattgaaaatatctaactcaaactccattaatagcaattaataatcagattttgcaaaactgcattaaagtctccacccctgccctctatttcattatcatattgccacacaccacacatactttttccagtttgttacttgtatttgatgtgtaagctgataacaacattcagttatttcaaaatttccaaatcataagaagttaggaaaatgaaaaaatattacttttagtggtaataattacatattatctttgtcattcaaattaaagtaaaattggggggaggagccaagatggccgaataggaacagctccagtctacagctcccagcgtgagcgacacagaagacagtgatttctgcatttccatctgaggtaccaggttcatctcactagggagtgccaagacggtgggcgcaggtcagtgggtgcacgcaccatgcacgagccgaagcagggcgaggcattgcctcactcgggaagtgcaaggggtcagggagttccctttcctagtcaaagaaaggggtgacggatggcacctggaaaatcgggtcactcccacctgaatactgcgcttttccgacgggcttaaaaaacggcgcaccacgagattatatcccgcacgtggctcggagggtcctatgcccaaggagtcttgctgattcctagcacagcagtctgagatcaaactgcaaggcagcagcgaggctgggggaggggcgcccgccattgcccaggcttgcttaggtaaacaaagcaccctagaagctccaactgggtggagcccaccacagctcaaggaggcctgcctgcctctggaggctccacctctgggggcagggcacagacaaacaaaaagccagcagtaacctctgcagacttaaatgtccctgtctgacagctttgaagagagcagtggatctcccagcatacagctggagatctgagaaggggcagactgcctcctcaagtgggtccctgacccctgacccccgagcagcctaactgggaggcaccgccccagcaggggcacactgaaacctcacacggcagggtactccaacagaccttcagctgagggtcctgtctgttagaaggaaaactaacaaacagaaaggacatccacaccaaaaacccatctgtacatcaccatcatcaaagaccaaaagtagataaaaccacaaagatggggaaaaaacagaacagaaaaaccggaaactctaaaaagcagagcgcctctcctcctccaaaggaactcagttcctcaccagcaacggaacaaagctggatggagaatgactttgacgagctgagagaagaaggcttcagacgatcaaattactgagctatgggaggacattcaaacaaaaggcaaagaagttgaaaactttgaaaaaaatttagaagaatgtataactagaataactaatacagagaagtgcttaaaggagctgatggagctgaaaaccaaggctcgagaactacatgaagaatgcagaagcctcaggagccgatacgatcaactggaagaaagggtatcagcaatggaagatgaaatgaatgaaatgaagcaagaagggaagtttagagaaaaaagaataaaaagaaatgaacaaagcttccaagaaatatgggactatgtgaaaagaccaaatctacgtctgattggtgtacctgaaagtgatggggagaatggaaccaaggtggaaaacactctgcaggatattatccaggagaacttccccartctagcaaggcaggccaacgttcacattcaggaaacacagagaatgccacaaagatactcctcgagaagagcaactccaaaacacataattgtcagattcaccaaagttgaaataaaggaaaaaatgttaagggcagccagagagaaaggtcgggttacccacaaagggaagcccatcagactaacagtggatctctcagcagaaaccctacaagccagaagagagtgggggccaatattcaacattcttaaagaaaagaattttcaacccagaacttcatatccagccaaactaagcttcataagtgaaggagaaataaaatactttacagacaagcaaatgctgagagattttgtcccaccaggcctgccctaaaagagctcctgaaggaagcgctaaacatggaaaggaacaaccagtaccagccactgcaaaatcatgccaaaatgtaaagaccaccgagactaggaagaaactgcatcaactaacgagcaaaatcaccagctaacatcataatgacaggatcaaattcacacataacaatattaactttaaatgtaaatggactagatgctccaattaaaagacacagactggcaaattggataaagagtcaagacccaacagtgtgctgtattcaggaaacccatctcacgtgcagagacacacataggctcaaaataaaaggatggaggaagatctaccaagccaatggaaaacaaaaaaaggcaggggttgtaatcctagtctctgataaaacagattttaaaccaacaaagatgaaaagagacaaagaaggccattacataatggtaaagtgatcaattcaacaagaagagctaactatcctaaatatatatgcacccaatacaggagcacccagattcataaagcaagtcctgagtgacctacaaagagacttagactcccacacattaataatgggagactttaacaccccactgtcaacattagacagatcaacgagacagaaggtcaacaaggatacccaggaattgaactcagctctgcaccaagcggacctaatagacatctacagaactcaccacccctaatcaacagaatatacattttttcagcaccacaccacacctactccaaaattgaccatatacttggaagtaaagctgtcctcagcaaatgtaaaagaacagaaattataacaaactatctctcagaccacagtgcaatcaaactagaactcaggattaagaatctcactcaaaaccactcaactacatggaaactgaacaacctgctcctgaatgactactgggtacataacgaaatgaaggcagaaataaagatgttctttgaaaccaacgagaacaaagacacaacataccagaatctctgggatgcattcaaagcagtgtgtagagggaaatttatagcactaaatgcccacaagagaaagcaggaaagatccaaaattgacaccctaacatcacaattaaaacaactagaaaagcaagagcaaacacattcaaaagctagcagaaggcaagaaataactaaaatcagagcagaactgaaggaaatagagacacaaaaaacccttcaaaaaattaatgaatccaggagctggttttttgaaaggatcaacaaaattnnnnnnnnnnnnnnnnnnnnnnnnnnnnnnnnnnnnnnnnnnnnnnnnnnnnnnnnnnnnnnnnnnnnnnnnnnnnnnnnnnnnnnnnnnnnnnnnnnnnnnnnnnnnnnnnnnnnnnnnnnnnnnnnnnnnnnnnnnnnnnnnnnnnnnnnnnnnnnnnnnnnnnnnnnnnnnnnnnnnnnnnnnnnnnnnnnnnnnnnnnnnnnnnnnnnnnnnnnnnnnnnnnnnnnnnnnnnnnnnnnnnnnnnnnnnnnnnnnnnnnnnnnnnnnnnnnnnnnnnnnnnnnnnnnnnnnnnnnnnnnnnnnnnnnnnnnnnnnnnnnnnnnnnnnnnnnnnnnnnnnnnnnnnnnnnnnnnnnnnnnnnnnnnnnnnnnnnnnnnnnnnnnnnnnnnnnnnnnnnnnnnnnnnnnnnnnnnnnnnnnnnnnnnnnnnnnnnnnnnnnnnnnnnnnnnnnnnnnnnnnnnnnnnnnnnnnnnnnnnnnnnnnnnnnnnnnnnnnnnnnnnnnnnnnnnnnnnnnnnnnnnnnnnnnnnnnnnnnnnnnnnnnnnnnnnnnnnnnnnnnnnnnnnnnnnnnnnnnnnnnnnnnnnnnnnnnnnnnnnnnnnnnnnnnnnnnnnnnnnnnnnnnnnnnnnnnnnnnnnnnnnnnnnnnnnnnnnnnnnnnnnnnnnnnnnnnnnnnnnnnnnnnnnnnnnnnnnnnnnnnnnnnnnnnnnnnnnnnnnnnnnnnnnnnnnnnnnnnnnnnnnnnnnnnnnnnnnnnnnnnnnnnnnnnnnnnnnnnnnnnnnnnnnnnnnnnnnnnnnnnnnnnnnnnnnnnnnnnnnnnnnnnnnnnnnnnnnnnnnnnnnnnnnnnnnnnnnnnnnnnnnnnnnnnnnnnnnnnnnnnnnnnnnnnnnnnnnnnnnnnnnnnnnnnnnnnnnnnnnnnnnnnnnnnnnnnnnnnnnnnnnnnnnnnnnnnnnnnnnnnnnnnnnnnnnnnnnnnnnnnnnnnnnnnnnnnnnnnnnnnnnnnnnnnnnnnnnnnnnnnnnnnnnnnnnnnnnnnnnnnnnnnnnnnnnnnnnnnnnnnnnnnnnnnnnnnnnnnnnnnnnnnnnnnnnnnnnnnnnnnnnnnnnnnnnnnnnnnnnnnnnnnnnnnnnnnnnnnnnnnnnnnnnnnnnnnnnnnnnnnnnnnnnnnnnnnnnnnnnnnnnnnnnnnnnnnnnnnnnnnnnnnnnnnnnnnnnnnnnnnnnnnnnnnnnnnnnnnnnnnnnnnnnnnnnnnnnnnnnnnnnnnnnnnnnnnnnnnnnnnnnnnnnnnnnnnnnnnnnnnnnnnnnnnnnnnnnnnnnnnnnnnnnnnnnnnnnnnnnnnnnnnnnnnnnnnnnnnnnnnnnnnnnnnnnnnnnnnnnnnnnnnnnnnnnnnnnnnnnnnnnnnnnnnnnnnnnnnnnnnnnnnnnnnnnnnnnnnnnnnnnnnnnnnnnnnnnnnnnnnnnnnnnnnnnnnnnnnnnnnnnnnnnnnnnnnnnnnnnnnnnnnnnnnnnnnnnnnnnnnnnnnnnnnnnnnnnnnnnnnnnnnnnnnnnnnagcccgcatcgccaagtcaatcctaagccaaaagaacaaagctggaggcatcacactacctaacttcaaactatactacaaggctacagtaaccaaaacagcatgttactggtaccaaaacagagatgtagatcaatggaacagaacagagccctcagaaataacgccgcatatctacaactatctgatctttgacaaacctgagaaaaacaagcaatggggaaaggattccctatttaataaatggtgctgggaaaactggctagccatatgtagaaagctgaaactggatcccttccttacaccttatacaaaagtcaattcaagatggattaaagacttaaacgttagacctaaaaccataaaaaccctagaagaaaaccaaggcattaccattcaggacataggcatgggcaaggatttcatgtctaaaacatcaaaagcaatggcaacaaaagacaaaattgacaaatgggatctaattaaactaaagagcttctgcacagcaaaagaaactaccatcagagtagcaggcaacatacaaaatgggagaaaattttctcaacctactcatctgacaaagggctaatatccagaatctacaatgaactcaaacaaatttacaagaaaaaaacaaacaaccccatcaaaaagtgggcgaaggacatgaacagacacttctcaaaagaagacatttatgcagccaaaagacacatgaaaaaatgctcatcatcactggccatcagagaaatgcaaatcaaaaccacaatgagataccatctcacaccagttagaatggcaatcattaaaaagtcaggaaacaacaggtgctggagaggatgtggagaaataggaacacttttacactgttggtgggactgtaaagtagttcagccattgtggaagtcagtgtggcgactcctcagggatctagaactagaaataccatttgacacagccatcccattactgggtatatgcccaaaggactataaatcatgctgctataaagacacatgcacacgtatgtttattgcggcactattcacaatagcaaagacttggaaccaacccaaatgtccaacaatgatagactggattaagaaaatgtggcacatatacaccatggaatactatgcagccataaaaaatgatgagttcatgtcctttgtagggacatggatgaaattggaaatcatcattcacagtaaactattgcgaggacaaaaaaccaaacaccgcatgttctcactcatgggtgggaattgaacaatgagaacacatggacacaggaaggggaacatcacactctggggactattgtggggtggggggaggggggagggatagcactgggagatatacccaatgctagatgacgagttagtgggtgcagcacaccagcatggcacatgtatacatatgtaactaacctgcacaatgtgcacatgtaccctaaaacttaaagtataataataaaaaaaaaaattaaaggaaatttatgtatgcattctgatttcaaccagctacaaattacacatacatgtgtatgcacaggcaggtgtgcacaaatacacacacacacacgcatgcacgcataactattggctgctagagacttagtaattacttcccaggctcccaagttcagtttcttactagatgcacaataaatactttgcaaagtgtcaaaagcactgtgtttgtcaacagcaattttcaaaaaggaaggaaacataaattatgcatttctctaaatagcaaataatctacatatccagactgaatttttagctagaaagaccattaatcattgaaccaatacccaataccctcattttatttagacatgaggaaattaaggcctaaaaatacaattaacttgttcaaagtcattcagcttatttgtgacttaggttttaaaaggccttgtaccatgttctaaagagttcacccacaccacaacatacaagtcaagctcagaatgattcattaccttamagaaaggatatagtttacaaaaacatgacactggtatcttacaaaaaatattaaaatgatagtcctatggtgaacatgagatagttaactgctgaacaaggcacaaagagctacagcaaatgcctcaaatctagtgacccaagataaccccctgagcttttttaacctgaggaaattgtgtcatgaagtccacatctttattcagtgtgggggagtattctgtcttcagtttctacaccactggtagcttactctttctagccagaagaagtttaagacaccattctcttattatagcaaagactatcagttatagaatgcaagaaaaagaaattaacattgcgctatagcatcttaaaacagaaagaaaagccattcctggggtaataataatataggcctggatattttacagagtctatgggagaaaaagctctgtagaatttattgatagagaatacacttttaaaaatacacattgagcaaatgtataggctaaatctaaaatgtagcctataagtttctttatgtgctaaaggctagaattttacattactaatatgtatgacagtcctatcttagtccattttgtgttgctataatagaacacctgagactgggtaattgaaaagaagtttatttagctcatggttctgcaggctgagaagttccagggcatggccctggcttgtggcaagrgcttttgtgctgtgtcacaacatggcagagaccatcaaagggaaagtgaacatgtgcaaagaggaggaaaactgaggggcatcctggctttaaaacgacccactttcttgggaactgatctattcctgcaagaattaatccaatctctcaagagcaaaaattcactcactactgtaagaactgcaccaagaagttaatgagggatccaccgccaaacctaaacacttcccactaggccccacatcccaacaaccacacaccagggatcaaatttcaacatgagttttggtgggaaaaacaaaacatattcaaaccacagcaagtacctacctcagagaggtatgctaatgtttatgcatcggtagggtttgctaaacgaagaaaactggagctgcgttaatggacaagccttggaagttaaagaatgaataaagagagactgccagagagacacatgtttatatttcaaagcaggtgaaacccagagctatccatttacattctagaggattcattcatcattcattcattcattcaatgaaggtttttttttccagtatctcttatgttcaagacactgtgataggtcttgggaaaacagggtgagggagacaaacagggtgattgcatcattctagcaagacactagttatttcatttgtcatataaattatgttagattgttttatttcttgagaagctattggctctaatccatataatgcagctggctgggacacaatttagaaggatcaagaagtaaaacccacactgatttgaagcaaagcccatacatcaaagtcagatgaacaaggagagggactggatatcagttaccagatccagaaatggaagatttgctatttcagagtctaatggtctcccaagatccattccctccctcctcatggttataagaacttccctagttttacacagacacatggcattcagctaactatatatttccagctttccttacagctagattaggttcaagacaatgggtgagggcagaagagaaatattcaacttctaggtcatatctgtattagtccattctcatgctgctatgaggaaatacctgatactgggtaatttataaaggaaagaggtttaattgactcgcagttccacattgttggggaggtctcaggaaacttacaatcatggcagaaggcaaaggagaagcaggcacattcttcatagggtggcaggacggagtgagtgcaagcagaagaaatgccagatgcttgtaaaaccaccagatctcctgagacttaatcactatcacaagaacagcacgggggaaaatgtccccatgatccaatgacctccatctggtcccacccttgacatgtggggattatggggattataattcaagatgagattttgggtggagacacagctaaaccatatcaatatccttatagaaagacagcttgctctccacttgctttttttctctttccataaactggaatgtgaccctagtggctttggtcacatggacagaacaacactgtcaggattcctgtgtttctgtgaaacagaattgtcctattccctggaactatgcaggaactcagacttcagtggaagagagaagkgttcaagtcactgtactatgtgtctctttgttagaatatttcagagtatattgtaatatagatacccacaaccagattctatttactagaccaaaacttggaaagagagtgaggaccatgtcttcttttgctcatgacagtagctcaagcatacaacacagtatctggaacatattaagtgcttcattaaaatgtattaaatggaatggaatataatgaaatagatgtgattcccaacctcaaggaaatcattgcatatgaggaaatacacatgaaataaagaatgactttcttttacaacatcttattaatacacattctttcaattctccagacatatattttatgagaaaaaaaatctcacatgggcaaaagctaaaattcctctggcatgctttttgataaccaagtagaatagttatcagatcctaagcttattagagaataagggtgaaaacagcatagtttcaattaatcatactaaattgctaaatattttttgaatgcatacaagaggagttagcagtattcttgtgagaaggtgccaaattactggtatcttttttggggggtgtgtttaagggggtaattttgatttctgcacacttaacacatatgtgtatatagccacagcacatgcacttataaattgatttaagtaaaacattaaaagatcttgtgttccagttaagtaggggttgttaaaaacaattgtttttataatacagttattttaaagtatttttaaatagaaattttacaagattatttgaatccagaaatattactttataagactggaattttacattattaatgtaaataataatacctacatcatagagatattttaatatttctgcattgtcagggctctttgagcagataaagcaagaatctggttaaaggacaagtcttggaagttaaagagtatagaaraacctctagagaaaaaattgttttcatttcaaagtgggtgaatcccagagcatacatttacattccaaatgattgtaaaatagggactttctctttctcctgccagagaatacttactttaggaaaattagatctctctccctctctttccttctctctctcttcttagcaaggtggcagctgtatagcaggccttatataaactctgagattcataatttcttattgataatgcaaaaatccctttgcatgtgtaggataacatctgtcttttataatattgcactgaatggagtgaaggagacatgggtaactgatataattattgccttgagtaataatactctgccactgatccagaaactccatgtttgctttcaggacaaaaataaaggaatacaaatgttaaaaacttacagtgagctgctaaataagtacaactctatgaacacaattggataaatttgcacactatggacacagtagctaagtctaagtttctattccctacccggtaatatgtttaccaaaaaaaacccaaaaaaacaaaaaagatatcaatgataaagcacttctaccaattagttttatcctccttaaaatacaacgaagcagaaaagtggcaattttacaaaaattactctgggtccagtgatcttttctagtatttttttctacttttcctttcaattgctttttcctatgtagcacaagggtcaaaagatttcttggtccattcaaatttctatctctagccgggcgtggtggcgcgcgcctgtagtcccagctacacgggaggctgaggcaggagaatggcgtgaacccgggaggcggagcttgcagtgagccgagatcgcgccactgcactccagcctgggctacagagcgagacaccgtctcaaaaaaaaaaaaaaaaaaaaaaaatttctatctctatttgatgattttagaaaattagtgatgaaatattatacagcataccaaacatgtgttattgtaagcaaaaatagtatttctcaatgtttctgtttcacaaagaattactgcttcttttcaaagctacttctatatgtaccatcctgcttcctccgaaattgttctctaacaattatttttggtttcttgagtctctccatttctctctgggaatctctcagctgcctgcttgatgttcctacatctctctgtctgtgtgttctctcttcctcttcctcattgtgtatctgtcatctatttctctctttcttgctatttctgtgtatctttcttcttctgtctctctgtctcattctcctcttttactctgtctcagagcctctctctctttctgtttttctttccacatgccttacctgtaacatccagcatttcctctctaatagagtaaacacactctcctgccattaaaaaaaaatgtagaccttctttacctttgaggttgcaagctattaacacccaagagctcttctttgcaccaccaatttcacagaaaaggagtccgtctaagaactgggaaaatacagttgaaaaactaagaagtaaaccttgaagaggacagtaccaaagtgccaaatcaaataagatggagaccagagactacttgctgcatttagcattttggttggtttactggtaatttagcaagagcagtttcaacagagtagagtgcatagaaatggattccagtgagctgagagtgaataacagatgtagaaaggaaaatcagaactttaactccaatatttgttaagtgcctactctgcaaggaactatgttagagttagaaattcaactgaaggcaagcctgacagtcttccttatggagcttacagtctagtgggaaatggacaatgtaaggagacaatgtaaaaataatgtgatgatgctaataatcctgtgaaaatacaaggttatgtagaagctggtcagaggggtactggcactggatttaggaggatgatagacattttagagagggcaaagactgcaaaatcctagtctttttccttttcttgggcacacagctcaactagatgacatttccagcctcctgtgcagttaggttatagccatttaacagagttctagcaggtggaatgtgagcaaaagggaaacgcaccacttccaggcctggcccacagaagtagctccatgcttttggctgtttggagcccttacacgttacaagatgaatatgccagagctttcatcagtctctctcctcagctcactgaacagaaccaaaatctttcccctatctacttccacctccacctgataaatgagaagaacacttctattatgtttgagcttctatcattttctgttggtcaatttgtcacagcagccaaaattatcctaaccaatgtatatgaactgaaggatgtgaagaaactagcccaagaaaagtgatggcatttatgtattacatcaatctcttgattagatggcaggatctttggtcctttctattcaactttatatcactatgacatagcccagtgtctaatatgagtcagtaactcaataaaaacccactgaaggaaagtgcatttatgagcgatcttagtatgggattaaattttttattttgttttgattaatatatttttctttttttcttcttcttcttattttttttttgagacagtgtctcgctctgtcagccaggctggagtgcagtagcatgatcatggctcacygcaacctccgcctcctgggtacaagggattctcccacctcagccgcaggagtcgctgacaccacaggcacatgccaccatgcctggctaatttttgtttttgttggtagagacggggttttgccatgttgctcaggctggtctcaaactcctccagtcttaagcgatctgcctgcctcagcctcccaaatgtctttttcctttatttcagtttacaaacaatgaatctagacaaccaccatcatttgcatttttttcatttcttcattctcctttaaatctagtaaagctcctcatgtgccaggcactaataaatatacctccaatactgagtttagctatatcaatgacattcatgtcttatttcccaaacttatgatactaatgttatacattctgtaaggataccataaatattaacttatagtgactatttatctctcttacattgacaccaaaatatgaaagaatacttttagtaaatttgtatcaagtcctcagattgtactatttaatgattcttttaaaatttgccatatatctgtgatatttattatcaaatcagatataaattggtatagtatttaataaatgatttgaaaaatcaattttcatattactaactcattcttcagattagtcaaaggcataatttaagagaaagttagacttattctaataattgaattgatgtttgcatacaacagtatctaattcctacaggtgatgctagcctccgttattagtacattttatgatttgatgtattactcctgaaattagtgggtcatactatttatctgatacatactatacacacattcaaacatacacattacattattgataaatttaatagttaacattatgcaacaggcactttttgaaatcttcagactataaggatgagaaagtcagaatccttgtcccaaggagatcatcatctagcagcagacacagattttaatagcaataaaaatataaagagttccaaaagagatgtaagtataacatgtcataataatacagatgagagggcaattacttttgctgagcagtagaaaaggtgacttgagacttcgcagaaaaggtgaccccataactgaaatgtgaaaatgagagcaatttcccagggattcccagggaaaatggcaagcatgtcaagagcattcaggtgaaagaaaatagcttcatataaatacccgaagcataaaagtggtcagcacatttgagaacaatgactagtatgcccttccaaaatatttgaattttattgtgtaagcaactttacccataagcagtatggaagacggactaggagaagaagagataaggagggggaaagggatatcagttaactatccatgatgatagcccagcggggtatgatgaagacctggaaaaggcagttgaaatggaaggaagggatatttcagaaatagaaacaattagactcaatctggaaagagaaaggaagaaactatgactccgtaatttttaactgaggcaactgaaggaatagcaatcctcaaataagaaatacatcgtgaagggcaagtttgagtagatgatcataaaattatattgggcatgctgaatttgagatatctgtggaggaatctgaaggagataagagtacagaaataattcatggaccaacggcttagaagtaaagtacagccaaaagacagaagacatcaggcattgaactgtgaaaaacgcaagcacaaaggaggaagaacacttttaaaatacaaatatttgaagggtagagacagatgatcaataaaaggttagataatgattgaccatagaggtaggagggcaccaggaaacagttggcttcaacctagtctaatagcattaacattcaaccaccagccaataatattcatgacatatgtgctagattcattccattgttcccaaatttctcccactttgatccagttctggcctggttcttggcttttgccttccttctctcatttagaatctcattctcattaggcttgaaaattagtacctgtctttctgactccttttgctctggccaccaattcaaatcttggcctcagtggctttggattggattttatttgtttatttatttatttattttttgatggagtttcattcttccacccaggctggagtgaagtgccgcaatctcggctcactgcagcctccgccccccaggttcaagcgattctcccgcctcagccccacaagtagctgggattataggcacccaccaccacgcctggctaatttttgtattttttagtagaaacaggtttcgccatgatagccaggctggtcttgaacacccgacctcaggtgatacacccacctcggcctgccaaagtgctagcattacaggcacgagtcaccgcacccaacctggattggattattttactggcattctgaacattgaactagaaaagacagttccctaatcaaaccaacctctgagaacctggccataagccaggccagctacaataatgaaaactaacaggcactgactgctaagtaaatccaggcactgtattaactaatttagtttgctttaacagcaattctgtgcatacatagttatttcttccagccccatcttcagataaagttcctgagatcccacacaggtaagagggagccaggatcttagagtctgcactctaaccacggcctttcacagccctcagtatgttggccagtccatcccattccaaacgagccccagatttttaaaattcttagcttaaaattcaaaagaagatagaattcaagaagaattggatatttaacctttccagatattacagaaaagtaaaaaaaamcgggagccaaagaattcataattgcmaagatgtggaaccaacgtaagtgcccactgactgatgggtagataaagaaaatgtggtatatacaccatggaataccactcagccattaaaaggaatgaaatgtcttttgcagcaacttcaatggggctgaaggccattattctaagtgaagtaacataggaatgttaaaccaaatattgtatgttcttactcaaaagtggaagctaagctgtgagtacacaaaggcatacagcgtgatacaatggacttcagagactcaggagaaaaagggtaagagggggtcaagggataaaaaactacacattaggtaacatgtacaccacttgggtgatgggtgcactaaaatctcagaattcacctctatataattcatccatataacaaaaaaatctcacttgtacttcacaagccattgaaataaaaataataataataaaatgagagctgaaaaagaagccaatggattagccacttaggaggtcaatggttgcctccccagagcatcctcctccacaggggtaatgtgatagaattggaactgcttggccaggcgcggtggctcacgcctgtaatctcagcactttgggaggccgagacgggcagatcacgaggtcaggagatcgagaccatcctggctaacacggtgaaaccccgtctctactaaaaacacaaaaaaattagcagggcgtggcagtgggctcctgtagtcccagctactcagtaggctgaggcaggagaatggcaagaaccagggaggtggagcttgcagtgagccaagatcgcactactgcactccagcctgggcgacagagtgagactccgtctcaaaaaaaagaattggaactgcttgtaaaatgagaactaaaaaggtatgtggaggcattaacttcagactatcaagaagtgtgatgatgagggaaggagagaaagaggggttgtttgaggggtaggcacattctaaataactttttttgtagatgagaatttggtgagaggtcgtccataggcaggggagaagaagcatcagtcaatgcaagacagacaaaaactaataggtcccaacgggtggagatggaatcaagaacacaggtgggtggccagcctgacggtgtccctcatgaaggaactaactgggcagggaagactggagatgacaaagagttaggagattgaaggggaaattgagagtttacatgcctgagtccatctgttttctcagggaagtaggaggtaagaccttctgtaaagaatgttgctggtgaagtggaattgggasctttcatgaaagttgtaaaaggattgtaacagccgccttgggaaatggctagggagctgacgagacatatatgcaaaatggttgctgagcaggaacaagggcccagctgaggatgaagctcataaacttataatggaggaaatcagtgtgattatatcattcctccagctgggctcagccttccagcaggagcagagaaaacagccacttgggctgatccggatgagagtttggaaaacaaagcttcagaggacaaggaggtgagaaaataaagagcatctgagagtgtctgaaatcactcttcatggttcctggctagatggtgaaaaagttaatccagcaggagtgtgacaggttcagagaacagggatgccttgaaagagagatgtccataaaaagatgtagggagggaaaagggatgagagaagcagggtcactgaagagaagggagaatgttaacatgacaacaatttggcttataattttcctctgctccctgattatttgcattttcttcaggtgtcttaaatcatcatgccagtgaattatttaacatcccagatgtattagatcttctgtaaactaagtattttgcaacttatatttttgctagttaaactgagtttctgtcatggtcacttcaaatctaaagttcatttaatatttgctgccagcccacctggtgtgggtgtgagaaaaagcagctcctcgaggcggaggtgaccacgtatcagagtccacgggtagagcccaggctggagttccgcccgtacaagtccctcatctcagtcctcttgtgcagggctcacacttcccatccatattctgatgtccttggtgaacccaaaggaaaacttttaaaaatatatttggggttgcatctccctggattgagagtgaaatcatgattttattaatggacatattaaaatctgtgaaaaatgtttttaatgataaaaaataaagaagaatagaaatgaagaagagcacagcacaagaaccctaaggtacatgtatttaaataaatgtcaaatgaagtgactgagtaccttccctgatgataatttagactctcctgtcatacacagaagcttaaaatgcaatggctcaatgctggattcataactttggacacgtaaagtgaaacttacttgacaaggtcaaatattttaaataaatttaaattccatcacaggagaggcagagagcgcacaaagggaatgatagggctgtcactccatcttccaaactaaaagatgtcttcctttgtcctcagcccccacattcaaatccatgattagcaaagacagctcagactctagaaacagaaagtaatgctgtaacaggccagaagcatgacttagtagagagaagggccaactaccttccctctgagctgtataaaaagctcctctaagccttggtatttttcgttacaaaatttataacacatacctactatcttttttaaaaaaaacaaagccagcttatctacagatggaatgcacaggtctcttagagcagtaaatgagaatgcttcccagaatctgagggacagccattgccayctgttatttagcataatttaattcaactgatcaaactgcctcctttctgtgaggaattttggcttttccaagatgcactggatggtgctagattaacttgttagatatttatatttgggctgtaggttactttttaacataaccatggatacattttaatcctaacaatcaggattaatctgaaaaaatagtatatggactataaactgactttaattccacaatgaaaatattcactgatgccctaaaagacaagttctaaaaaaaataagaaccagcatcacttaactatttaatctttaggagggaagttgaaactgaaaaataaataatgtatttactaattatttcttctaatagggacattagtatttatatcaacaaatgatttacagaaaagactcaatcatctgtaagtaaataattatctatggaaatttaaatgactatttttcaaatctgccaagaaaagtgctcccaggctacaaactcttgctgtcagtttttactacagggatgtaagttaattacaaattaactgaagaatgacagaattcagaataaatgtccacaaaacattccaaagccaaaaataatttttaagattatgaattaccaaccccttcagcattagttatcacatcaacaattaaatatttatacataaggacacacatataatttatggttgacacatagaaatgtgggtattacatatatgtataattgttttttctgtaaatatactgccatcaaacttctacacattgcttttcaaaacaccacattttcttsgtaaaggaaaaaaaatgacatttaccagtcttattgatcaattgagaaatatggtaaatatgtgtggcctgtactgtgcaaagaggcctaggagaacagcaaaatgtggaagaatacagtgtctaattctgtcctattctgctgggccatcaccaccttaaacctgctacatatataaaagacagtattttgaagctcagtgttccttatttcaaggaggttgcgattaagggtccaaaattttaaaattaatggaaaatgccagggatgaagaatatgctgatattacagatgtacatgagaggataatcatttccactggtcaggggctaaatggaaatgtgtgattaaatccgtgtcatttagcgtaatggctcattagaaactcttaagagaaatgtgccacaagagcttgagtaatgtttgcagaaacaaaataaaatcatctggggcccactgatcaagtctgttttgtattattgaggaagagtgatgctttggaaaacctctggatgatcttacccatctctcttcatgtcaccaacctcataaccataagatgctcccatccatattctgtgcttaaagatccttagctggccctgtgaaattgtgctgcagatttaaaaactaatgtttacaactaacatattgtaaataatattggttaactgaagccctggatgaaagataggagaaaaaaaaagttcaaatgcttctctgccagcctccatgatggagtattagtaaagttattttattaaatcccatgctcttaactgtaatatgtatacaatatacacagtgtgatgatgaagcaactgttaccatcaggcattttcctaggttacatgtgctgacctttacaattttccattgttaagaaaaagtatcataagccttcctttcttgaatctactaaaagtcacgayaatttcagatttataaagcaattttatgtatctagcttgttttgtactctcctgagtcctatgagaaaatccattttacagatgagtaaacctagattctgaaagactgaaagttaaaagctatcactgataaaccacaatgggaaaaaaaatattttttsggcataagtttatttgtaactataattactaaagatgataatataaggtatcttaaagtactgacaattgaatctataatatttaaatatgcaaattttaacagaatcctgagaacttcatcaatttttctcgtaatttttatcagcaagaaatatatattaaatacctttctgtcatgcaccctaacatggccaactttcaatcacttttgttctggtgcatatttaccaaccctttagggaagatgttcccaaccttttccaatcattttgtggatggatgttattagttcaagggtgattaaatcagagtgcggatggagtaaatcaaattcatcatcaaaatggaaaaagctgctaaacacatcagagtaaatagtgtctttttttaaatgaaaatgagcacatttaaaagggagaactttttttcaaagaagaatatgtgaacacctgagtttctgctgaacatgcctggcaatttatatcttaaattgtttatctgcatagtcttgttactgtagaccacttattgaaggacattcaccagaaatgattttttcaaatttttgtccaaaacaaaaagatatatatcctatcatatatataatatttaaaatgacatatatgatacctaaccaattaagataaactaacccaccggattaatatgtatgtatatataatatataataatcgtatattggtattacatattcattacagtagtacccccttgtctgaggcagatacattccaagacccccagtggatgtctgaaactggataatagtgaactctatatatactatgttttttcctacacatatatgcctatgataaagtgtaatttataaattaagcacggtaggggattcacaagaataataaatagaacaactgcaataacatactgttcaaatttcataaatagaagattcattctttctgaagacattagcaatctcagcataagatttttgttctttcctcattaagttgggaactttcactttttaacttaaaggaagcactttactgcatccaaattgccagcatcactacttttgtattttggagccgttattaattaaaataagaaaaatttgaacacaagcactgcaatattgcaacagttgctctgataactgagactgccactaagtgaccaacaggtgtatcatagacagcctggatatgctacacaaagggatgagtcacatccccagaaggatgggatgagatagagtgagacagggcaagatttcagaatggtgtacaatttaaaacttacaaagtatttctggaatttttcatttaatattttcgtatcctagttgatcatgtgtaactgaaaccacagaaagctaaaccacaaatacgggtacgtatacatatacatggatatatattccatttaagataaactaatccattggattattcccagggcatcttataactatgattatttcaactttaattaaatgccatcctctagctccaagtggaatttttttaaaggttggttaacataaaatgtatcatcttatttttaaatacttaattttcaaggtacagatattttacaattctatgattttatcttagaattgtattcgtcttacagttttctgtaaatatcctgcctaacatcatcttgcaaaattgaattgtgaccacttacaagctgatggtgtgtaacaccaccaagacagaaataatatggcttcacttcctttcatttaaaaccatacaatcagctcttttcagttaaagagcagaccagccctggcaagctgtctctgctaaacttagttgttaacttttgccaccactttggctgtccatttgaatcatctttagagagagaaatgagaaagtagaaaatgttccttggcttggcaagaaacagcaggatagatgtgagtgaaaacaatgaaacccctactgttgatttcttcccatgcttgtttttgttccggagttggtaacagaaaaaacactaatgagaccctcttctgatgattggaaaaatgttctgaatgagttgctcttctggatcctgaccactgttgctaaaaaytcatcttgcagattattctacaattccccacctacgaggctgtagagaacttctcagctcacacagtgaagcagaataattctcattgtttctgcttcaacagataatcttttctttccctcaaaggcagaaggaaaattttcatttttttccaatatttcacagtagcttttgtttaatcatgctcaacattgacatttttgacctaccatcaatggtaaatgaaatatagtatagtaataacttcttttgaagatattttagtattaccttttcccccatgctgataagtaagaaataaaacagtccaaagtgggggaaaagattgtaaaaacccaataacaagtttaaggtaaccagaacagtagaaatgagactccatttcaaacaagttaggaggatggagattctatgacataataggtatccatatgccaatacttatgcttgaaaagcagaatttctcttgcatacacatgcaaaattacatgcggtgacacatggacaaaaatgatgatatctgttttgtaattttttcctccatgttgtatttctgctccaaagaaaataaggcaaaataaattaatgatatgtttcagtttgtctgtccatcagagatctcagatatgcccagtttccagtttgcaccagtcactatactcaggattgcatggaacattcaagatattatgtactctgacagttgtgcacatagaaaaggtctgtggatttcagaagcatgtctgggaatggatgcatttgacataagagaggcagatgagctcacagttgacaaaggcaatataaaaaattttgcagtatctatatctaagccaaagataacttccaccctatagaaaggagaaatagaggcccaaaatatcctataaaacatactacaaaattattagaaaatgttcaaatctttgtgataatctgttaacttcctgagcaaaatgctgctttggatctatttttgagtcattaaaggtctatcagttttctttcactgacagtactcagtttcactgccacaaatctgtggcaggtctgttcaaaggaaaatgaaactatcccaattaatatttgagcacctggactgagaatcttagtcaggaaaactttctcatgttaatattctacaattttccatcaagaaaggtagccagaaactactctttttctcccgccactggtaaatttaggagagttacagcaattgtcttaatattagaatctttactataccatgtgcattaatattgctagcatagcaaatcaccataaacttagccatttaaacacaaactttaaaacatttaaaatattttaaattttaaacctctttttttttatcacaactgcaaggaattgaaatctgccaacaattcaaatgatcagggaaatagattctcttccagcacctccggaaaggaacccagcctgccaccatcttgatcttagccccactgggctaaaatgaaatcttgtaggacttctgacctacagaactgtaagatcagcaagaaagtggctaagtttatggtgatttgctgtaaattcatctcatcccttaaaagtgtttgtgtttttaaatggacattatgaatgtagcagtaataaataaatatattgtataaataaatatcctttataaataaatacacatatataaatatacatattcagggtacatgccctgaatttttacttatctgtgtgagccatcagaaagattaaaaatgattatactaataagtttatattaaatacatttggttgtgacattacaaattaaaactgtgtaaaagaaatgcttatcaattaacctgatatcatgaattttgcaagagtcttaggtaaatcagatctagatttgtcataattttaattagctactcaaaaatgtcataaaagaattgttactaagcagcccagaatctttccattttggaaacatgaggcaaacatttttaaaatactactttttctaaatcggtaactcagtttcaaacactraatttgaaaagttacagaaacatttgaaatagcttttattccactctagcatataaggagttttatttgctgttatcttaagacatgtcccctcatttcttgctgtgcaacaaataaaactctacaaatacattagcaactgctagaaaatctctggttctctttatttctttatgattcttgtgtaataactttttttctctgaccaaaaaaaaaacatgtcacaagccaagttgtatatattgttagcaagtggataacaaattaaacataatgctcataatgttatttttttttcttcagtaggattatttttccctcccaaattatgctatttattttggggattttgtttgtttgtgtgtttgtgtctagtagttgcacacggtgtgttccctttaaaaatacagcaaatccattccgcttaccaaactatgccctgagccccagagccaataggctttagattctggtagcgcttgagaactgtgaaggttgagtctcccacttccacactgtagaactggttgtcaactttgcttttgctcatgttgtaatgtttggcaatatatgacacatccacttgtttatcgaatccctgtcaaaaagaagaacagcaaaaacatgaggcaagtgaacaggcagaatgataatgagatgtacagaaacttgttcttttaatgattactgacacttagccatctatcatctagttcatgaagttcacatagaaaaaaaatatgtatcagtccatgcaagattacctcgagtaaaagagcttagggaaaaaatgcaaagaaattgtttttttcatcattaaaactatttataatagactaatcttagatttgattcacataatcttttctaaagtatctcatagagacattcatttatagaataaacatctatagctactgaacatgcattggtctcagaggtgatattagatccttcaggattcaagtaaataagacaaagatgatcactggtcacccattataccagtcacatgagaacagataaaaaattgtatctacaaccttttctcagaaagaactaagatacaaacttatgtaaagttttaattattttaattgggtaaatttgaattaaacagtcttgacttcatttgtcctcattaatatcacaaatgctattgttctgaattaagcatagcaaaattcttctttgaattaatattattctaaaataccatatgacactttattttttggaagcttagattttaaatatcttaattgttgcattttttatttttaagagaagttcatctatcaattatatttagtaattgatgagtctgtctttaaaattttgaactataatacatatgtataatataaatatccattacctgtgattatttatccacaaatgatcttatattgtacttatgacataaatagtaagaattctatagctagaagggacctcacagaatatcatctagcccattcctgtggcatacactggtggatgccttcccagcagtcacccttcttgctgattttgttcaggttttaagcacccacattttctgtgggttcctccccaatcccagtgactgaaaattaaacaatctatgccagwgattctcattaaaggtggttttgacccatttggggcatttaggagatttgtgggcaggttttaaaatgccacaataaggggagaggtacagtttagattgatttggtttgtcaaagaatgctggttgtcctacaagaagtgagatgtgagacattcccacgcaatgaataatttctcacatacctcacaacttgtgagtgtcctgccaaagctttagtgaaaaatctgcctataatgttctgagtccagaatctaaaccaaagactttttgtataattttaacatacactaacttttctgaaaatcgaattctgatataatttgaaagatttaaatctccttgggctctgaacctctggattgataataaaactatttttcctggaaagttttggcatttcatctctaaataaaaacttgaaatagaagtactatctaattttccccatattcacttagaaagggatccaagcagcatcagtgatgtaaatgaggagaatacaccatgtgaacacaggtggcaaaacctacaaatccagtgctaggatcttgaggcctccagataagactgagacagacttgaaagtagaatacgtgtgacaggcaccaacctaagattgcatcggatatggtggcagcattcattgcaaatgcactaagacctcaaagaatagagtggacttataggaacttatgttgcttggacaggaaaccaaaaattaagtgatctgcaaatgcaataataaaagttctgaaatcaagaaagcagtttgtggagcatgagatagggaattaaacaagactattaaaaatcaggacattgcaagcctattcaaggagacaacaacaggatttagaatttagacaatgggtgtggacagtggcagaaaaaagaacatcagtctttaaacaatccttgatttcaaccacagtaccaggaactgctctccacaccatggtccatttctactctagactttttggcatatgagtagaacagcctgaataaagccctgctttttttcctggctaagaaaggttaaaaagcaactggagctagaatataacatgaattcatctgtcaagtttaatttgggatgaagtgcctaacttgccatttgtcatgttctgacccttctttatatcttttaatattctgtttctgaccacacacaaaatctttagcacacactagcctcaccaaaccaagaaaatatatctccccttcccttacttattcccttcactttggaagtgtggctttctcaactgtattgcatgtataractaatcattggcaatgaactttgtgttccagactcctgacttaatgttgtattgtggcacggccctgtgcctttggacttcactgtggcttttccagctatggtctcagtcaatatatcatagttgattcaacttgttgtctctcctcttccaacatttcaatgtatattcaaataaaccaaagaagcttaacgattcatgtcacttatctctcaggtttactctaagagctaccctatttaatatttagaactgtttaacccaacaaatgctgatgatatacatattatttgccaaatactaggtttggcactcaaaatataaccaaaaaaagataaggttcagtctagaatgaagacaattaaataagaaagtagttaaagtatggataatacattctacagaattaaaaaagtgctgaaagcaaaaagaaactaccaagcagaaaagggctctttctatataatagaaataaaataatatatattctggaatagagtattgcaatggcagtatatgtgccatagtaaactatgtgtgtattccaggaggtaaaggaaaacagaggtttttaaaggaaaaatgaggatgattatctaactattttgagataattatccttggctacaaggatcaataacaaaggtaatgccagtccaaagtgggacaggaaattgctgggcagatgtctttgcagaaacattttttgcataaggttgtgatggtcttggcgcaaactcatgggtttttcagccctttgtgatagtttttaccaggtatttacgcatgtgaacgcttctctttatggccttcctctgttctatttgtcatggttttttcctttctttttttaacacaagtgactccattctgattttgacaactttcacagtagcaactaaccacctgcgctcattcaatatcattaattcaatcagctaccatgtatacagcaactactagaagccaagttacaggtataaagttgtaatgtttgaggggagacttgatctgtgttttccccaactaaaaatatccctgaaccttccttttcactggttctcagatatgagtgtgcatctcaaccacctggggatgcamactggagaaacagggcttgataaaatacaagtcattggcataacattctggagatttggattcaagcatcagcaatcaaccaattaaaaatcatcattacaaggtttgtgaattcacacacacataaacatataatttcctttcaagtttcttctttatacctcactttgaattaaacttcaggtaaaatttggaagttagggaagatgttcatgaaagcatctcaaataattggtaaaagtctattttaattactagtttaagcggtaaggcatggacataatagcataggaaattttcttagattgatgtcataaccaaaaatttgatagcaaatatgatgtgttaaagagcttcccccagatcccatctgtgccctaagcttacaaatctaaattgagttttgaaaggttcagagcatatttaatagactacatttcatccttcagcttctatatagtattccttgtcatgactataaagttcaaatataattttttctttataaaatgtgcccatgaaaatattccatcaagcacactacagaaaaatattatcagtgctaaaaatgacttttctctagttatacattttagtgtttcctgagttcaagtcatagaacaagacagcagattatttaaacctacaaagaaaaaaaaattcatgttgagaaagcatgcttagccaatacttggtctacagcagagattctgaagttttaacatggattaggactagctagggggcttataaaatgcaaagtttctgattcagtaatactaggataaggccaagaatctgtacttctaacaagtttcacattttgagaatcactgttttagacaatagtagatataaaagatgccaccattcaaagaggaataattaaaagtcaaaaagtggaagcaatgcagatcgacatgtaaacaaaggatgtggaagttaaaaataatgtcataaaagactctccttggtatcagcacctgagcactcatcatcaattcaattgctagcctatagccatagaattttgcaaagaaaaatgtcccacattattgatcttctcctgcaggtgtccaaagctttgattgcactttaatagcctatatttcagaagcattctctcctcattttcatttgtgaatgactgtcctatgtttctgatagtcagttcctgagtgggaaacattgaggtttaagaatttttggaggttaaactttgtttcttttgaatgatatagctgaaaacagcactgagcctggatcagttctgcacttaatagctgtgaaaccttgggcaaactattttattctttcatttattatttatattctgtatggttccataaaggatttgtctagctcacggtaaaagatagagaaacaataaaaccattaaatccagttttaaaaacaaatgtcaaataaagcaagctaggagatgacagttttaccagaagacttaagttatgaatatctattgccttgagcacaaaacttagtgtcacgcttctggaacaccaaaggaaaaaaaataataacaacaacaaaaccacagtgagtggcaggttttgatttattaatctcataaaatatataataccaattcataggaaagataaaattcatcagctaaacttcaggaagaacatattcaattgtttctttatataataaacctgaaatcaaaaaacaggcagtagataagatatttttagtgagtcacagaaatatgtgtcatatgacttgtatgatattaactctcaactcaataacacaagggaagaaagaaagttgaaccagtattattgcttacctactatagacatactctttattatgttaaacatgttaaagtgaacactcaaaacagatggagaaagtggcatacagagctgttcattaattggctcaaaatctcagaactattaattggtggtaccaattaatatgaattaaagtttatctgacttcaaaacaagttctcttctttttgtaagctaaaccatgtactagtttacctagacaatcttgtgtggtgatagaaagctggatattcayggatgccaagaaatttaaagggcctgattctactcatttgttaaatatttattgagcacctactgtgtgttgggcactattaaatgtaacatgggtataaaattaatctatctcaataggatagccaagaaatattaaccacaaagtgcacttgtggaaaattagccagtcaatctgctggatatttttttagtatggtcatttggataccgaaaaccagttgcctaaagtcttgatcctgcttttggcacagaagatattgagctatctattctcatagttatgaccagcagattcagttgcttcatgataccactccaacattgttgtgcaaagtcagccaaaataatgcctgatgttctggggtggcaaaaaggcatgtgcttaatctattttaaatatgtatcaaattatttacatatgagattcgtttgtttgtttccttttagaaacagggtctcgctctgtcatccagcctggaatgcagtggcacaatcatggtttgctgcagccttgaactcctgagctcaagcaatctccccacctcagccttctgatagctgatactataggcacatgccaccactcccagataatttttttttttttttttttttttttttttttttttttttagagatgaggtctcactatgttgcccaggctggtcttgaactcctggcctcaaacaattctcccgcctcagccttccaaaatgctgatattacaggcgtgagccacagcacctggccttatatatgagttttaaaggggaagatttgagacaatacttagtgatatttaggattaaattttgttctctcaagagcacatttcctcacactgttccttgaagagttactctcagcagasggttacatcctggaatcaatttcacttttacattagttagttggcctagagatggttattctatggaatcaatgaattatgaaaaatcaataaagcagcaaaaattgtaagacctaaattatgtttgataatttgataattattttcaattatgttggaaagcatataacagtaatcaatagtagagctggtatggcttctgcctgccttctttacatatgaaggtatggcttctgcctgccttctttacatacgaaggtggggaactaatactgcttgaatacttattaggcaccaagctagtatgagtaacaggcaatgtgctagatgtctaacaaattatttcgtgtaagaattagcattctattttcaacaaataagaaactctagactgagaactttagcaaagggtaaaaatgcagcttctcatctaactatccagtttaaaatcctgactgtgagcccttgggcaagttctttataatattagcccttgtttctttagttgtagaatgagggcaataatctactttttattagtggaaaggttaaataagataatctatgtaagctctaagcatggtataaggttatagaaaactctcaaagtttttatttttaatataattattaccattattataattatcattattattgagaagttagacaacatttaagacccatagttagcagttttagagtatttatcacaaaagttggcctagctcctaaaccacagtaccatttgaaagcactatgatactcctataaaatccacaaagaaccaacagagttcagaattacaggataagaagatatttttccttagttttcatttgtggtagagacagtgctccatgaatatccatgtgcccctctccactttccacctcccttgcagttgcagttggtgtcatgtgactatatacagaaatgccagctgtcacctaaacagagagggcttcaaaaagcgatgtgctcacaactaaaactagagaagcaagagcaaacaaatccaaaaactagcagaaaacaagaaataaccaagatcagagcagaatagaaaaacakagagacacaaaaaaaaaccttcaaaaatcaatgaatccaggagatggtttttgaaaaactaaaatagattgactgctagctagactaataaagaagaaaagagaaaagaatcaaatagacacaataaaaaagtgataaaggggatatcaccactgatcccacagaaatacaaactaccatcagagaatattataaacacctctagacaaatatactagaaaatctagaagaaatggataaattcctggacacatttccaagactaaaccaggaagaagtcaaatccttgaatagaccaataccaagttctgaaagtgaggcagtaataaatagcctaccaaccaaaaaaaagcccaggaccagacagattcacagctgaactctaccagaggtacaaagaggatctggtatcattccttctgaaactattccaaacaattgaaaaggaggaacttccctgtaactcattttatgaggccagcatcatcctgataccaaaatctggcagagacatagcaaaaaaagaaaacttaaggccaatattcctgatgaacatcgattcaaagatactcaataaagtactgtcaawcctaatccagcaacatatcaaaaagcttatcctacacaatcgagtcggcttcatccctgggatgcaagggtggttcaacatatgcaatcaataaatgtaatccatcacataaacagaaccaatgacaaaaaccacatgattatctcaatagmtgcagaaaaggcctttgataaaattcaacatcccttcatgttaaaaactctcaataaactaggtatggacataacatatctcaaaataataagagctgtttatgagaaacccacaaccaatatcccacaacccacaactgaatgggcaaaagctggaagcattccccttgaaaactggcacaagacaaggatgccctctatcaccactcctattaaacatagcaatggaatttctgaccagggcaatcaggcaagagaaagaaataaagggtattcaaataggaaaagaggaaggcaaattgtctctgtttgcagatgacatgatcctatatctagaaaatcccattgtctcagccmaaaagcttattaagctgataagcaacttcagcaaagtctcatgataaaagatcaatgtgcaaaagttacaagcattcygagaggacagccaagatggcctaataggaacagctccagtctacagctcccagtctgagcgacacagaagacgggtgatttctgcatttccatctgaggtaccgggttcatctcactagggagtgccagacagtgggtgcaggacagtgggtgcaacgcaccgtgcaccagccgaagcagggtgaggcattgcctcactcgggaagtgcaagggtcagggagttccctttcctagtcaaagaaaggggtgacagacagcacctggaaaatcgggtcactcccaccctaatactgtgcttttccaacgggcttaaaaaatggtgcaccaggagattatatcccgcacctggcttgaagggtcctacacgcacggagtctcgctgattgctagcacagcagtctgagatcaaactgcaaggtggcagcgaggctgggggagaggcgcccgccattgcccaggcttgcttaagtaaacaaagcagcccggaagctccaactgggtggagcccaccacagctcaaggaggcctgcctgcctctgtaggctccacctctgggggcagggcacagacaaacaaaaagacagcagtaacctctgcagacttaaatgtccctgtctgacagctttgaagagagcagtggttctcccagcacacagctggagatctgagaacgggcagactgcctcctcaagtgggtccctgacccctgacccccgagcagcccaactgggaggcaccccccagtaggggcagactgacacctcacacggccgggtactcctctgagacaaaacttccagaggaacgatcagacagcagcattcgcggttcacaaaaatccactgttccgaagccatccctgctgctacccaggcaaacagggtctggagtggacctctagcaaactccaacagacctgcagctgagggtcctgtctgttagaaggaaaactaacaaacagaaaggacatccacaccaaaaacccatctgtacatcaccatcatcaaagaccaaaagtagataaaaccacaaagatggggaaaaaacagaacagaaaaaccggaaactctaaaaagcagagcrmctctcctcctccaaaggaacacagttcctcaccagcaacagaacaaagctggacagagaatgactttgacgagttgagagaagaaggctacagacgatcaaactactccgagctacaggaggaaattcaaaccaaaggcaaagaagttaaaamctttgaaaaaaatttagacgaatgtataactagaataaccaatacagagaagtgcttaaaggagtggatggagctgaaagccaaggctccagaactacgtgaagaatgcagaagcctcaggagccgatgcgatcaactggaagaaargatatcagcaatggaagatgaaatgaatgaaatgaagcaagaagggaagtttagagaaaaaagaataaaaagaaatgaacaaagcctccaagaaatatgggactacgtgaaaagaccaaatctacatctgattggtgtacctgaaagtgactgggagaatggaaccaagttggaaaacactctgcaggatattatccaggagaacttccccaatgtagcaaggcaggccaacattcagattcaggaaatacagagaacaccacaaagatactcctcgagaagagcaactccaagacacataattgtcagattcaccaaagttgaaatgaaggaaaaaatgttaagggcagccagagagaaaggtcgggttacccacaaagggaagcccatcagactaacagcggatctctcggcagaaaccctacaagccagaagagagtgggggccaatattcaacattcttaaagaaaagaatttcaacccagaatttcatatccagccaaactaagctttataagtgaaggagaaataaaatactttacagaaagcaaatgctgagattttgtcaccaccaggcctgccctaaaagagctcctgaaggaagcgctaaacatggaaaggaacaaccggtaccagcygctgcaaaatcatgccaaaatgtaaagaccatcgagactaggaagaaactgcatcaactaacgagcaaaataaccagctaacatcataatgacaggatcaaatacacacatcacaatattaactttaaatgtaaatggactaaatggtccaattaaaagacacagactggcaaattggataaasagtcaagacccatcagtgtgctgtattcaggaaacccatctcacgtgcagaaacacacataggctcaaaataaaaggatggaggaagatctaccaagcaaatggaaaacaaaaaaaggcagaggttrcaatcctagtctctgataaaacagagacttgttggatttgttaaaccaacaaagatcaaaagagacgaagaaggccattacataatggtaaagggaccaattcaacaagaagagctaactatcctaaatatatatgcacccaatacaggagcacccagattcataaagcaagtcctgagtgacctacaaagagacttagactcccacacaataataatgggagactttaacaccccactgtcaacattagacagatcaatgagaaagaaagttaacaaggatacccaggaattgaactcagctctgcaccaagcggacctaatagacatctacagaactctccaccccaaatcaacagaatatacatttttttcagcgccacaccacacctattccaaaattgaccacatagttggaagtaaagctctcctcagcaaatgtaaaagaacagaaattataacacactatctctcagaccacagtgcaatcaaactagaactcaggattaagaaactcactcaaaaccgctcaactacatggaaactgaacaacctgctcctgaatgactactgggcacataacgaaatgaaggcagaaataaagatgttctttgaaaccaacgagaacaaagacacaacataccggaatctctgggactcattcgaagcagtgtgtagagggaaatttatagcactaaatgcccacaagagaaagcaggaaagatccaaaattgacaccctaacatcacaattaaaagaactagaaaagcaagagcaaacacattcaaaagctagcagaaggcaagaaataactaaaatcagagcagaactgaaggaaatagagacacaaaaaacccttcaaaaaattaatgaacctaggagctggttttttgaaaggatcaacaaaattgatagactgctagcaagattaataaagaagaatcaaaacttttggtactggtaccaaaacagagatatagatcaatggaacagaacagagccctcagaaataacgctgcatatctacaactatctgatctttgacaaacctgagaaaaacaagcaatggggaaaggattccctatttaacaaatggtgctggggaaactggctagccatatgtagaaagcggaaactggatccctccattacaccttatacaaaaattaattcaagatggattaaagacttaaatgttagatctaaaaccataaaaaccctaggagaaaacctaggcattaccattcaggacataggcatggacaaggacttcatgcctaaaacaccaaaagcaatggcaacaaaagacaaaattgacaaatgggatctaattaaactaaagagcttctgcacagcaaaagaaactaccatcagagtgaacaggcaacctacaaaatgggagaaaattttcccaacctactcatctgacaaagggctaatatccagaatctacaatgaactcaaacaaatttacaagaaaaaaacaaccccatcaaaaagtgggcgaaggatatgaacagacacttctcaaaagaagacatttatgcagccaaaagacacatgaaaaaatgctcatcatcactggccatcagagaaatgcaaatcaaaaccacaatgagataccatctcacaccagttagaatggcaatcattaaaaagtcaggaaacaacaggtgctggagaggatgtgcagaaataggaacacttttacactgttggtgggactgtaaagtagttcagccattgtggaagtcagtgtggcgattcctcagggatctagaactagaaataccatttgacccagccatcccattactgggtatatacccaaaggactataaatcatggtgctataaagacacatgcacacgtatgtttattgcggcactattcacaatagcaaagacttggaaccaaccccagatgttcaacaatgatagactggattaagaaaatgtggcacatatacaccatggaatactatgcagccataaaaaatgatgagttcatgtcctttgtagggacatggatgaaattggaaatcatcattcacagtaaactattgcgaggacaaaaaaccaaacaccgcatgttctcactcatgggtgggaattgaacaatgagaacacatggacacaggaaggggaatatcacactctgcggactgttgtggggtggggggagtggggagggatagcattaggagatatacctaatgctaaatgacgagttaatgggtgcagcacaccagcatggcacgtgtatacatatgtaactaacctgcacattgtgcacatgtaccctaaaacttaaagtataataataataaaattgtaaagaaacatgaaaaaaataaaaataaaaataaataagtaaaaaattaaaaaaaaaagttacaagcattcctatacaccaacaataggcaagcagagggccaaatcatgaatgaacttccattcacaattgctacaaagagaataaaatgcctaggaatacagttaacaagagatgtgaaggatcttttcaaggagaattacaaaaccactgttcaaagaaataagagacaacacaaacaaatggaaaagtattccatccttgtgaataggaagaatcaatattgtgaaaatggccatactgcccaaagtaatttatagattcaatgctattcccatcaaagtatgattgacattcttcacagaattagaaaaaaaaactagtttaaaattcatatgaaaccaaaaaagaacccgtatagccaatacaatcctaagcaaagagaacaaaactggaggcatcattctacctgacttcaaactatactacaaggctgcagtaatctaaacagtagaatacgagtataaaaacagatacatagatcaattgaacagaatagagggctcagaaataagactgcacatctacaaccatctgatcttcagcaaacctgacaaaaataagcaatgggaaaaggattctctatttaataaatggtgctgggagaactcactagccatatgcagaaaactgaacctggaccccttccttacaccttatacaaaaattaactcgagatggattaaagacttaaataagaaaaatgtaaaacccaaaaccttaaaaaccctagaagaaaatctaggcaatatcattcaggaaataggcatgggcaaagattttatgatgaaatcaccaaaagcaattgcaacaaaagcaaaaattgacaagtgggatctaattaaactaaagagctggtgcacagcaaaagaaactatcatcaaaatgaacaggcaacctacagaatgggagaaaaatttttcaatctattcatctgacaaaggtctaatatccagaatttacaaggaacttaaacaaatttacaaggaaaaaacaaccccatcaaaagtggccaaaggacatgaacagacacttctcaaaagaagacatttatgcagccaacaaacatgaaaaaaagctcgtcactgattattagagaaatgcaaatcaaaaccacaatgagataacatctcacaccagtcagaatggcaataattaaaaattcaagaaacaatagatgctggcaaggctgcagagaaataagaatgcttttacactgttggtgggaatataaattacttcaaccactgtggaagacagtgtggtaattcctcaaggatctagaaccggaaataccatttgacccagcaatcccattactgggtatatacccaaagtaatataaataattctactataaaggtacatgcacacatatgtttattgcagtattatttacaatagcaaagacatgacaaacccaaatgcccattaataatagactggataaagaaaatgtggcacatatacaccgtggaatactacgcagtcgtaaagaggaatgagatcatatcctttgcagggacatgcatgaagctggaagccatcatcctcagcaaactaacataggaatagaaccaaacactgcatgttctcactcataagtgggagctgaaaaatgagagcacatggacgcagggaggggaacaacacacactgggacctgtcaggggggtggtggaagggagtgcatcaggacaaatagctaatgcatgtgggtgggttgataggtgcaggaaatcatcatggcacatatttacctatgtaacaaagctgcactttctgcaaatgtatcccagagcttaaaattaaattaaatttttttaaaaaggtgatgtgcctcctcaacacttctctttccacagtggtgttttagctcgtgcatcacargatgactaaactcctgagtcaccagatagaggacaacccttgctcacctgaattggaatttgaatgacaggaaataaacttttgatctgatatatcactgagatttggagtctattattactgcagtatgttcwtcattctatatttattttggtcataaaatgtgccaagaactaccctagacactgagaatgcaaagctcctgacctcatggagcttaatattaaattttcccttagaggatcaaactttttcaagttatgggcctcattatcacaatgatctagactactaaactaatcacactgaattttacaccttttgatctacacattcacaatttgtctgcaataaagaaaaaagacataygaaatcagaaataataagtggtattacataatcaaagacaggacaaattttccagagtagtaataataaattttattttaaaaaaatccttctcagagtggaagtaagaggttaatatttcataataaggaaagtaaaaatttcatttgggaatcgaaatggttaaaatgaattatctggatttcactaactcatctctaaaatatgtctttatatttttagaaaagagaattagagtttttcaaatgctacatttaagaatctgaaacactaaagccatgttttcattcacacaacaaagaacgttattcttaaaccctgtgtgatgtgatatggttttgatctgtatgtctaccccaatctcctgtggaattgtaatccccagtgttggaggtggggcctggtgggagatgactggatcatgggggtggtttctcatggtttaacaccatyccctttagtgctgccatctcaatagtgagttctcgtgagatctggttgtttaaaagtgtgtgacacctccctcctctctctcttcctcctgctcctgccatgtaagacgtgcctatttcccctgcaccttccaccatgattacaagtttcctgaggccactccagaagccaagcagatgcttccatgcttcctgtacagcctgcaggaccgtgaaccaattaaatctctattatttataaattacctagcctcaggtacatatttaaagcaatgcaagaacagactaatacatgaagcatatccttatcattccctcatctgcacaattatgaaaggatttaattggtacctcactttaatagttccacattctccatgatcttgtttttcatctttttgaatatgtacttttgtagctgacttgacctttattgaatgagttagacatatctataaccaaataaacattcacttacagagaagatgaacaaaagaggaattgaatgatacactccagattagaactggttttagaactcagaaccaaagtggacattcttcttaacctactgaaaaatgcagcctatggttatcatgcatcatactttcaaataataactgtgcagataagcaaacattatcacttaaaatatatttcaaaagtctcctatcagaaggataatagaattaaaatagtgtacttaaggarttagttgattacctaagaacataatatagaaaagaatggaatccaaaagttgatgcttctcttgcagagcatgattacaaattaaccatacactgaaaatcacgaatagttctggaatattttttaacacaacttctgtattttgaaaaatgtaactaataactgcatttaatctgattaatacctcaacaataattaagctcataacatcaaattacacttgaattcaggttaaaccaattcaaaaagaagtcaaaatctgacctttttgtgcttcaagcaaatcaagcacattttcacaatgaaccaatacagaaaagttaattatcacggaactgaaccttaggaccttcaaattttctgttaaacttgagcagcataactaagggtattcattaactataataactacttaataaatttttagaaaaaaactgctcagcatataaaacagaagcatagcactaaattaacacttctgaaatttgctataactgtgttcacctgtggatacccagaaaaaacctaatgtcaagcaacattaatcattcatccataaaaacaggtagaccgttatcatgacagtacagaaatctctgtratttatttcaacatacaagatatatcacatttttataataatgtttaccttatctttgtttaataatttactcatagtcatgcaaacaaaagcatatacattgtgattttagaaaattagtgcaaaattaaatgttacatattaaagcagatgtagaagaaagagtcaggtttccttaaataatacataagaaagaacactcattaaaaggagaaggtaaagtaaaaatttctctttccccattacatgaaaaactaaaatagtttttttaaaaagggatatataggttcatatctcaaaaccacagccatttatttatgaaacaccagtgccttcaactacatccacagttcaacctgctgatccccttaagccatatgtgtatcaggtgaagactctaaattgagtttttggggggttcaggcagtcctcccaaaaacctaaaccatacaaaccatatcatttgtttcacagatcacctaaaatggtttacagtttacctgttacattatgcaggtttttcctttgccctgctctgccaaaaatctttttctttgttgctttacttctcatgttggtatagaagtctttattccaactaggatggccatccaatgaagtataaaatttttaattggatattttcaaagtctttgaaatagaaacatcatagacccatcaaatgaaatgagcaagttattttaaattcaaattgccttaaaatcaagagagctgtttttaaaaacccatataattctggaaccaagcttaatgatgttttttaaatgctctagatgctagtaatctcaacatatcatttaaaatgaaatcgctccatggacactccagacacttctttttacaaattcccttgtttactagtttccaggtttaaaaagggctcttaaaggttactgcaccccataaaacattagcaaattatcctgaaatttccaaagattgaaaaacactgtgccaaaaartaatagtaaatcaagtgatcagtaattttgctaaaggatagatattattatatatacacatatagtgcttttattatccagaggaataaaatatattttaattaactaatcaagtcatctaataatatttcatatttatttaaaagacattgctttaaccaaaaaaaggcaacatgtttaatcttggctattatatcttacaacgtaaaatgccaaaaaaagtaagaattgtttttaactgaaggctaattttgacactaacaactccacattaagactgctatttttttcttatctccagtagtatttttggaccttaaataccaccacaatattttggaatttgtgtaaaaacctttttccccctactggtccaaaagyatcttaggttcctttgcatttaatcatagtttttttgttctcagttaaatgtagtttaagtggtattataaagataaaatgaggtaaaatattaataaatttttcacacacagtaagtattcaataggtagtgaggggttttggttggttggatgtttggtgactcattattgcttatctctgaggtcttgaactctaaggagtagggtttttttaatgtttataagcctaacyactccctaccatgattgagagtaaacagcatgttttttaggagagtaaccacatcatgctgtatctctagtttatattacacaaattacaagtacattttataggtactcagtaagatgtcttgcaacaaaggccatttatgataaacccatagctaacatcatactgaatagggaaaaccttaaagcttttcctctaagaagtggaacaagacagcccactctttccactattattcaacatagtactggaagaactggtcaaagcaattagacattagaaataagtaaagggcatccaaagtagaaaggaagaagtcaagttgtccctgtttgcagatggcatgaactcatatatagaaaaacctaaagactctactaaaaaacccttagaagtaacaaaacaaattcaataaaattgcagaatgcaaaatcaacaaacaaaaatcagtaacatttctacacacgaacaacaaactagctaaaaaagaaatcaagaagtttgctgggtgtggtggctcatgcttataatcccagcactttgggaggccaaggtgggcacatcacaaggtcaggagattgagaccatcctggctaacatgatgaaaccttgtctctactaaaaatacaaagaattagccaggcatggtggtcagcacctgtagtcccagctacttgggatactgaggcaggagaatcacttgaacctgggaagtggaggttgcagtgagccaagatcgtaccactgcactccagcctgggtgacaaagtgactccatctcaaaaataaaaataaaaaaagaaagaaaagaaaagaaatcaagaagtcaattccatttacaatagtacacaaacaataaaatacctaggaataaatttaaccaaggaggtgaaagacttatacaaggaaaactataaaacaccgatgaaagaaattaaaaaggatacaaatgaaaagatatctcatgcttatggatcagaagaattaatattgttaaatgaccatactaaccaaagcaacctacacattcaatgtaacgcctaccaaaataccaacgacattcttcccaggaaaaaaaatccaaaaatttgtatggaaccacaaaaggccccaaatagccaaagcaatccttaacaaaaagaacaaagctaaagatattacgccaccagacttcaaaatatactacaaggctatagtaaccaaaacagcatggcactggcataaaaacagacacataggccaacagaacaaatcagaaaacccagaaattaatttacatatctacgccaactaccttttgacaaagctaccaagaacatacattggggaagggaaactctcttcaataaatgatgctaaatggttatccatatgaagaagaatgaaactatatctctcacaataaacaaaatacaactcaagatagatgaaatacttaaatgtaagacctaaaactataaaactactagaagaagacatagggaatatgctttggaacactgttctgggcaaagattttatgaaaataagacctcaaaagcagaggcaacaaaacaaaaaaaaatggattgtatcaaactaaaaagcttttgcacagcaaaggaaacaatcagcaaagtgaaaatacaacccaaagaatgggagaaaatattttcaaactattgattccaaagggaattaatatcctaaatatacaaggagctcaaatatctcaataacaacaacaaaatctggattataaaataaacaaatgatctgaacagacatgtctcaaaagaagacacacgaatggccaaaaaatatatgaaaagatcactcaacatcactaatcatcagaaaactacaaatcaaaaccacattgatgtgttattctaccccggttagaatgactattataaaaaggacaaaaaataataaatgttggtgagatatggagaaaaggaagctcttatacactgttggtgggaatgtaaactagtacaagcactatggagaacagtatatagcttcttcaaaaaactacagatagaactaccatatgatccagcaatcccactactgggtgttcatcaaaaaaaaaaaaaaaaaagaagaaaaaagaaaactagtgtatcaaagagatatctgcacccccatgtttactgcactattcacaatagccaagacatggaatcaaccttaggtgtccaacaacacatgactagataaagcaaattaggtatatacactcaatggaatactactgagccataaaagagaaatgaaatcctgtcattctcagcaccatgaatggaactggaagacattatgttaagtgaaataagagaagaacaggaagttaaacaccacatgttctcattcatatatggaagctaaaaaaagttgatctcatagaaataaaaagtagaacagaggatactggaggctgagatgggtaagggttgggggaaaaaagagattgttaaagggtataaaattagagctagacaggaagaataaaatacggtgttctacagcactgtagggtgactatagtttatattataaatttcaaatagttagaaggaggatattgaatgttctcaaaacaaagaartgataaatgtttgagatgatggatatgttaatcaccctgatgtgattactatacattatatgtatcaaaacatcactatgtayctccataaacatgtatgattgttatgtgccaatttttttaagtaaattaaatttttaaatgggatggatattaaactaataaattagaaaaattaccaaaaactcttaaaaatatgtattgaatcgatgaatggtaaaatcaataatcaatcagtcaacgagtagataaggagccaaaaggagtttttgtgtcataagaaaaaggaagaccagtcttagctcagtcccttttacttctagtgctgcttaaatttatgatttgatgattaattaatttgtaccctctgtgtcacaggctttctcaaaatcaggaaataatttaaaattattcataactaaatcatcggtaaatgtttacagaggacactaagttgataaatgttagataaatgttaggtaaatactgatttatgattaggaaaataatgaaaacataattaaatctattaacatacacttgtaggatatgaggatgttgaaaaattgatttgattttgaaaagcaagcaaacacatttctacttaggaaatggtgtttttctgctgggttttcattttccctctttcattgaatattttctgtagtaagataaacttctgggcctgggagttaaggaggaagatgccctggtcctgaccctgagatagtaccactgaatggggaaaacaaatctgtaaacttagtagtaatgcacaaagaatgcggtaagtgctgtagacaccagagagtgtgtaggagttggggagccacaacacatattatttytctgtgaatatatctcctggttaaaatcctgaataatctgttcagtacaacaaagttccaaaaagaacactttcatgagttttttaaattcatagagtgaaatgtaacagttctgtacctctgttcaattgagaaaagagggctaagactacttacctattgctcaggagaatcaagaatttttcactttatattccctgtaggtttatatttttgtaattattgaattaataccagtgcaaactaaagattattcttttattgtccaacattacaaagaaaaatttctcccgagactataacaagaagcctcttgccttcaaaagctacttggttgggttaaaaaaaataataagagtaacttcttcaaaaaagtcagtgaatcccatattcttcaaataattgagttaagaattaaggtaaaaactattaaagataatgtacctattttctgttaacaaatactattcagcaatttcattttccgtatttctctgatttcttgcagacaatagtgaaaagcttagaaatatgacataattgaaaaccccatggactaaggctcaagagactggaattctggacacagttaatcattaattaattattgacaagttttttaagatctttgagtattgtctgttgggcaaaaagttgagagtagccttagccaagctggtgataagcttaaacaccatagcacataaaggatctgtgagatgccccaggaaatgagaagcttccaaggaacatagttagaaagaaaaccccaatacatcattctgcctctaaaaataaatacactgttttctttaaattgctagagaagtgaatgaggcacagagttataagaaaaataaaaataagtgtttttatcagagaaaattctacataggaagtaaataaaatgtccagtcacaaatggaaatatttttactatgctatttctagattttttaaaaacgttatatgcatgcatattttctgtgtattaaaagctcataataagcaagaaaatccagtcattaagaaagttcatgcttcacttctttttattcctttgctttaaaagaactctcattaaaaataaacattctgtatctacacccaaatgtagaaagttgaactgaaaaataacgacaccctacacaaagactttctgtattttaaaaaatggctgaaatttttaggctatgttaattgataattgtttttgagtttcagatttagtcttgaaatatgtaaaacattaacttagattttagttttggctggtttttttttattattattatactttaagttttagggtacatgtgcacattgtgcaggttagttacatatgtatacatgtgccatgttggtgtgctgcactcagtaactcgtcatttaacattaggtatatttccaaatgctatccctcccccctccccctaccccacaacagtccccagtgtgtgatgttccccttcctgtgtacatgtgttctcattgttcagttcccatctatgagtgagaacatgcagtgtttggttttttgtccttgcgatagtttgctgagaatgatggcttccagcttcatccatgtccctacaaaggacatgaactcatcattttttatggctgcatagtattccatggtgtatatgtgccacattttcttaatccagtctatcattgttggacatttggsttggttccaagtctttgctattgtgaatagtgccgcaataaacatacgtgtgcatgtgtctttatagyggcatgatttgtaatcctttgggtatatacccagtaatgggatgactgggtcaaatggtatttctagttctagatccctgaggaatcgccacactgacttccacaatggctgaactagtttacaatcccatcaacagtgtaaaagtgttcctatttctccacatcctctccagcacctgttgtttcctgactttttaatgatygccattctaactggtgtgagacagtatctcattgtggttttgatttgcatttctctgatggccagagatgatgagcattttttcatgtgtcttttggctgcataaatgtcttcttttgagaagtgtctgttcatrtcctttgcccactttttgatggggttgtttgtatttttcttgtaaatttgtttgagttcattgtagattctggatattagccctttgtcagatgastagattgcaaaaattttctcccattctgtaggttgcctgttcactctgatggtagtttcttttgctgtgcagaagctctttagtttaattagatctcatttgtcaattttgtcttttgttgccattgcttttggtgttttagacatgaagtccttgcccatgcctatgtcttgaatggtattgcctaggttttcttctagggtttttatggttttatgtcggttggtatgttttttaagtgttaatggcaagtaaatggctaggataatgaaggctaaggaaatagctcacagtcatacagcttgcaagtgctagggcccagatatttaacctaaaaattcaggcctactcattttacaccacagcaggatcactgttgctactgattacataagcaaaacatgtatgattcatttattcattctgcagatgtttgatgagagcctactgatatggtttggatatttgtccccttcaaatctcatgttaaaatgtaatcctcagtgctgcaggtggggcctggtgggaggtgtttgggtcatggagatggatcccttgtggcttggtgttgtcctcactacagtgagtgagttcttatgagatctggttgcttagaagtgtgtggcaccttccctgctttctctcttgctcccacgctggccgtgtgagatgcctgctcctcccttgctttctaccataattgtaagcttcctgaaccagaagcagatgcctgtgccacatttcttgtactgtcgcagaaccatgagccagttaaacctcttttctctataaattacccagcctcaagtatttctttatagcatcacaagaactgcctaatacaccgaccctatgtcagatactattgtgagttctgcagtacagcagtgaacaggagacrattccaatggtgtgctggtaaatgttcaacaactggctggggaggagaaataatgggaaaggggcctatttgcagtatttgcacatttctgtaacataaatactccgatcatgacagattttaagttaccaacttggcatcgttaaactttgagttggaaagttgtgcatattcagctcttgtgagcctgtgtgaactggccccagcaggacactgaaaaaaatctggttcatgtgcaaaatgcattcaagtggagagagaggagcaaaattccagaccagcaacatatatagaacgttagatactgatgtattatggaggcaaggaagttgggtatgcagtcaggtagttaggactatttttaaaaggattgtcaggaaagatttgcttaaaaatgacatttcagtgaagccctgaagatggttaaggagtggcccaagtggataacagaagaacattttaggatagaggtttctagggggctagataataaaggcttggggatttattataaggattttaatttttgctgagtgagataggaagacattgaaaggtctttctcttttgttttagttttagtcaaggagtgacatgatctcaattatttttcaaagacaattctttctaatgttttaagagtaaaccacttgggggtgggcaaaagtagaagctcttacaataatttaagcaagagataagggtatctttcagggtggtagtggagaaatagtgagaatcagtgagattccagttatgttttaattatagagtcaacagaatttgctgacagcttgaatatggagtgtgacccaaaagatgattccaaggattttattataagtggaagagtgaagttatcagttactgaactggagtagacaatgggaagagtaattttagaggatagatgaggtgttgctttggaatgcgtacagtctgatatgcctatttgacatctaagtggagatgtagaacagacagttgaatatgagtccagttccaggaaaatgtttgggttggagataaaactgtgtgatattcatgataatgataatatttaaagcactgggactcagtgggagcactagaaagtgagtataaatttatttaaaatttaatcatctatttaacaaacacatgtgccagtactgctctcagtgctttgcaagtataaactcatttaattctcataacaagcctaaaatataggtattattatttcctccttttataaataaagaaactgaagcacatagagatcaagtaacttgcccaaggtcacaagtaaatggctaataagggatagaaatggaatttctaaccaaggctgtctagcactggagttcttattagagaagttgtctaatggcctgagacttcagaaactgcaacaattacagtttagggagatgagagagatcagtaaatcttattcattgcaggcaacacattttactttctcatagaaaatctatgctcaaggaaagtacatacagtagttacagaaagcatatgcaaaaacaatgttttgtttccttttatgcttttctatattttctataataagcaaatattaattctagaatcaggaaagattgcattaaaataaagcaaaagagttattttaaaaatcttgtttcaatgattcatgtcattctttatttaaaacacagctcaaagagaaggtgcaatgataatcatgctgaaaaactgaagggaagctctctgcttaagtatgaataaggtaacatacaattttttgccaaaactagaacaattcttgagagtaaaagaragcactgtcaattatatmtgacaacaggrttaagttagaactgttttaaaaatacttgaagtttatgtaggtgccctagggagccttctccttaaagatagggtttgcatgaatacaaagaagtcaactcttatctagtccatgcacactaacaaacgttgttgccaccttcttactttcccttctaggttaagtataccattgtttgtcattattgttggttaacatttttactattataagtactggttagaattaggcatcagaaaaaaaactgactaccacctgtatattattatagtgggtttagagatactctatttcaggctaatcagttcgtatgatgagaaataataatacagtagtctccccttatattcagagaatacattttaagacccccagtggatgcctgaaaccacagatagcactgaaccctatacatatatacctatgataaagtttaatttataagttaggcacagtaagatattaacaacaataactaatataaaatagaacaattaagtaaaataaaagttacttgaacacgagcactgtgataccacaacagtcaatctgataacagagatggttgttaygtaattcactggcaggtggcattatatggacgtgctgcacaacckaagtgggatggagcaagatggcacaagatttcttcacactactcagaacagcgtgcaatctaaaactcatgagttgttatttctggaattttcaatttaatattttgaggaccacagttaacagtaggtgactgaaactgtggaaaccgaaaccacagataaggggggactactgtaaagaatgaarctatttttatggttaaagacccatttcaaggatttgaaaagaaatactaaaatctttaagtgtaaatataatcaaagaagaaatcactttataataaaacttgaaaaaattacctttattcccattctaacttaaatgaattagaaactaaacacctattcacttccatttcctaaactacttttttaaaaayttatactttaagttctgcgatacatgtgcagaacatgaaggtttgttacataggtatacatgtgccatggtggtttgctgcacccatcaatctgtcatctacattasgtgtttctcctaattctatccctctcgacatgccctggtgtgtgatgttcccctccctgtgcccatgtgttctcattgttcagctcccacatgtgagtgagaacatgggrtgtttggctttctgttcctgttagtttgctaagaatgatggtttccagcttcatccatgtccctgcaaaggacatgaactcatcctttttatggctgcrtagtattccatggtgtgtatgtggcatattttctttatctagtctattactgatgggcatttggtttggttgcaagtcttgctattgtgaacagtgccactataaacatacctgtgcatttgtctttatagttgaatgattagaatcctttggatatatacccagtaatgggattgctgggtcaaatggtgtttctggttctagatccttgaggaatcaccacactgtcttccacaatggttgaactaatttacactcccaccaacagtgtaaaagctttcctattcctccacatcctctccagcatctgttgtttcctgactttttaatgctcaccattctaactggcatgagatgttatctcattgtggttttgatttgcatttctccaatgaccagtgatgaagagctttttttcatatgtttgttgtctgcataaatgtcttcttttgagaagtgactgttcatatcatttgcccattttttgatggggttgtttgttattttctcataaatttaagttctttatagattctggactttagccctttgtcagatggatacwttgcaaaaatgttcccccattctgtgggttgcctgttcactctggtaataatttcttttgctgtgcagaagctctttagtttaactagatcccatttgtcaattttggcttttgttgccattgcttttggtgttttagtcatgaagtctttgcccatgcctatgtcctgaatgatattacctaggttttcttccacggtttttacggtttttatggttttaggtcttacgtttaagtctttaatccatcttgagttaatctttgtataaggtgtaaggaaagggtccagtttcagttttctgcatatggctagccagttttcccaacaccatttattaaatagggaatcctttccccatggcttatttttgttgaagatcagatggttgtagatttggggcattatttctgaggcctctgttctgttccattggtctatgtatttgttttggtaccagcaccatgctgttttggttactgtagccttgtaatatagtttgaagtcaggtagcatgatgcctccagtgttgttctttttgcttaggattgtcttggctttatgggctcttttttggttccatatgaaatttaaagtagttttttctaattctgtgaagaatgtcaaaggtagtttgatgggaatagcattgaatctataaattactttaggcagtatggccattttcacaatattgattcttcctatccatgagcatggtatgttttgtttttccatttatttgtgtcctctcttatttccttcagccatgttttgtagttctccttgaagaggtcattcgcatcccttttaattgtattcctaggtattttattctctttgtagcagttgtgaatgggagttcactcatgatttggctctctgtttgtctattattggtatatagaaatgcttgtgatatttgcaaattgactttgtatcttgagactttgctgaagttgcttatcagattaaggagattttggactgagatgatgaggttttctaaatatacaatcatgtcatctgcaaacagagaaaatttgacttcttctcttcttatttgaatacgctttatttcattctcttgcctgattgccccagtcagaacttccaatactctgttgaataggagtggtgagagagggcaccttgtcttctgctggttttctaagggaattattccagcttttcccattcagtatgatactggctgtggaactgtcataaatagctcttattattttgagatacgttccatcagtgcctagtttattgagagtttttagcatgaatgggtgttgaattttatcgaaggccttttctgcatctattgagataaacatgtggtttttgtcattggttctgtttctgtgatggattacatttattgatttgcatatgctgaaacacccttgcatcccagggatgaagccaacttggtcaaggtagataagctttttgatgtgctgctggatttggtttgtcagtattttattgaggatttttacattgatgttcatcagggatactgccctgaaattttctttttacgctgtgtctctgccaggttttggtatcagtatgatgctggcctcataaaatgagtaaggaaggagtccctctttttctattgtctggaatagtttcagaaggaatgataccagctcttctgtacctccagtagaattcagctgtgaatctgtctggtcctgggctttttttggttggtaggctattaattactgcctcaatttcagcacttgttattggtctattcagggatttaacttcttcctggtttagtcttgggagggtgtatgtgtccaggaatttaaccattttttctagattttcaagtttatttgcatagaggtgtttatagtattctctgacggtagtctgtatttctgtgggatcagtggtgatatccccttcttcattttttattgtgtctatttgattcttctttcttttcctctttattagtctggctagcagtctatctattttgttaaccttttcaaaaaaaccagctcctggattctgtgattttttgaagggttttttgtgtatctatccttcagttctgctctgatcttagttatttcttgtcctctgctatcttttgaaattgtttactcttgcttctctagttcttttaattattatgttaggatgttgattttagatctttttcactttctcctgtgggcatttagtgctataaatttccctctaaccactgctttagctgtctccyagagattctggtatattgtgtctttgttctcctcratttcaaataactgatttatttctgccttaattttgttatttacccagtagtcatttaggagcaggttgttcagtatctatgtagttctgtggttttgagtaagtttttaaatcctgcattctaatttcattgcactgtggtctgaaagactgtttgttatgatttccattcttttgcatttgctgaggagtgttttacttccaattatgtggtcaattttagaataaatgctatgtggtgttgagaagaatgtatattctgctgatttggggtagaaagttctgtagatgtctattaggtccacttggtccagagctgcattcaagtcctgaatatccttgttaattttctgcctcgttgatctgtctaatattgacaatggggtgttaaattctcccactattattgtgtgagagtctaagtctccttgtaggtctctaagaacttgccttatgaatccaggtgctcctgtattgggtgcatataaatttaagagagttagctcttcttgttgcattgacccctttacctttatgtaatgcctttctttgtcttttttgatctttatcagagactaggattacaacccgtgctttttttttttttttttttttttttttttttttttttcctccatnnnnnnnnnnnnnnnnnnnntttccatttgtttagtaactattcctccatcccattattttgagcctatatgtgtctttgcatgtgagatgggtatcctgaatacagcacaccgacgggtcttgactctatccaattttaactcaatccaatttgccagtctgtgtcttttgattggggcatttagcccatttacctttaaggttaatattgttatgtgtgaatttgatcctgtcattatgatgtcagctggttattttgcccattagttgatgcagtttcttcatagtgtcgatggtctttacaatttgggatgttttttcagtggctggtaccaactgttcctttccgtatttagtgctcccttcaggagctcttgtaaggcaggcctggtggtgacagaatctctcagcatttgcttgtctgtaaagaattttatttctccttcacttatgaagcttaatttggctggatatgaaattctgggttgaaaattcttttctttaagaatgtcgaatattgccccccactctcttctggcttgtagggtttctgcagagatatttgctgttagtctgatcggcttccctttatgggtaacccaacctttctctctggctgcccttaccattttttccttcattttaaccttggtgaacctgatgattatatatcttggggttggtcttctcaaggagtatctttgtggtgttttctgtatttcctggatatgaatgttggcctctcttgctaggttggggaagttctcctggataatatcctaaagagtgtttttcaacttggttccattctccctgttactttcaggtacatcaatcaaacataggtttggtcttttcacatagtcctatatttcttggaggctttgttcattctttttcattcttttttctctaatcttgtcttcacactttatttcattaagttgatcttcaatctctgatatcctttcttccgcttgatggatttggctattgatacttgtgtatgcttcacgaagttctcacgctgtgtgtttcagctccatcaggtcatttatgttcttctctaaactggttattctagttaggaattcctttaaccttttttcaaggttcttaacttccttgcattgagttagaacatgctcctttagcttgggggagtttgtttttacccaccttctgaagcctacttctgtcaattcgtcaaactcattctccatccagctttgttcccttgctggcgaggagttgtgatcctttggaggagaagaggcattctggcttttggaattttcagcctttttgtgctggtttttcctcatctttgtggatttatctacctttggtttttgatgctgatgaccttcagatggggtttttgtgtgaatgtcctttttgttgatgttgatgctattcctttctgtttgttagttttccttctaacaggcccctctgctgcagctctgctggagtttgctggrggtccactccagatcctgtttgcctgagtaacaccagcagagactgcagaatagcaaagattgcatctgttccttcctctggaagcttttttcagaggggcacctgccagatgccagctggagctctcctgtatgaggtgtctgtcgacccttgctgggaggtgtggggtcagggacccacttgaggagatagtctgtcccttagcagagcttgattgctgtgctgggagatctgctgctcccttcagagctggcaggcaggaacatttaagtctgctgaagctgtgcccacagctgccccttcacccaggtactctgtcccagggagataggagtttcatctataagtcgctgactaaggctgctgcctttctttcagagatgccctgcccagacaggcagaatctagagaggcagtctggctacactggctttgctgagctgtggtggcctctgcccagttcgaactttccagcatctttgtttacactgtgaggggaaaaccgtctactcaagcctcagtaatggcagacgcccctccccccaaccaagcttgagcatcccaggtcgacttcatactgctgtgctgtcagtgagaattttcaagccagtggatcttagcttgctgggctccatgggggtgggatcccctaagctagaccacttggctccctggcttcagccccctttccagggggggtgaatggttctgtctcgctggtgttccaggcaccactggggtatgaaaagaatctcttgtagctagcttggtgtctgcccaaacggccgcccattttgtgcttgaaacccaggacccttgcggtgtagacacctgagggaacctgcaggttgcgaagaccatcgaaaaagtgtagcatctgcgccagagtgcaccattcctcatggcacagttcctcatggcttcccttggctaggagagggagttccctgaccccttgcacttcctgggtgaggcgacaccccaccctgcttcagctcaccctctgtgggctgcacccactctctaacctttcccagtgagatgaaccaggtacctcacgtggaaatgcagaaatcactcgtcttctgcgttgatcttgctgggagctggagactggggctgtttctattcagccgtcttgccagctcctaattctaaactactgttaatatgatataaatactgactttggtgtggaatgtatgcaaatggtatgtcaaagtggaaatacaagggaatatactgtaccttgttttacctgtaaggaacacacacctgacaaaaggcaattttcacatccaatgttggttcactgcagtagtataagaaatggaggctcataaatacctagaggaaaaagaartggagcataaattttcaaatcactagtttttcattatataacaatatagattttggcataatttgagttatatgcaaaktaccatgcacaacatatctccaacataatccttatcttgacctgtactatacctttcacaaattgtatttaataatgaaataaggttraaatgtcctatcttttataatgatcaattccatcacactcataaagattagatataagaaagtggacatacctaataatttaaagggaaatacatcctgttataaagcattttcagttcttaacatttaatttacaaaaaaaaactctcaaacatatgctcaacaggatatatatatttattgtagaataaaagcactattaaataaaatataatttataatagaattctatataggacttggagtaattatattagagcttactgtatcagtaatagataaatttttcaaacatgatattgaccgagaagaaaagcagtttgtaacagatataaggaatatactatatttgtgtgaaattttaaaattacaaaatatacaaaaatgattatatattgcttttaagtaaatataattgtggagtaaaaagtattaggcaccatattaacataagtttaatcttggtgggaagtacaaaaattcaattatatcattttctgtatgttcaaaatattctataagtttgcacagttttaagaggaaaagttatctaatggtagtaatgccaaattaggtactaagttatttgagaatgacacagcaacatcagagaaacccaaataaattgttttgagttcaattaaacacactttgttgaatgctgattgtgtgcaaaacgcacaatactgtcagattaaaccatttaaaaacaccatcaatatgcgacttccatttctggcaaggattgatagatgtcctgaaaatcactatcagtgcaaaatccctaaaaatgttaacataaaatacacaaaacatctttcagaatgcatagctgagtggtcaaaaataaaggcatgaaaagttctgagaagttgaaaacaatgtgaaagaatacatgcagagaagtaaatgagctgaggccgctgtttgtcacaggccgtctgctgatgtctgatgactagaactttacttctttttttatttgtatttttttattatactttaagtactgggatacatgtgcagaacatgcaggtttgttacataggtatacatgtgccatggtggtttgctgcacccatcaacccatcatctacattaggtatttctctgaatgctatccctcccctaggcccccaccctgacaggcccctgtgtgtgatgttcccctccctgtgtccatgtgttctcattgttcagctcccacttatgagtgagaacatgcagtgtttggttttcggttcctgtgttagtttgctgagaatgatggtttccagcttcatccatgcccctgcaaaggacatgaactcatcctctttacggatgcatagtattgcatggtgtatatgtgtcatattttcttcatctagtctatcactgatgagcatttgggttggttgcaagtctttgctattgtgaacagtgctgcaataaacataagtgtgcatatgtctttatagaagaatgatttataatcctttggatatatacccagtaatgggattgctgggtyaaatggtatttctggttctagatccttgaggamttgccacactgtcttccacaatggttgcactaatttacactcccaccaacattgtaaaagcattcctatttctccacatcctctccagcatctttgtttcctgactttttaatgatggtcattstaactggcatgagatgttatcttattgcagttttgatttkcatttctctaatgactagtgatgagctttttttcwtgtttgttggctgcataaatgacttcttttgagaagtgtctgttcatatccttcacccactttttgatggggttgtaagcttttttcttgtaaatttgtttaagttctttatagattctggatattagccctttgtcagatggatacattgcaaaaactttctcccattctgtaggttgcctgttcactctgatggtagttacttttgctgtgcagaagctctttaattagatcccatttgtcagttttggcttttgttgctattgctttttggtgttttagtcatgaagtctttgcccatgcctatgtcctgaatggtattgcctaggttttcttctagagtttttatggtttcaggtctcatgtttaagtcggtaatccatctcgagctaatttttgtagaaggtgtaaggaaggggtccagtttcagttttctgcatatggctagccagttttcctaacaccatttattaaatagggaatcctttcctcatggcttgtttttggcaggtttgtcgaaaatcagatggttgtagatgtgtggcattatttctgaggcctctgatctgttccattggtctatatatttgttttggtaccagcaccatgctgttttggttactgtagccttgtagtatagtttgaaatcatgtagcatgatgcctccagcattgttctttttgcttaggattgtcttggctatatgggctcttttttggttccatatgaaatttaaagtagttttttctaattctgtgaagaaagtcaatggtagcttgatgaggatagcattgatctataaattactttgggcagtatggccattttcacaatattgattcttcctatccatgagcatggaatgtttttccatttgtttgtgtcctctcttatttccttgagcagtggctcatagttctccttgctcttcaaggtccttcatatcccttgtaagttgtcttcctaggtattttgttctctttgtagcagttgtgaatgggagttcactcatgatttggctctctgtctactattggtgtataggaatgcttgtgatttttgcacattaattttgcatcctgagactttgctcaaattgcttatcagcttaaggagatttggggctgagacaatggggttttctaaatgtagaatcatgtcatctgcaaacacagacaatttgccagccatcttgccagccactcagaacttcagttcttaaaatgtagcatgcagagtacaggaaacaagatttagacctatctacagtgggaagtcatactggagacactgcataaagcttactataggaagttttcaataaactgtaggaggaagcaaaataatctgagagggaaggtctgaattgcaaggaaaaatgttttgcattggaacttctgcaggttttttaaatttaaggaagactgaaaggataagaatatataagacattcctgaagaagaacaagtggctgtttgcctagcgccggcaagggaagtattctgccagrgatcaagaactattataaaggtgtgataagtaaaaatatgttgcattgatgtcatgatagactatgaattaatagaatacagagcccagaacagacacagacatacatgggaacctgattatgtcaaggtaagcactgcagacatctgaggaaagaagaaactatgcattaaatcatgctgatccaccccaattagtcattgtatggggatggggagaaactagattcctgttggaaggcaattctctatggccctctcatatttccgcatgttttgcaaacagaaacactagtttgttccagaccatcttgctaaggatgattatatagcagacagccttgaaagatagaggtagtgtctccttctggagaaaagggtagatctaatgactatggggcgggctctctggggcaaaggtcaggcatgattcctgcccattacaaaagatttgggttcccttagcttgaggtttctcttcagtaatgcaactgtgtgtgctgaggtcacctgaacattacatcatcctatgggaactggggcccgaggaactgacatgagttctgacattctaactgctgctattgctctgagtaataaagaccctcgtatctgacccaggagtcttgtatcttctgccaatattcataaaactgtcaaaggctaatttatgaacttgcaagtaaggtaacatctcagactctccagcgttctcaacaattcctacctcacgttgtacacaaaaaataattccagacagatcagaaatttcaggaaaggccaaactttaaataatatagaagaaaatatggttgactgtttctgtgaaataagtcataaataatatatatgctaagctttgaaaaatatattaataaaataaactatattaaaattaataatctgtgtattaaaatatgtgataattagtataaaaagtagtccacatgtttgaaataaaaatcaaaatacatataaacagtgaaaaatttattgagaatctataaaaagctccttaaaaatcaagaagaaaagacaaaggaccaatatataaataaaacccaaaaaattgaagaatttcatgaaaaaagaaatatacgagcactcacaaatatatgcgtaccttaaaatcatattgggatactattttatatccttcaaattgtcaaaagctgaagagtataatacatattcagtatttggaaggaggttgatttgaatatttgtacattactaataggtgtggcaattggaacaactaaatttagagggaaaatgccattatttagtaaacttgtgcatagcctacaacacaataattccacatctacacatattcctagagaaactcttatgtttttataccagtatacatgtacaagaaaattcattagaatatttttataatagtgcaataaataataaaaatgaactctggaaaaaaacaaatattcatagaaagaacaatgaataaataaattgtggtattttcctttagtggaataccatatagcaatgaaatagttgaatagtgaaacaagtatcaaatatgacaacatctcttttttttgttatgttatacttaatccatttatgaaattttgaaaatatgcacaactaaacaatatcttatttaagaatattgctttagtatgataaaactgttttttgaaagcaaaggaataaaaaaagcaaaatccaagagatgagataattatcctggggagatgaggagtgccactgggaaggggcgtgcagggagcttcraagacattagctatgtctacttcttgaagctgggcagtggggttcacacatgtttgttacattatttaaaccctatgaaacatatcaaacattatttaagcatatgaaacatatattattggatatgtctgaaatattttacagaaaaaaggtcaagtgacacaaggaattagtggtccttcagtgttctgctgggccttgtgtatgcatggatgtgtatgcacgtttggtatgatgtaccaaacactcataatagccactaataggaaatactcttgaggagaaatgctgaggtttgtaaagcaggaagataaaaggaaccattaaactactgaattaataaattatagaacttttcccattttagattttttgttatatttgaaaataaattctctataggaaaaaaatactaactataatcagtaagtaaaaaacaaaacaaaaggagcaatttactctgtaaattttaacctgtgatgttattttattgcgtgtccagggattttatgtataatttttgccagacagtaaccactactttgttaatgttttaattttttaacaaaatagttttgattcaagtctaatttacacagcaaaatgaaccattcttaagcgtacaggtggatgaattttgaaaaatgcatatatccctgaaacacacatttcaatgaacagagaatagtctgaaaaccccatgtgccttttttggaaaatactcctcaccctccaaacagtgttctaacttctttcattataaattagttattctcccagaactaatgtaaatgaaattacacagtatgtattctgttttattgggctctttttgctcagcaaaatgtctttagtattcatccacgttactgtatttatcagtaattgtccctttccattgctgacaaaaatgtaccatagcttgttaattgattctgcatttggatagttgagatgtgtctattttttagatattataataatgctgctatgatcatttatgaacgtgtctttttgtataagtatgttttcatttctcttagggaaaatgcgtagagaagaaattattggattgaggaataatatgtgtaattttttaatatctaatttttatggatacatgacagctatacatatttatggggtacatgtgaaattttaatacaagcatacaatgtgtaatgactaaatcagggtaattgagatatccatcacctcaagcatttataatttctttgtgttaggaacattctaattccactcttttagttattttaaaatatacaataaattattgtcaactagaatcatcctactgaacactaaatcttattgcttcaatctgattatatttcagtacccattaactattccctctttactcctttctctccactacccttcccagcctttggtaatcatcattctactctatctccatgagatcaatttctttagttcccacatatgagtgagaacatgcaacatttgtcttttcatgcttggcttatttcccttcacataacgtcctccagttctgtccatgttgttgtaaatgacaggatctcattctcttttatgctttaacaatattccattgtgtatatgtatgtaccacagtttatttatccattcttctgctgataaacacttaggttgaaggaatatgtttaactttttaaaagctgccagaaccattttcaatctcctgcagcaatgtaagaaaattcagttgcttcacatccctgccaacatttgatgtaatcagttttctaaattttaatcattttagggagtgtttaaaaatataatgctgactaaaaattttgagaaatttttatatgttattggccatttatttatcttccttggtgaagtgcttttccaagtcttttgctcaatggatagtggactgtggatggagagaaggctttatctttatattacaaattatagaaatgctttatctattccagataaaagtcttctgttagagacacgcattacaaatattttctctcagccttcagctcgcatattcagcttattaatgttatttttaaattagtagtatttttaattttatgaatttatttttttatttattttccttttatgattagcttgtttttggctttgtgcctatccccaggttcacagagatattctcctatatattctttgtgaagctttaaatcgtctttttcttcttctttttttagtgattgttctagagttaacaccctacwtttttaatttataataatccagcttcaaataatattctgcttcacatatagtttaagaaacttacaatagtatacttccattttcctctccaatcctttgagctattgtgttacatattttacttatacacacattatagacctcataaaacattgctattagttgtgctttaaagaggcaattatatttgaaagaaattaccaaaaagttactttgtatttactcacatagtacaaaggggtatagttcttatactcttctttaaggtttatttgtaatcattcatgggttttgatattattttaaatggtatttttattttatttctattttcaaactgttcattttcagcattcaaaatacattgtttcattgttgctcactgtcttgcagcatacattaaacagggaagtcttccagtcactctttgatctttccctcagtcttctcacagcactttgttcattacttttgttatgaatatcgtatagtattgtaaccattcatttgtatgtcttttccattctatttaagaccttctcaaggaaaatgactatgttttattaatcttcacaaccccagggcctaccactattgttggtatatagataatgttgagaaaatgtttactgaatgaaagaagaacccaattttaaaagtacaaatctacatttttaaattatctcctcatattgaaacctgtgaatttgcgatacatttgatactaacaaattaggagcaaggagtttgcagtagtagaaatatgaaggaaataatccaagcacaatgacttcagaaatgctacccagcagtgacgtttcagttctctactgctgaagtgggcatgtgggaaataataacatccagcaccaccgccccaaaacaaacaatgtgttttaacttttaatgaatgaataatcttgctatgaaaagcaggcatcctgatctttcctagtttgcattacaaagactccagtgtaacaccatagctaaaaatttacaaagtcactgcgtaaccttcttgttctaggaagacactttaaaagataaaaaatgtttactatgacaatcccagcaaattacaaaaaattcgtttgctaattgtttttcctggtagcatggcagagagcatttggcccattgtatagaaacaacacagatgatcaaggtggtatctcaatattatgctaaagtgaaattagtgacaatatcttggtgcaatataggacctgtaagtagcttgaaagagaaggagatgctaatttagggagtttagtgctttcaatcactagttgttcttttgggaaaagccccatatgagcatttcttgctatgctatacactgtactgagtttctctttattatatgtctataggaattactggatactccaaacaaagcaataggccaagttgcatgaatgaaatacacttaagaatttattaggctgaattggtgcacagcagctgctgtaagataatgtaactatgacgtgttttcacagcttagatcaatgtttaaattcttgtgtatctgagatgtgtcaactaaaccacaggaggtttaagaagcttcacaaatgcaaaaatcaaattgttctgggcagctccaggattccatggtttgtcactgaactgcaatatatacaaggaaaaaccatgaactactaattatttaaaaaaaaagttccaacagtttctaagttcaatcggtatacgatgtcattacttataagtaatttttgtatttattacatagcagatttactatgaatgacttttataacagcnnnnnnnnnnnnnnnnnnnnataaccttataccatgcttagagcttacatacatacaatatgcttgcaagctgtcatagacacactctgtctcttccatgttcaaaaggattctccctataatatgcaaaagaccagatgaaaaatatgccttgaaacaagtaattatcttttcaggggctgcagtagaaaatagaattaaatttaattttctaataagaactgtgcatatgctcactttaacatactgtcaaattcttaagtagatgtgctatcacttagagcacgaggcagcaagttatggtccatcagtcaaattcagttaatcacctgttttaataaataaaattgtatcggaacatagccatccattagtttataaattgtcgatggctgctttcacattacagtggcaaaactgagtaatcgtgagaggaactgcataagctataaagcctaagatacttattagttggcctttatagaaaaagtttgccaacctctgatttagagcatgctaactgacaaaraaccagaagtataccattagcctcgatagaaaggccaaactaatttaatgtctccaaccataagtatataaatgcacaaaataatttctaaaataatatctaatttctcataaataatatctccatagttttacatctaaaacttagatgtttcttaaaatattgttcatataacaagatagaagtaaaattctttaattttgatgacacaaaatagtatgatttgcaaccagtgggaagaaaattaattaacattagagttatcaccaatgagagaaagggacaccaatcaagatagctagtacaacaaattattcccaatactataatgatccagtaatatgggaagcatagacatagacagcatacaaatatgagaaataatgtgtggaatctgaatggaaacaaaagaggaacctcagaacggtgacaacttcagttttgtaaatccagccatgtttaaggacttctggggcactgcagaacagctttttgtcattatttctttccttcttccaactccaatgagattactcttgttaagaaattgtatcacaggaatttcccaattccttttctttttactaaacagtagacactatgcatggcttaaattgtagatggggaaatggcagtgggttacagaagtcataatctatgtgagctgatctgatattgtagcactctcagatatttttcttaaaattataaaaaaatgttctttccattattttggaaagtcagaactgctgagatggaatataacaagaagtcaacacaaacaattctacaataaccgtaaaacccaaaaggcagtgaaaagcagtaaaagtgagaagtcagtgactattatattaaatggaattaaagaaaaaaattaagctataagctatcatgactaagccataacacagagccgttgaaagagatttttaagtggtaagggatagatacccctaccacataaaaaaatatttaaaccaaagagagctagtatcttatattaacaaaatagcctttaaggcaaaaagtattattaagaattacaatagtcattacttaatgacaaaagagaaactccccaagaaaatataacagtcttggacttatatgcacttagcattacctcaaaatgtgtaaagcaaatattaaaacaattataagactacaaagaaagctgaaaaattcacgatcacagtgagagattttaacacatgtaagtatctcttgctttttatacaaactgttataaaataacaaaaaagtgagaaatcctcctattaatttgttgaggttcataaactatcatacaaagataatataagacaagaaaattatagtataatcttatgaacacacaggtgaaaaattttaaaaattatcaagcaaaattatatgttaggaaaaaataatacagaaaaccaagtagagtttatcccaagtatacaagcatgtggcaaattgagaatctctagtaatataattcaatatatttaacacattaaaaaagaaaaattcttgtcatattcagtagatagagaaaataatttgatatcatttcaaatctattcatggttaaaacacacacatatatttcaccaactagaaaaagagacatttttcataactgggtaagagttttctatcaaaagcaacaaatatcatatttaatgatgaaaacaagaaaaagaggcattccctctcagatttaataaaatataaagatgtctgccatcattgtttctattcaatagtaccctgcaaatgaaatgaaatttttaaaattggcatacgaattgaaaaaaacaaactgttctccactgaagacaacaggatttttttttaatttaattttattattattatactttaagttttagggtacatgtgcacaatgtgcaggttagttacatatgtatacatgtgccatgctgctgtgctgcacccattaactcgtcatttagcattagatatatctcctaatgctatccctcccccgtccccccacctcgcaacagtccccagagtgtgatgttccccttcctgtgtccgtgtgttcgcattgttcaattcccacctatgagtgagaatatgcggtgtttggttttttgttcttgcgatagtttactgagaatgatgatttccaatttcatccatgtccctacaaaggacatgaactcatcattttttatggctgcatagtattccatggtgtatatgtgccacattttcttaatccagtctatcattgttggacatttgggttggttccaagtctttgcttttgtgaatagtgctgcaataaacatacgtgtgcatgtgtctttatagcagcatgatttatagtcctttgggtatatacccagtaatgggatggctgggtcaaatggtatttctagttctagatccctgaagaatcaccacactgacttccacaagggttgaactagtttacagtcccaccaacagtgtaaaattgttcctatttctctacatcctctccagcacctgtcatttcctgactttttaatgatcgccattctaactggtgtgagatggtatctcattgtggttttgatttacatttctctgatggccagtgatgatgagcattttttcatgtgtttgttggctgcataaatgtcttcttttgagaagtgtctgttcatatccttcacccactttttgatggggttgtatgcttttttcttgtaaatttgttggagttcattgtagattctggatattagccctttgtcagatgagtaggttgcgaaaattttctcccattttgtaggttgcctgttcactctgatagtagtttcttttgctgtgcagaagctctttagtttaattagatcccatttgtcaattttgtcttttgttgccattgcttttggtgttttagacatgaagtccttgcccatgcctatgtcctgaatggtaatgcctaggttttcttctagggtttttatggttttaggtctaacgtttaagtctttaatccatcttgaattaatttttgtataaggtgtaaggaagggatccagtttcagctttctacatatggctagccagtttttccagcaccatttattcaatagggaatcctttccccattgcttgtttttctcaggtttgtcaaagatcagatagttgtagataggcggtgttatttctgagggctctgttctgttccgttgatcaatatctctgttttggtaccagtaccatgctgttttggttactgtagccttgtaggatagtttgaagtcaggtagcgtgatgcctcccgttttgttcttttggcttaggattgacttggcgatacgggctcttttttggttccatatgaactttaaagtagttttttccaattctctgaagaaagtcattggtagcttgatggggatggcattgaatctgtaaattaccttgggcagtgtggccattttcacgatattgattcttcctacccatgagcatggaatgttcttccatttgtttgtatcctcttttatttcattgagcagtggtttgtagttctccttgaagaagtccttcatgtcccttgtaagttggattcctaggtgttttattctctttgaagcaattgtgaatgggagttcactcatgatttggctctctatttgtctgttattcgtgtataagaatgcttgtgatttttgtacattgattttgtatcctgagactttgctgaagttgcttatcagcttaaggagattttgggctgagacaatggggttttctagatatacaattgaaaatctagaagaaatggataaattcctcgacacatacactctcccaagactaaaccaggaagaagttgaatctctgaatagaccaataacaggatctgaaattgtggcaatcatcaatagcttaccaaccaaaaaattccaggaccagatgtattcacagccgaattctatcagaggtacaaggaggaattggtaccattccttctgaaactattccaatcaatagaaaaagagggaatcctccctaactcattttatgaagccagcatcattctgataccaaagccgggcagagacacaaccaaaaaagagaattttagaccaatatccttgatgaacattgatgcaaaaatactcaataaaatactggcaatctgaatccagcagcacatcaaaaagcttatccaccatgatcaagtgggcttcatccctgggatgcaaggctggttcaatatacgcaagtcaataaatgtaatccagcatataaacagagccaaagacaataaccacatgattatctcaatagatgcagaaaaggcctttgacaaaattcaacaacacttcatgctaaaaactctcaataaattagatattgatgggacgtatctcaaaataataagagctatctatgacaaacccacagccaatatcatactgaatgggcaaaaaccggaagcactccctttgaaaactggcacaagacagggatgccctctctcagcactcctattcaacatagtgttggaagttctggccagggcaattaggcaggagaagaaaataaagggtattcaattaggaaaagaggaagtcaaattgtccctgtttgcaggattgtttagatagacattgcaatagcaaccaccaattattttaagcaataaaataattaagaatttctggtgacaaatcaatagtatctgataatacctaatgttgtcaactttatagggaaataagaagattaatacaatagttagtatataagacactaattgcttgttcctatacaacaatattaaagaacaaactgacaatagttggtaaggttgaaggtatgtgaactaaacaaatcaatggttccacttgtatgtatctacactgagaaacttgacacaaaatgcaaggagagatcgtgttcattatatctcagtttttaatagcaaaaagtcaacaaaaytaacaacctaccatgagagaaatgtattcatgaaagaaaatacaagacttgaagtgaataaactgaatctaaaagtaacaatatggatacatttctaaagcaatgtttaagaagcacatgaaaatgacagtactgatgtattcacgtatataaaatttaaaacactgctaatgaataaaaggtgaagtaggaagcaccagtaatctgcctccctacctagacaacaattgcactgactgacagaatttgcatgaggtaactattttggaactctggagtctattgaaggctcgcaatttctaggctaatcctcagtatgaagaaagcccacaccaatcagaaacaaaacaaaacaaaatttaaaaacagcaaacgatgggatagaaggagaatctgatttccatagttatcatattagtagattcaaattttcagtttttacattgatgaaagaaattgaagagaacacaataaaatggaaaaatagtcaatgtttatgtattggaggaatcaatactgttaaaatgtctataccctactcaaagtaatttacagatatgattcatttcctatcaaagtaccaatgacattcttcatagaaacaggaaaaacaatcctaaatgtatatggagccacaaaatacccagagtagccaaaactgtcctaagccaaaagagcaaatctggaggaatcacattacctgacttcaaattatattacagagctatagtaaccaaagctgtatggtgctggcataaaaatagacacacagaccaatggaacaaaagagagaacccacaaacaaatccatacatctacagtgaactcattttcaacaaagctgccaagaacatacattggggaaagaacagtctcttcaataaatggtgctgagaaaactggatatctatatgcagaagaataaaactagaccctaatctctcacaataaacaaaattcaaatcaaaatagattacagtcttaaatgtaagacctcaaactataaaagttctataggaaaattttggggaaactctccaggacattcaactgggcaaatatttcttgagtaataccccacaagaataggcaaccaaagcaaaaatagacaaataggataacaagttaaaaactcctccacagcaaaggaaacagtcyatgaagtgaagagataacccaaagaatgggagaaaatatttgcaaactatctatgtgacaaagtattaataacagaatatataaggagctcaaacgactctattagaaaaaaattgaaaaatctggttaaataataatttaatgttcaataataattatatacatttaaaggaaactaaaagtatttataattgcwttatttgtaacacaaaggataaatgcttgaggtgatggataccctatttaccctgatgtgatttgtatgcattgcatgcctatatcaaatatctcatgtacacctatgtctcatgtactcatgaaaattaaaaactttaaaaggaataacgttgttttcaacaaaagtcacaagtcatacaaaaaaaagggaagtatggctcagtcaaagaaaaaaatagacagaaaacgatccctgagaaaggccagatggcaaaactactagataaagactttaaaacaattctttcaaagatgctcaaagaactgaaggaagacatgcaaaaagtcaagaaaataacatattamcaataaaaatattaataaagaaaaatcctaaaaaggaaaaaaaagaaattctagagctgaaaagtacaagaagtgaagtgaaaaaaaattcatgagacaaactccaaggaagatttgagcagcagagtaaagaatcaatgaacttgaagacagaacaataaaaattattaattatgaagaacagaaagaaggattgagaaaaattaaacgaagcctaagcaacctgtggaacaccattaagtgaaccaacttacacattgtggagtttcaaaagaagaagagagagagaggggtagaaagattatataaagaaataattgccaaaacttcccaagtttgatgaaagatataaacatctaagaagctcaacaaatgccaagttggatgaatcaaaaagaccccatgctaagacacattaaaattaaaatgttgaaagccaaagacaaagagagaatattgaaagcagtgagaaagaagtgattcagcacatacaagagattcttaataagattattagcagatttctaatcagaaactttggagggcagaagggagtgggctaatatattcaaagtgctaaaagaaaaaaagtgtcaaccaagaatctaatgtttaacaaaactgtttttcaaaagtaggaaagaaattaagacatttccagataaaagctgaaagaattcactaccactagacctgctttgcaagaaatgctaaataaagtcattcgggttaaaatgaaaggacactcaaaactayatgaggaagtaaaaactcagtaaaggaaaatatatagataattataaaagttagtattattgcaataatcatttgtaattctactctttgctttctacataatttaagaggctaatgcactgagaagaactgcttgtttttggacacacacaatgtaaatgtaatttataacatcaataactaaataaagggattaaggacaaagctggaaaaaagcagagtttgtatgttactgaagttaagttggtataaattcaaattggtgtgctacaacttcaacatattaaatgtattccccatgctagacacatacaaaaaacagttatagaatctatacaaaagaaaatcagaagggaattaaaatgttttagtacaaaagaaagaaagaaaaaaagacagtaatgcgggaaatgagggacaaaaaagctctgagtcatacagaaaacaaataccaaaatgtcagaggttcctccttggtaattgctttaaatgtaagtagattaaattcttctatcaaaagacagatgggcagaatggatttaaaaaaaaaacaccatccaactatatgctatctatgagagatttgctttagatccaaagacagaaatagactgaaagtcagaggatggaaaaatatatttgtgcatctagcactttgggaggctgaggtgggaggatctcttcaggtcaggagttcaagaccagcctgggcaacatatcaagaccttgtctgtacaaaaaaaaaattataaaattagctgggtatggtggtgcacacctgtattcctagctactcaggagactgaggcaggaggctcacttgagccaggaattcaaggctgcaatgggccattattacaccactgcactccagcctgggcaacaaagtgagaccctgtcttgaaaacaaactaaaaaggatattctatgcaaatagtaaccataaagagaacagggatggttatactaacatcagacatagtaactttaaatcaaaaaaagtttacaagagacaaacaggacactgtattaataaagcattcaatataaaagaagatataacaattataaatatttattcacctaataatagaccatcaaaatataggaagcaaaaattcacaagactggaaggagaaattgacagatgtacgacagtagttggagacttcaacatgctattctaaatagtaaatataacaaccatacaaatacaaattatatgtaaagaaatagagaacttgaacagcacaataaatgaacaatagctaatagacgtatacagaaccgtcttcctcaaaacaatatacaatattctcaagtgcacatgggacatattccagaataggccatatgttagtccaagatataatacactattttctctggtcacaacagtatgaagttagaaaccaataacagagaaaaacttaacaattcagaaatttgtagaaattaataaaaacacttttagacaaccaatggatcaaataagaagtcataagggaaaatataaattcatactaggagatgaattaaaatgaaaatacaacataacaaaacctataagccaccacaaaagcaatgctaagggagaaatttagagctgcaaatgcttacaatacaaaagagagaaagatcttgaataacaacctaactttgcaacttaaggaattagaaaaagaagaacatattaaactcaaacctgacagatggtagaaaataacaaagatttgagcagagaccaacaaaatagagaatagaaaagcaaaaaagaaaattgttgaaatcgaaagtttgttttttaaaaagattaacaaaattgacaaatctttagctggatttagtaagataaagaagaaggactcaaattcctgaaatcagaaatgaaagtggatatatgagtggggacattagtacaaattctaaaaaaaggaataggacaataagagattactgtgattaattgtatgccaacaaattgcttgaactaaatgaaatggacaaattcctagaaacacaaaatctactaatacagactcaatttaaaaaacacaaaatctgaatagacctgttactagcaaggaaattaaatcaataatcaaaaacattctgacaaagaaaaagccctgaccctgatggcttcactgatgaattctaccattctaccatacaaagaagaactaactccaattattttcaaactttccctaaaaattgaataggagggaacacttacagactcattctatgagaccaacactgccctgaaacaaaagccagacaaagatattacaagaaaataaaaccacagaccaatatccctgtgaatattgatgggaaaatcctcaayaaaatattgacaaactcttagcaacaaaatactagcaacacattaaagggattatatactatgaccaagtgagatttattgctagaatgcaaggatggttcaacatacaaaaatcaatctatgtagtatatctcrttaatggaatgaaggaaaacattatgtgattatttcaattgatacagaaaaaccatttgacaaaattcaacaccctttcatgattttaaaaaacactcaacaaactaaaaatagaatgaaactatctcaacacaataagaaccatatatgaaaaactcatcgtgaacatcatactcaattgtgaaagagcaaaagatattcctctaacatcaggaacaaggtaaggatgttcacttttacaccttctattcaacaaatttctagaagtttcagccagagcaattagggaaaaaaacaggaaagaaggaaataaagaaagggcatccaaatttgaaaggaaaaagtacaattatatttgttcacagataatctgattttctacatagaaaacccttaagattccttaaaaaaaaaaaaaaaaaaaaaaaactgttagaactgataaacagattcagcaaagcagcaggatacaaagttaacgcgcaaaaatcaattgcatttctatacactaacaatgaacaatctgaaaaggaaattatgaaaacatttcaaattacaatagcatcagaaagaatgaaatacttaggaattgacttaaccaagaaggaaaaacacttgtacaatgaaaactaaagaaaaaatactgaaatgtatttttaaaaggcataaaaaatagaaagacatctcatgttcatagattggatgtcttaatattgttaagatgtcaatactagccaaagctatatgcaaactcaatgcaatccttatcagaatcacattgatttttgcaaaaacagacaaatccaccctaaaattcatatgaagtctcaaggagacttaagtagccaaaacaaccttgaaaaaagaacaaaacggaaggacccacacttcctgatttcaaaacctactacaaagctacaataatcaaaactgtgtagtactagcataaagactgatgtatagatcaatgaaatagaataggaaccccagaaaaaaccttggcataaacaatcaattaattttcaaccaggatgccaagaccatccaatggtgaaaggacagtcttttcaacaaacagtactgggaaaactgtatattcacatgcaaacaaatgaagttggacctttacctaacaacaaatgcaaaagttaaccaataatggatcaaagatctaaatgtaagagcaaaaacaatcaaactgttataagacaacatagaacaaaccttcacaatattggattgtcaatgatttcttggatataacatgaaagacacaagcaacaaaagcaaaaatagacaaattggacttcataaaaatttaaaacttgttcatgaaaggatactgtcaatagagtgaaaaggcaacctgtggagtgggagaaaatattttcaaataatacagataaaaagaaattcaaatccaaaatacgtagaaactaacactaaataattttttaaaaaaatattcaagttggcagggcacagtggctcatgcctgtaatcccagcacttttgggagaccaaggcagatggatcacgaggttaggagatcaagatcatcatggccaacatggtgaaaccccgtctctactaaaaatacaaaaaattagccgggcgttgtggtgctcacctgtagtcccagctactcaggaggctggggcaggagaatcgcttgaacccrggaggcggaggttgcagtgagccgagattgtgccactgcactccagcctgggcgacagattgagactccrtctcaaaaagaaaaactattcaagtattcaagttaccatctcacatccattgggatggctattatttcaaaaaaaattaaaaaccaaacaatcaaaactacagaaaataacaagcgttgttgagratgtggagagatatgaacccttgtgccctattggtgaaaatgaaaattagtacagccaccctggaaaacagcacagcartaccttaaaaaatgaaaaatagaattaccatgtgatccagcaatcccatgcctggttatatgcccaaaagaattgaaagcagggtctcaaaaagatatttgtacacctgtcttcatagcagtattattcacactagctaaaacatgaaagcaattcaaatgtccatccaggaatgaacagattagcaaaatgtgctatatatatatatatagcacacacacatatatatatagcatatatatatatatatatatatagccacatatatacacacaatagaaaagtattcacccttaaaaaggaaggaaattccgacatgctactgttggtgatagttgcacatgatcaatgtacttaacactactcaattgtacaattaaaaatggtgaagatggcaaattttatgttctgtgtattttgccataacagaaaaagttgaaagaaaaacaatgtatttaagatttaaatagcaatgccatacctaagaacttctactaaagaagtaatcaaatatctatattttaatccataagattaatccctaataatgtttaccacagcattatttataataaaataatagaaacactaaatgttcaataaaaagaaaatgatgaagtaattattgttagaacataattccacttagctatttataaattatgacacagatacatgttcataatatattgtaaaatggaaaaaattggtaacaaaagagtattacaatatgtccccaatcttttaaaacaaatatagttacaaatatagttttagaaaatatagatagaaatatgcacattaataactctacttttatgtatatttgtttcataatgaaaaatgcatatttttaataaggtgaaatattattacagcacgtgaaagaataacagattcaggtattttgaactaaaagaaaacatagtaaacacataagcaacttattttcatagagaaaccagaggtctaaatggtaaatggttaggaaactttcaaaatttatacatctcatccatgaggcaataaggagtcagatctaaatgcccaaatgctattcattaaacacacattacatttctcaccaaaatttggccagcaaacacttgaaacatcttaaaaattgcctcttaggaattgacattttctcccctagttcttcctaaaattcatgtattttggagcctgaacctagacacaagtatttcacttatttttctaaaacattctatacagaattgtattaatatagagaaataagattttttctgtcatccttataatttgtaaaattaataaaatattcttaaattggttcaacagatactaccaattcaggtttcactaacaatcacaaaaaacatttacacaggtgaagtatccaaactgttattttttgcctagttatatcttttccttcaacatttctcaatgcattttgtcattatacctattaactggcatacaactcagctccttggttactgcaagaaaccctatataccatcaccacagccatcatcygacacacagaatactcagcatgtaacrtccttgtattctccacatctttaatcattgctaggtttgtatatgtacacatgtgaattatacatggtctttttttctaaatagttactggaaagaaaagatggtatttttttccttaatgattcctcattaataagatacctatttgtaaagcataaaatacattatctcatatatggtaaatgctatatatatgcttatatatataattttgatagatcagtaaataacagttcacatcacagaagataaatacatattgactgcaaacctcaaattaaaaatagcaatggaatgttgtccacaaaatcattctgatttttatttagaattacttataaagagaagtagaattatttatatgtatagtcatgtttaatattaaacatttttaaaagaaagtttattccaattatcatcacactgattcaatgaataattctataaatatttaacagtatctattctgagtgaggcactatactgaggactttgtgaacaaaaataaacaactcaaaaataaaaggccaaaattagtgcctttaagaaattcccattagattaaaatattgtacatatatataggcttattatttatttatttattttgagayggagtctcackctgtcacctaggctggagtgcagtggcgccatctcagctcactgtaacctctgcctcctcagcctcccgagtggctgggactacaggcgcccgccaccacgcccgcctaattttttctatttttagtagagacagggtttcactgtgttagccaggatggtgatccgcacgccttggcctcccaaagtgctgggattacaggtgtgagccaccgcgcctggcctaggcttatttttaaatcttaaaagttcaacattttaaatttttgtaaggatggcctttcaaaatatgtttatcataacacatatgggcataataataagmcttaagcaaaaaaaaaaaaaaaaaaacactttgggcaattaatttaaaaggcaaaatraaatcttaattcctctgaacaagtagtatcattgctttaattacacatcctcaaaataactaggccaataggggctattaattaggtgaaatgtcatcttgaatcctggagaggtgctgaacttacatgaacaaatccatcccttaagtgatatggaaaaatctaacgatataatgagcagaataaattcggaggtcactctatctcccagtcacttagcaactgatttgtagggaagagggcaagagggaaatgatttgtaaaaataattaaccataaactcaatagtagagataagtgaaaaggaggctggaaatggaagcggctttacccagggcttccagccaactcttcttgtagggaggaattcatcatgacacaaaagccccagacataatgtttacctttcttccttttatccatacatctctccgacttccccacgttcctgtttctattgatagacttcaggagcacacatgcaaacctaaaccctttctctttgtctccatagttttctttgtctttcttttttcccaaaaagagattgagagagacagagagagagagagagatttccatggtattgggggcagatttctcagacttgcccctttctgcaggcataattggcacacatcctctcttgcacaaccaaactcttaaattccaaagtaaagcacattactacaaacttgagtcacaagtacaaacactcatttcacttagcagcataaagatttctgtttggtttttctaattggccagtactatgtaaaataaaggaagaaaaggaggatatttgggatattttcctagtaaactcaaatcacaatccaatgcttcaagcagaataagccataaattctcacaatgtcaatgttttcttaatttattcttttagcttacttgcaatggatattttaaaataatacttcttataagaataacattatttctggaaatatggaaatatatctcttattgttttgaaataattaaaaaggctgtcaagtaacacttaacctcttagagtaaggtcatttatttaatgataaggtcattatttaatgacagtaacataaattagtagacaactttgaagactttaaaataattcagtcttttataagaaaaatattctatatttttcaggtataatatcaatattcttacattcaagttgctttaatatctgttaacataaaccaaagcaagttatagttatgggctggtaagaagagaacaaccatctattgaaaaccgtctacagataagtgctttgtataataaattatttgctttaatattttcttttctagaaatgtgtatawgaattacaatatattacttaatcttacaacataaaactgcacacacttttgccaagcgtatgtttacacattttatccacatccaatttaagtaagttatgatacattgagttacatttactattttaagatatcaattataaaactcattgtaggagaaaactgtataaacaaaggcatcttaatatggcccaaaactaaataaaatgttaagctatataatcttagtttgctttaatttcatctgtgacattttatgattggttgaaatgtcacaacaacaaaaataaagtccaaataaagcattaaatgactggcctgtatggagccatcattaatcacttatgagagttactcatgctaaatgcgtcatccagagtaaaaacaaaacaaaacaaaaaaaamatgaggttgacaatatactaatttgacctctgcatattgtgaattgagtaatctgtaatgttggaaaacataagactagtgtaggaataatatggagattggatggaggcaggaaagtaggggcaatgatgccataagcagctcttccttaaattttatttagtcctgaagaatttaagaatttaaataaaaagagagagaagcatattttccacatttatatacatatatgattaactggctgatatttagaaggaaatgtatatttttacattgaacttcacttgtgtttagagttataaaagcaagttcaaaattttacaagtaatttttaacagtaaacacaataatattttaggtttcttctaatgacgtacagcctaatatatttgtatggygtttctaactagcattttagcatttggatcaaggcaaagggcaaaagtctcttgtttattttatctcatttatttctgtcccaaactctaggctctctataacctttaaatatgttcaggagattcagttatgtctcaattgtcgaacaacataaggggcttttgaaagaatgttttgactaatgacagagaattattatttttattttctgtatcattttcctctccaatgaacatcttttggtacgttctcccttttccctagcttaaattgtcacttaggctagtccactgagctagcccacagtctcccgaatagaaggcggctgggaagtgccmatcagtcagggacagacagacasccaaggagaggtttagaaattaaaattcagtgtgaagctagaaagacaaaatggagaagtgataacaggctaggaccaaactaaacagaagtgaggaggtataaatcctgagcaatcacctcaagaacaatgccacccagcatgccattggcttttacaggtcactggcttgacaggagtaattcaaaatgtgggaggaaaaagccacatcggatggctactctgctaatttatcttatgcagcaaacaaggcagtgtagaaattgcagtaaccaagcatatttatagacaataaaggaggcacattgatatggtttggatctgtgtccccacccaaattgcatattcaagtatatttttggttttttttttttataaaaacagggtctggctctgtctccctggctgcccaggcaggagttcagtggggtgatcacaggtcactgcaggctcgacctcccagactcaagcgattctcccacctcagcctccttagtggctgggactagagatgcacaccaccacacctggctgatttttgtttgtttgtttgtttgtttgtttttgtagagacaggttttgccatgtttcccaggctggtctcgaactcttgggttcaagggacccacccacctcggcttcccaaagtgcttacaagcgtaagccactgagcacagcatatcatgttcaattgtaatccctagtgttggaggtgggacttggtgggaggtgattggaacatgggggtggaattctcatgaatgggttagcaccatcccctcagcactgttcttgtgctactgagtgactttttgtgagatctaattgtttaaaagtacatagaacctccccctctctctcttgctcctccttgagatctggttctttcaaagtgtgtagcatctgcccctcactctcttgctcgtcttccagacatgtaagacatgccagcttccccttcaccttctgccatgactggaagtttcctgaggcctccccagaagctacacagatgccagcatcatgctttctgtacagcctgggaaactgtgagccaattaaacctcttttctttattaattacccagtctcaggtatttctttatagcagtgaaaaaacagactaatacatatattcttcatttatagaggatgatgctatacaacactcaaatcctctcttctaaactaaggcactcatttatccaaatgccaggagttttgcttactgayagcacacagctgagccgtttcctaaaaatggccctctgctawaaggagcttctgggcccaaggttactcctcttccccagtgactgtgcaatgcaaggtacaaagccttcacaccacctccacactttgccttaacttggggcatcgccttagggtcactgcaacttcacagatacccatgggatcagctgaggtctctgttgcaactgcatggtgcccaagcaaagactaagacttcataatacagtacagcttgtatttatagcctttgcagaccagttaaaaataaaaataaacctttgtctttgtgaagaatcccaaaataggtggaaagcaatgtccagcctcttcctactgaagtggaagtccattttgttcttgactggtcctccaggcctccagaagatctatgcaccccctaatagacttttacacacaatgtttgaaggcaacttctaaacttcatcmaaccttctccaggagcagaggaatttcatcatgctgatgacatcttcctctaaggagagtcagttcacacacttattcagtacatgcaaacattcacaaataagttcacaaagaaaaaatgtgccattgtcccccacacagtacaaggcctcatcaccttggttaaattcctgaaaattatttagcaagtcaagaatcactctatccctgacactgtcaagaaacagccattgaccctcaatacccacatgctcaacatcttttaagccttgtggattctggaggcaacatattctgcattacaaattttactttttatcatgttaaacttactttttaccaaattttaaattttaccatttagggtgttacatatcagctcccctttaatgaggcccccttttacaacagaagcctctagaatctgcccaaatttgcagtacagctggcattcaccctagtgcctccctcccccaagacttcttcattttagaaacctcctctcatgtctcctggaacatctggatcacctataatggccataacttgcgtatggactctgtgatgagtcctgtgaacattgtcctgttcggcaccatactacacaccattagaacagcattgctggctgcattctgtgctctcctgagaatggaggctctcacagggcctgagccctcaactccacatacccacttgcacattatgctttgggtcatgaaaacagcacctggaaagctcagcacttccactgaggcctccttgctacaaagacaaacccggaacctcgggccatttccacctgcaggaggcagtagcctcccctatccccaaatctcacccctccctcttcttcctctgcaccacatctgggcaaactaataagaaagcccagatgctccctcctctggtggcaacaggaagttcaaatcacacaagccctggccaatacataaaagaattctcactttgccccaaccccctaaccacagtaaaatcccaagcgagtctcttttccctgcttttcatggcagtcttggacctgcttagaaacatgccctgctctccccagaaagtctcattatgtaaataatgtgcctttcataccctcttgtggcatgtgtggcatcatcaatcttgacacctgaaccaaatttgtgggagagatgtccatccttcctctggagggtgacttagacataccctagtttttatgtaaacctttcttgagcttagttgccgttctttatgatccgaaawatcaaatgtaggaattggaaccctacctcagttctaatgatctgagtgcactgaacaaatgaaactgtttcaatgttttcatgtaaaaaatatttatttaatgcatactatgggcctggaattctgctagacactaagaatacagaggagttgtcagtctaatgggaaasacagatattatcaatgccattttaagaaatgtaaattttcaactgtgacaaatgccggggaagaaaagtatgttaatatgttatatgaacctatcagttctaatggaatcagtcctagacagtcagaaatattaaggaagtgatatattaactgaaagcttaagaatgagtagaagtghactaggtaaaaaaggaagggaacagagttccaggtagagggactagcaaagacacagtggcagaggaagcatagagaatgtgagagactgaaaatcagagcaaccattgaagagcttcggggtaagcatgactttatcagatttgtgttttaatgattacaccgggtcagtatgaggaatgaattaaagaaggtagatatattgacgatcaaacaccaataacccaatatcaatgctattgatttaattcacaagcatatgtataccttccctttctttgctccccaaatttaagataacataatcwatgcacaagatttgataaatctgagtttgtgttttccctcaaaattagaaaataaggtcagagaatctcatcttctgaaatggaagtataaaaatattatccaagatgaatgagactagccttactattcatttacagaaataacatcttaaatacaattctctattgcaatgaaaattaaatcttatttattttgcagtaatctaaaatttatagacagcagatgtttagttggcccaaaggaamcttgaagttaactgttctcaattagtgtgtaaatttaactgctaaagtaagttaataccctaggggaaaaaataatgttaatactcatgcaagaatccaaataggtcaatatattcgttttctgtgcagaaaagagttaacagcagcctgaagctgttatccctagaaatccgtgcttggaartttggccctgagctggagtatagaaacttggaggtggagagggtttctaccattgtcaggactgatgagagggccataactgtttgtattaacaatgtggtttatgctgaatacytgctttcctcctggaagtctcaaatttttgtacatcccagacacagggtgcctacatgactagccaccaataaatccttgggctgtagttttcagtgagccttcctggtagacatgtagtcacaatctgttgctgtaggaaatgggcaagtcctgtgtgactctaccgagagaagactcctgaaagcttgtgtgtggttccctttgaatttcacctcatgggccattttcttttgctaattcacttygcagcctttcactataataaatcctaactgygaatgtaactctatattttgagttctctgagtcctcttagcaactcatcacactcagtggtggtctttgggacccgccccccaacacattttccatattttatcggtaacataacgagagagtgaatatatcacttattgctattttaaaagctttatgctcaataggtactaataaaacatcaacatattaattacctagatgcatttaagagtaatagggaatatttccaaaaggcagtgcactattggtgcccactgacacaagctttgatattaactctctctccaatacattctccataaatgttttctaagcctatctcccctaatagatatgtagatttagatatatgtatacatatagacatggacatggacatgcacattcatatacatttagaaaaagaaagtagatatagacagggatgtttaacaacagttttctgaaacaatatattcagaaaaaccttttgattatgacagcatataggataatacaaatggtcttcatatacactaatcaaatactgagtttcatttttaaaaagttagaaatgcttttccttgcatagggatttctggctttcagcatctgctgacacacttggttctcaatgaagcaagcctggcaggcatgattttatagaacataaatctaagtgtgtgaggggctcacaggacaactaagccacaagcttctgaactgtcacttgggtatctaaataggctaggcttactctccatttaaagccagactttacccggtttcaagtggaaagttgtatttcaagttcatagtgcattttaaaatccttagatgatgctaaatacaatgggacatataaaaatagaggaaaaacttagcatattaccagtggcaggttaaaagatcactaatttcagtgggcagtatcataccacattatgccagagtttaaagatatttcaaaattcctttgttgcacataagttagtacagtaaccagcattaaaccttgaatatattttacttctaagggattttaattggacattttaaattgcatattattttcatcagtttctaggtaatttacccaacaatgcaaaattccaagaggaagtcatcaccttaatttctcctcaagaattttgaagagagttccagaaaataagaaacgacagatgtgcctggaatttcatttctattccatgttaggacagcgtactatagcrttctatgttctatattacaagcaggtctgaaagccatttccatagtgagaatgaattcctgaagaatctgacatagctgtccctgagcatttgccaatatcatttcaaatgattataggtcctctatgtgagacatgtatactcctaaagcaatgcaaatctaatttatctagcttcacttggtaacatattttcattggatttgatgaattgcttttcctgattttttgaaaaaatatggttttatgtccaataataacatattgtgaatgtcacaatttgtcttgtcagtcatggtaacacagagcccttgatgaatcagaaataagaagggttctctgacactactccccacttatttgttctcctagaggttacaaaagtgtaaatatctactttgcagaatataaagatgattagaaaaaagacacggccgggtggggtggctcatgcctataatcccaacactttgggaggccgaggcaggcagatcacgaggtcaggagatcgagaccatcctggctaacacggtgaaatcccgtctccactaaaaatacaaaaaactagccgggcttggtggtgggtgcctgtggtcccagctactcgggaggctgaggcaggagaatggcgtgaacccgggaggtggagcttgcagtgagctgagatggcgcaactgcactccagcctgggcgacagagcgagactccctctaaaaaaaaaaaaaaagaaagaaaagaaaaagaaaagaaaaaagacgcatagatggtactattctccggtctctaagaatactttctcacctgtcagcaacgtcaattacaagataggagatttggagattatgtatgaccaaactaaaactcttcagagatactcaaaataatggcattactcacacagggaccaaaaaaatatgtagcctaaaacaatattaatatggatctgcccacattatttaaggtcaagtttctttgtcctgtgcaatctgacctctgcctggctctctatccctgtttctttcctgtccttacctcacattttgttttaaccctgaattacttatgatgtctgttctcaaagtgtacttagggtttgttttaatcagatataagacatgctgacacaaaaatgactgtcatgaaggaagaagtccgtactcacagatccctagaaacagtagacactgcacaccatgcagggccatgtggggaatgaccagggtaggtcaggaggtgagacgaaagagcatggcccaaatccttgttggctatttattgaaaaggaatgagaaaggcagggtaggtacactaagtaagcttaggattggatagcttgaataattttgcaggactctgggctataggaactgtccctagttgtctgatacctggtcctggggtgatttagggcaggagaatattaggttgatgtgtaagagagtttgataaaggaaatggttaggagcatgggctctgcattgtttggcttgtgtgtatatgaaaagtgtacttgcaggagggtcatttgctatctctaggaattagctagctctgggaggggcaatctctccaggatcaaggcccgagatgccagagaatcaaggtcacagaaaaaacagtaaatgtcgtgtatcacaatatcatgttcttttttccttccccttttctcctgcagcttcctctatctgaaatccttctcccatatacttctactttttaacttatttttatattttacaactcagttaagttacaaattcatctcagaagccttgccagatcactcttgctagacctagactgggaaattgccactccagggtgttcacaagatattgtaagcataattctatcaccctttgtgtcatatttataagtgtatcttatttctaagtcttaattataaatatctgttacccaccatacaatgaacttcttcgggaaagaaatatctgatccatgtttgtatccccagcactttacatagtagkcattaaataaataaatatttgttgaatgaatgaagacagattcccgggtaagctatgatttctctcagtctagcttcatgtcttattttgagtccttcatgagcaacaatgactataaaatatagtttaagttcatatttcaactacactaatttcattaaataacaagactatgcatagttcaaaacatagcaacattcacttatagttctacaagtctctaaatgtatcgtctttcagagaaagtaagaatgaaaagtttaaacaaatacttcatatattgaaattttcaaccttcattatgagttttcaaggcaactaaaggttgcccagcaacactctgttgaaattttgttaagtttcaacataaagatcctaattaaataccaatgggaagagcaaagtcaattctagggtccacatgaagtttaatttttttcacacttccacattcccaaatacaacaatcatgtactattaaaatattttactgcccacacccccaatacatcaattatacaccattaaaatattatcaatgtgctgaaattttgttataataaaataataaagtagccattgtgaaaagattatatggcagcaatatgtgtggggtcattaagatgaatctatattatgcctacacctgaaaaaggaattcctattatattagtaaatgtttatcaagtttcagtcacatggaaataacttacaaaccctacaagtatccagactctctttcttctagtacctgtccctatctaaaagctatccactttatagtagaataaactaatatggcctgtgttatgaaggaaattaacatccttaatggttaactaaaaatgcaggaaaacaactggcttttttcattgtatgcatgattgaaaatgtgaaatatataggaactttcttattttttactctctaactacttaggattttattttatgaaaaaaaaaatccatgcatatgtatttctaaattcaaaggaaaaatgacatgtttaggcaaggcatggtggctcatgcctataaccacggcactttgtgaagctgaggagagaggattacttgagcccaggagttcaataccagcctgggcaacatagtgagactctgtctctacaaaaaaaaaaatcaaaaaattagctaggtacattggaatgcacctgtggttccagctacacaggaggctgaggcaggaggattgcttgagcccatgaggtcgagactgctgtgagccatgtttgcaccactgcactctagcgtgggcaacagagcgagaccttgtctcaaagtaaaatgaaatataatgacatgttcataaacacttttgagttgtcagatctgaaaataatcaatcatgccttagaaaaaaaggtacttcccaaacgtttttatctttaagtgattttagaaaagtaaatatatacaatttgattgattaaaaaaatatttctcattgagtactgtgtttcattttaaaggttattaacttcacctttaaaagggaaatgaagcacatgaactgtcagtgtatgaattaccgtatgactttaaattgtatcactcaaagaaaacagcacacaacacataaagaaaggtttggcatacgccttgctcagggaatgtttaaaagagtatgacatgcctacatatatcctgataacctactaattttaaaaattttaaaaatagactatctcttctaattttacctcagaaatatatttttgtgactattctgcttacatggaaaaaaccatgaggataaatttctggaattattgatctatatgactcatcagcctaatacttaagtaaatatatacaaattaatgttacctatatactaatgaaattgtacttatacaagttcacttattaatttccttagtatagaactaatttataaattatttctttaaaactacccttgatttattcccctttatttctatgcaatttaagttttagcaaaatattacaacttcaatgtttttaacctcaaaatagcatataacaacatctggtcaacatttaatcacctagttttatagtaattataaagtctctgcccttttaaatacttgctcagtctgctttttgttttattcataaccttttttatctgcttagataggaggggcaatttaacagctctgggaagaatggtctaaaaatctagaccggggataactggaaaagggatgctgaacgaatatctaattttaggtccatttgaacattttatcagaaaatatgaattgataagcattagaatcttcagccaagaccaacgctaacaagaaagtgaaaatgcaaggaggggatttttaatctcatgaattacttggttattaaaataatttctgtggcatgtcctataactgcagtgtagatatttaaaatgagttctttattattacctctaaagagcttttaccagttgggtagaagtagaattaacagacaaaatacatataatctttgggtcatacttatactaaaaaattgcttgttttttatttgaaattcacctttaactgtgcatcctgcatttttatttgccaaagttggtaacctatatagaagtacaattgtaggggctggacgcggtggctcatgcctgtaatcccagcactttgggaggtcgaggagggcagatcatgaggtcaagagatcaagaccatcctggccaacatgatgaaaccccgtccctactaaagaaaaaaaaaatacgaaaattagccgggcatggtggcgggcacctgtagtcccagctactcgagaggctgagacaggagaatcgcttgaacctgggaggcagaggttggagtgagctgagattgcgccactgcactccaacctggtgacagagcgagactctgtctcaaaaaaagaaaaaagaaaaaagaaaaaaaagtacagttatagggatagtaattcatttttccctcacatttggattaaagaaaatcttgatctttaatgttgcaaaaatatatgttcttaggaccaactacataatgcacagggccttatgtaaaatgaaaatgcaggacccttttcaacaattattattccaacatggcaacagtagagcattaagccaaatgcccatgaagccagggctattcttagaaatttagaatcctagacattaggctatatataaatcaagtasccttatattacagaagaacatagatgggttcagtttaactggaattggtctataccagcggtcaccaaaccttgtctgtaaaaagtcacatagtcaatattttagactttgaaagccatgggtttctaacacagctattcaactgtgccagtgtagcatgaaaacagcaagagacaatacataaacaaaggagcatgggctgtattccaataaaactttatttacaaaaacagctggtagaccaaatttgacccatatagtttgctgatcctggtgtataccataaacatgagcaaaatgacctgttaagtttgtttagattctatgcagatgcaagcaccaaggtaaaaatttagctaggaagttacagttgttcccctgggacattaaaacatctttgcaaaaatgtataatagaatcaattttttttttttttttgaaatggagtcttgctctgtagcccaggctagagtgcagtggcaccatctcggctcactgcaagctccgcctcctgggttcacgccattctcctgcctcagcctcccaagtagctgggactacaggtgctcaccaccacgcccagctaattttttgtatttttagtagagacagggtttcaccatcttagccaggatggtcttcatctcctgacctcgtgatccgcctgcctgggcctcccaaagtgctgggattacaggcgtgagccaccacgcccggcctagagtcaattttttctgtatgtatttttatgtttaaccaaattcaaacatttagctcaatcaaaccactgacccactcttgtagatcctttaagaatgtctctcagggaatacctagtaagacatgaaatctaagttccctttctcttcctcttctatttaatttttcttaacttctatatgctttgttgttggtaataaaacatacgagtcaagggcaagagcatgaagaaaggtatggaggtatgtcatggtctgtgctggagtgaagactgcatgacaggccaggcagggtggaaggggcgactgcttgtgtctgcaagcctccaagaccttcttggtgttccaagagttttcatgtaatacaagctttttgataaaatatatgaagcagtgactatttccatttcgaagatgagatccaaagagtttagatgtcttgcccagggtcgtatgtcagaaacaaaaaagctcttggcatcacagaaggtgcaaaaagtagaatcatagccactctctttgcttatagtcaaatatagacaaagaaccaaaaatacagacccaaagatcaaaaacatacatttatctagtttgggttacacagaaatccatctacataatctaagtattcagtgacgtcagaataaatgatggctctgtgaggcctacttacaaaaataatcagaaaccatagtatggagaaaagctagtttaaaaacaatcaagtgaaaaatataaactctctgactgactgccacaaagactcggctaaatgggcttttctcagctattttacttctccccaggcattaacctccctcccccaaggagcttcctttgaaagctaacccagtggtgccaagcaagtgcttggcaatctttcctttaaaatatgtggtgttatccaagcaggtcggataggctagatttctcctgaccaacattttggtgatggatttccaaggtaatccatagcctccgagtgtgagcagaagtagaaagataccacctaggacagcagactgtgaggaggtgtttctcactcatttgagtcagcacctgtcttcactaggcaccttgcagagcaacagcagatttgtctaaccactttgctttgttctaattttccaaacttgccaatctttgtggtagtcattacaggaatccaaaaaagatgcttagaattccaggatatggtattgtgtctcccaaggcgtgtgccttccttctgagttgtgcattccaacatgacactgattctagataggacttgcagtgagaggaaaaggaaaaggattattgccaaaggccttttcttcaaaccaagaagaatgtgtaaaatgaggggcttatcaaccataatatgtatcaaagtgaagctgcctgaggtgatgaaaagaaaattaaactttaagtcagagtctctagactcaaatacagatttcagaatggattagctaagagactttgatgttaatctcacttccatttccttacatgcaagacacaacaataacaacaaaaaaatctccattttgaggttgatatacagcatcatagagacaaaaaaaaattaatgtaaagattctgatatgtattgtatacttaataaatagtactttttgttatcatctgttgagtaataattatattttgtctcataaaaatgtatgccaaaattcagaatagattattttcaaaattctgagttaaagttgatgtaattaatatcataatactacttattaaaatataaacagtttctgttctatttccttattaggtatttggttttcactttaactttcttactatcatatctcaggtacttttatctaatctgtgaatatctagggcaaattcttcaataataaatactatattaaaataaatgtcttatcttctgacaaatgacaaatgtattaacaagtaagagaatttgttttcttctccaagcaactgaataataaatcaactttttccatttaaaatcaccatcttccatttaaaatcaccatcatcaattttcttattaatatggatttttatttaaagaccccagagttaatccttcagttctcaaagtttataatagtatagaaacactatgttttaaattcaggggaaacttataatattagacttaaatcaacaacctctaagaccctttcgggaaatacatctctttgtaaggaaagttttctgccattttatttacttgataaagtaaacagatattctcacacattttctaaaatacatgcagtaacggattaggagaaaagagaagagttttagaaaatcataccagatcatctctcctttacccttgtgctacattcattttctagattattagataaatcatattatttgtataatttaaattaataatatagaaacttgaagcatcacatctgtgttttttgcacaaattaactcatatatcacagaaacaagtcctagactcatacactgaggtgaactaaggaactgaatatctcctcattttccaaatgaaggaatggaggccccaaaagagagaacttttatgagtcccacacattcctatcctcattcttactcgatcaaaagggagattcagtttttagtcaaaattcctaattcttaccaaaacgtgtgctttgtctgcacatgctcccgggtgttagaagtcaagccttctctagaagggtgagaggacaaagagggcttgtggggtacccataaagtgctatctccggatctgggtgctggttcatacaggtgtgctcaccttgtgaaaatccatcaggctgcaagcttatgctttgtgctctttcctgtatatatgttatatttcaataaatttaataagatgctttcaaactttctgttctgtgataattgacatgtatcacattatagtagaaagtcrctcatcttttactgaacacctcctacttgccaagcattgtactgctaatgtaaagacaaatgaggttaaaatctaagccctcaagcatcacagacaagcaaatagttacaatactgtgaacaaagtgatgacagctgaacagaaaaggagctgtggggaccgggcgcctgagtcagctgtggtggaggtgaacagtgtgctgaggagaagcttcaaaaaattaacacatttgattcatgtcttgtattagttgtggattgctcctataacaaattaccgcaaacttagtagcttcaaacaatataaatggattatctcacagttcctgggatcgaaagtccaaaatcagtctcactgggctaaagtcaaggggttggcagggatagttcctcttggaagctctaagggagaagctgtttgcttgcctttttcagaatctgaagtctcctgcattcctggtccgtggccccttactccaccttcaaagccagaagtgtaacatctgcaacacactctctctctctgacctctgtttttgtcttcatgtctcctgttgatcttgaccttcctacctccctcttataatgacccttgtgattatattgggcccacttagataatccaggataatatccccaagccaagattcttaatttaatcacttctgcaaagtctctttttatcacataatataacatattcagaggttccaggaattaggacatggaaattgggaggagggtgaggaagacattattcagtctaccacatgtcctgaaagatgagtagatgttagctaactggacaagagacaaatgatatgactggaagaaggaatcagacttctgaatcctacactttggtaaatctggatagaaacgtaggtcagattataaagtcattattaatgccaagttaaggagactgtgttccaaaacaaaccacagaagggtcttaagaagagtgatatgatctcatgtgtatttttcaagtatattttgacaacaatgtattagctagaattagagggattcagaagactaaaagaggcatgaaggcatcaagctattgtgacggttcaaggagagggtctgaactaaacaaatagtttggagatggaaacgcaggtcctggttgaagagggacttagtaagaacctggtgagataaggatgtgagtaaaagcagggaagaaggtgaatgatgaataatagcatcatcaactaaaatttcttcaggaaaaggaggaaactagaggtggaagagaataggttctttattttttctaaaaaataaaaaacggggtacatgtgcagaacgtgcaggtttgttacacaggtatacatgtgccatggtggtttgctgcacctgttgacccatcctctaagttgcctcccctagaccccccatcccccaaacaggccatagtgtgtgttgttcccctctgtgtgtccatgttttctccatgatcagctcccacttatgagtgagaacacgtggtgtttggttttctgttcctgtgtcaggttttctgttcctgtgttagtttgctgaggatgatggcttccagcttcatccatgtccctgcaaaagacatgatctcattcccttttatggctgcatagtattccatggtgaatatgtaccacatttatccagtctattattgatgggcatttgggtttgttctgtgtccgtgctattgtaaatagtgctgcaataaacatatgtgtgcatgtgtctttatagtagaatgatttatattcctttgggtatatacccagtaatgagattgctgggtcaaatggtatttctggttctagatccttgaagaatctccgtactgtcttccacaatcattgaactaatttacattcccaccaacagtataaaagcgttgctatttctccacagcctcaccagcatctattgtttcctgactttttaataatcaccattctgactgctgtgagatggtatctcattgtggttttgaaatgcatttctctgatgttcagtgatgttaagctttttttcatatgtttcttggccacataaatgtcttcttttaagaagtatctgttcatatcttttgcccactttttgatggtttttttattgtaaatgtttaagttccttgtaaaacctggatattagaccttcgtcagatgggtagattgcaaaaattttctcccattctgtggttgcctgttcactctgatgatagtttatcttgctgtgcagaggctctttagttcaactagatctcatttgttaatttttgcttttgttgcaattccttttggtgttttagtcatgaagactttgcccatgcctatgtcctgaatggtattgcctatgttctctactagggtttttatagttttgggttttacatttaagtcattaatccatcttgagttaatttttgtataaagtgtaaggaagaggtccagtttcaattttctgcctatgacttgtcagttttcccagcaccatttactgaatagaagatcctttccccattgcttgtttttgtcaggtttgttgaagatcagatggttgtaggtgtgtagtgttattttctgaagtctctgttctgctctattggtctatatgtctgtttttgtaccaataccatactgttttggttactgtagccttgtagtatagtttgaaatcaggtagcgtgatgactccagccttgttctttttgcttaggattgtcttggctatacggggtcttctttgattccatatgaaatttaaaatagtttttttctaattctgtgaagaatgtcaaaggtagtttgatgggaatagcattgaatctataaattactttgggcagtatggccattttcacgatattgtttattcctttccatgaggatggaatgtttttcctctgtttgtttcctctcttatttccttgagcagtggtttgtagttctctttgaagatatccttcacatcccttgttagctgtatttctaggtattttattctctttgtagtgattgtgaatgggagttcattcatgatttggctctccgcttgcctattgttggtgtaaaggaatgcttgtgatttttgcacattgattttgtatcctgagactttgatgaaattgagtatcagttcaagaagtttttgggctgagatgatgggattttctaaatataaaatcatgtcatctgcaaacagagacaatttgacttcctctcttcctattttaatgtcctttatttacttctcttgccagattgccccggccagaacttcaaatactatgttgaataggagcggtgacacagggcatccttgtcttataccagtttcaaagggaatgcttccagcttttgcccattcagtatgatattggctatgggtttgtcataaatagctcttattattttgagattatgttccatagatatctagtttattgagagtttttaacccgaagggatgttgaattttattaaaggccttttctgcatctattgagataatcatgtggtttttgtctttggttctgtttatgtgatagattacatgtattgatttgcctatgttgaaccagccttgcatcccagcactgaagcagatttgatcatggtggataagctttttatgtgctgctggattcagtttgccagtattttgttgaggattttcgcatctatgttcatcagggatattggcctgaagttcttttgttgtgatggtgtcttttacaggttttggtatcaggatgattctggcttcataaaatgagttagggaagagtccctccttttcaattgtttggaatagtttcagaagaaatggtaccagctcctctttgtatttctgatagaatttagctgtgaatccgtctggtcctgggcttttttttggttggtaggctgttaattacaacctcaatttcagagcttgttattggtctgctcagggattcagcttcttactggtttagtcttgggagggtgtatgtatccaggaatttatctgtttcttctagattttctagtttatttgcttagaggtgtttatactattctctgttgatagtttgtatttctgtggggtcagtggcgatatcctctttatcattttttactgtgtctatttgatttttctctctcttcttctttattagtctagccagcagtctacctacttggttaattttttcaaaaaaaaaaaaaacagatcctggattcattgagttttgggagggttttttgtatctcttcttcaattcttctctgatgttagttatttcttgtcttccactagctgttggattagttgctcttgcctctctagctcttttaattgtgatgttagggtgttgatctgagatctttctagctttctgatgtgggcatttagtgctatagatttccttaacactgctttagctgtgccccrgagactctggtatgttgtctctttgttctcattggtttcaaagaacttcttgatttctgccttaattttattatttatccaggagtcattccggagcaggttgttaaatttccatgaaattgtgtggttttgattgagtttcctaaacctgagttctaatttgattgcactgtggtctgagagactgtttgttatgatttcagttcttttgcacttgctgaggagtgttttacttccaattatgtggtcgattttagaataagtgccatgtggcagtgagaagaatgtatattctgttgatgtggggtagagagctctgtagatatctactaggtccacttggtctagagctgagttcacgtcccaaatatccttgttaattttctgtctcatcgatctgtctaatactgacagtggggtgttaacgtctcccactattattgtgtgggagtctaagtctctttgtaggtctcctgttttataattgtgggtactcctgtattgggtgcatacatatttagaatagttagctcctcttaactgttccctttatcgttatgtaatgcccttttttgtctttttggatctttgttggttgaaagtctgttttgtcaaagactaggattgcaacccgtgcctttttatttttttccattttgttgctaaatattcctccaacccttcatttggagcctgtgtgtgtctttgcatgtaagatgggtctcctaaatgcagcaaaccgatgggtcttgactcctcatccaatttgccagtctgtatcttttaattggggcatttagcccatttacatttaaagttagtattgttatatgtgaatttgatactatcgttatgatgctttttggttattttacacaccagttgcagtttcttcatagtgtcattggtctttatattttggtgtgtttttgcagtggcttgtcctggtttttccttttcatatttagtgcttctttcaggagctcttgcagggcaggcctggtggtaataaaatccctcagcattttcttgtctggaaaggattttatttctccattgcatatgaagcttagtttggctggatatgaaattctgggttgaaaattcttttctttaagaatgttgaatattggcccccaatatcttctggcttgtagagtttctgctgagaggtccactgttagtctgatgggcttccctttgtaggttacctgacctttctctctggctgcccttaacagtttttccttcatttcaaccttggagaatctgatgattatgtgtcttggggttgatcttctcgtggggtatcttaatggtgtttgctgaatttgcatgttggtctgtcttgctaggttggggaagttctcctggataatatcctgaagtgtgttttccagcttgtttccattctccccgtctccttcttgtactccaatcaattgyagctttggtctttttatgaagtcccatatttcttggaggctttgttcattcctttcattcttttctctctattcttgtctgcatgtcttatttcagtaaggtggtcctcaaactctgatatcctttcttccacttggttgattcagctgttgatacttgcgtatgcatcatgaagttctcctgttgtgtttttcaactccatctggttgtttatgttcccctctaaactggttattctaattagcaattcctctaaccttttatcaaggttcttggcttctttgcattgggttagaatatgctccttcagctcagcatagtttttcattacccatcttctgaaggctacttctgtcaattcctccatctgatcctctgtctagttcttcacctttgatggagagatgttgcgatcatttagagaagaggcactctggtcttttgggttttcagcattttttgttgttgttgattctttctcatcctcgtgagtttgtctagttttggtccttgaagctgctacccttggatggggtttttgtgggggtcttttttgttgttgttgktggtggtggtggtgttgttattgtcgctttctgcttgtttgtttttccttcaataatcaggtccctcttctatagggctcctgcagtttgctgggggttcacttcaggccctattcatctgatttgttccaatgcctggagatgtcattcaaggaggctggagaacagcaaagatgggtgcctactccttcctctgggacctctgacctcgagaggcaccaacctgatgccagtagaattgctcccatatagagtgtctgacaacccctgttggagggtctcacccagttgggcggcacggggagcaggacccatttaatgaagctctttgtcccttgatggagagggtgtgctttgctgagggaaacccacttgtctgggctgcccagattcctcagaactaccagaaggagaggctaagtctgctgcagagactgcagccgcccctcccgctaggggctcaggcccagggagatccaaattctgtccctgagcctctggctggaattattggagatcctgcagggaagatccgcccactgaggaaggatgggtcagggttagacctgaagagccactgtaggccctgactgccacagccagtgtgttgggctgtggggacaagtcttgggaccaagccatccagcctccctggctctagcaggggagaagcgcagcttggagctacagaagtaggtgctgctcttcccctgcccagagagcttagcatgttaggcagtttcgagtcccagtgatggctgctgcccctccccaaaggagctcaaatgcttagacaacaggcagtggcaggtgctggatgcccctcccccggaagttcgataggcttaagcagattctagccgaagaatctgcgcattctggggttgggacgctaggccccggtggcatgggtttgcgagtgggatcttccgatcattgggttgcacagttccgtgggaaaagcacagttttcccagctgggtagcgcgctcactcactgcctcccttggctggcgggaggggggtccccttccccgtgtgggtcttccttctctccatggctcacgccagatttctagtcaattttgatgagagaaactggataccttggttgccagtgaaggattcatacgtttattatgtttttttttccatgggagcctcccaactcagctgcttctagtaagccatcttggccccactcagatgatagtttctattttggatacatcagatgttgagtttgaggtgcctagaagccttaattgtggagatacttagtcattaatcacacacattggtctattctactacatatgactaccagaggaatcttgttaaaacaccagattgtgtctcttcactggtcaaaaccgcaaatggcttcagtctcattctgagtgaaatccaaagccctcacaatggcctgataggtttttacaatctagcgacctctcagaacttgttctctcctcttcctcacctcactcattacactctagccaggcttgcacacagcctctgataaaagcatgctcccacttctgggcccttgaacatgccctttcctcagcctgaacctctcttctcccagattcccatgtgtttcctgccctgacttgcttcagggcttaatcatattttcagtggtgtcttccttgaccatcctatttaaaacttctccccacctcccaccccctcccccaatcctagtagtctgaatctctctttcctgctttagtttgtcgatagctagcactgttctctgtaaaagtacacttaactttatttgtttgtttattgttcttgcttacctcccgagctcctccccaaccactagaatgtaagtttcatgactacacatgactaccagaggaaccttgttaaaatgtcagattgtgactctttactagtcaaaaccattacaaatggctcgagtttcattttgagtaacactaagtggcacacaatagcaactcaataaatacttgctgaatgattagtgctggagcacaggaaagaagctcaaatagaagcattgtttcaagagtcacataagtagaggctgacattggcacatccacagtgctgcaaaggcatgtacacctttctagatgtttttatagctcttagattacaactgaaaaagcataaaaaggaggagagacaaagtctgtaggaaaaagaaaagtagtgtttaggcacttacgaaaacactcaaaaaaaatcaaccattttatacctcataatttgtgaaattataccttattcatacaagatcattttttattaataacatgaaaccaaagaattaactaaattttgcaaaatttatgcaacagtaaagatatgaaaggtaaagtttcttgcatttgagatgcctgcaatttttaaaatagattttaaaatatatcactgctcactaacacttacttgatcttatgtctctayttaatgatgcatcaaatgaaggtcgagttctagtgtttcagttcaaaacagttcttaataatagcatccttcagcatgaataagtgaactgccagctgagaagccaccctaatraaaacaggctcctgtaggaattgtaaagtggcttatgatgcttccagtgaacatcagaaagggcccataaagtgtagcataaagtgtgtacgtgcattttgtgattcctagaagacatgttggtaaggccataaaatgttagcaaccaatttaaaaaccagctctaggctggataatgaaagggctgagcttcttattaagtattctcacattttttattttgaattgcatcatgtgatctctttgagtctgagaaattttctttttaaaactctactgtgaaatttggaaggctctagattgcttccccatccttcagcattgacacaatatttcctatgttacactttgcagtatctaacatttgggaattttatccaatatgtggtctagatatgcatttttctccttcttataaacattaatatagctatctccaggaaatctgctcaacattctatttcatttcatacatctaaaattttgagctagtatttgtaaccatgttcctggaaaatatgacttaagtcatattcagtacctgggtagcctgtctcttttagtcctgtacatgtcataacactaactataagagctctttagacagcttatattcgagtgctttgaaaacattcatttgctgagcccaactgtatacatggttctataccacaaattacaaaacacacactagcacaagtgccaattttttttttttttttttgagacaggctctcactctgttgcccagactggagtgcaatgatgtgatcacagctcactgcagcctctgccttccaggctcaagtgatcctcccaccttagcctcctgagtagttgggactacagatgcacgccatcacaccttttgattaaaatttttaattaaaattaattttaaaatttttaatagagataagttcycactatattgcccaggctggtctcaaactcctgggctcaagccatcctcctgtcttggccccacaaagcggtgggattttaggtgtaagccactgtggcaggcccacagtgccaattcttaataaggagaacatatctctatctttagttatttaggccttgtgggtctaccactcaagaggaatgttacatgggccagtaaaaaaatatttgattgaagtttaaaatgcctctaaaaccagttctgccaccaactgtacaatttggggaaagtttacttaattccttctggtccagttttctgatatgcaaaatgaaagggtaaagtagatgatgtttaaaaatctaattaaaccccaaaatatattactcaaaattatttttaaatactttatctgtaattggtttatatggccatcaggttggcataataaacactcttagaataaataggcaaataatgtttcttactttccagacatgattaatagacagttaatcacatgtttttctatgctattatccttccatttatcctttcatttaaaaattgaaactcatcattacaaagaaataaacattcaaaaataaattaaataaccttaaaagtcaagttgttgggccaggcgcggtggctcacgcctgtaatcccagcactttgggaggccgaggtggacagatcacgaggtcaggagatcgagactatcctggctaacaaggtgaaatcctgtctccactaaaaacacaaaaaattagccaggcatggtggtgggtacctgtggtcccagctactcgggaggctgagggaggagaatggtgtgaacccatgaggcggagcttgcagtgagccaagattgcgccactgcactccagcctgggcagcagagcragactccatctcaacaacaacagcaacaacaacaacaacatcaagttgttaaataaaacaaaaacttatataatgaacatttttgttgcttaaattgaatgtattccctgctgttgcccttttaacacaaygccaattttggttaaatcattaagaagggaaaactaacaaacacttccatggtgcttaccatgtgttcttagtagtttacatctaataactcacttaaacctcagagtaatatcatgaggtaggtcctgttaccacctccactacagatgaagaaaccgagagtcagcttgcctgaactcacagagcaggtgaacagaagaggtgggactggaatgcaggcagtgggacactagagtctgctggtcaccacgctactcctcccacacacagccagtctggcataggaagttaattccctacaacttcaggagggtctcttgattagtagccaatcatatcatcccaaccamcctaccaagtactaaatggtattcctcaacatcccgtgatgctccagggtagtgtgcaacctaagttggaccaatcagactaaaggtaagaatctttactccttggtgggagggtaggtttactcagcttcagccagagagaataaggatgcatgttaattgccaattctgccaaccgtcaaccaactgccaaccatgaaggaagccagcttaaagtaaagaaggaagagggaagaaccaaaataatcattaagatgagaaagcgaagcctctattgtactataccctcagcctgctctgtctctgtctctgtattttcctctatgttctctcattgtttaagccagcttgaatcagggtatcactttcttctactcaaaagcatcctgagaaatactggtataattgagcaccatatttacaaatcctaaatagttaacaatcattgtttaatctaactcatgttttctccctgccctgatcccaggtcctgttaatatacatttttgttaactcccattgaatctttactgctgagttttttcctctccaggagattcattaattggacaaagatttattgagcacttactctgtctgaggcatcrttaggccatgatttagtcagataaatgagtcacagcccctactctcatagaattaaggtctagaagggagaaagacacataaatcaacaaattaccataataggtgatggtgctataatagataaacactgtgtgtgtagttgtgtgtgtgtgtgtgttgtgtaggtgatctgacaatacagaaaatggaatttctaagatggtttggaggacttgatgagtgcttcacagtagaggtgacattttatttgggtcttgaaagatgactaggagatttataatagagaaaaggcattctagggactgggaaaaacawggtcagcagcatcgaactatggaagtgttgggaatgtaggttaatggcaaaaagttccaagtgataacatccttcaaaaaatttaaaagagacaattttcaggatgtcaggcttggccaatctcaaaggtccttctaattttttgttgtcatatatcaagtagctggacacttttcttcccctcagccaacatgatctctgtagggttaacagagctaaataaagagtcaaagctgtgtttctttggtttttgcatttctctgtctcaggccagaagcaaaaagcgcaaagaagtactcaatcgccatatggtgtttatgagatcctgatttttgtgaaaccctgtggttactttttgacagccatataatttctcagtgtgtcattggtttttttctaatttttaaagcttgtgtttcacaatcagtttagagagattatttgaaaattgctggttgtttaaattaaaatgttaaattcgtttgttaacatcttttgtaaagccagctcacaatctcgtgtgagatacaaactgtattctaaccaacagtcaagaaaacttatcaagataactcagtaattagtttttttaaaatctcaattcatcattcaacatttaaacaatatacctttactaggcacctaccatatgcatattataggcactgggaattttatgagaaggcagcctagaagttagtagacattaaatgatgaaatagttaaatctcaaatggctacagccagaaaaggttttttatgataccacaaggaagttttatagagctcatgcttcatcaaagaagaatctttctcaagtcagactccacagaacaactcttcttgcccacctaaactgagaatcgggatatacgatctccttctaacacaatgcagggttaaccagaaagatttactcctgtagactgaggcaaagagaaacagactgaaaacaccaaagagcagtaatatcattatttctgtaataaagagctgctgaactgcaatcttattaaatatttcaaaggagaacaaaccataaatctgagtattataatggtgagaataaagatgtgctatcaataaaggcactattggaaatctaagttctgaacaaattcagaaagacttagaaggctctgaaatactttttaaaagtataatttagcacaggaaaatatagaactaatctaaatcagcaaaccaaaataataaaggagaakaaatctaaataggcccaagtaaattcccttggccatatcaacctctggcttctgtcagttcccttgtgaggagaaactaacggctaaagccagaattttattatacatacatgcatacacacacacacacacaccatatgctttcagatgcatataatgaaacctaacagtggctaaaataaataggagcttatttttattgcttcaaaagacatctggaggtgggtggctgctagcattggtttagtggctcagttatgtaaggccagtgtctatgattctcctgtgcagattccttcatcatcacaaggcggttgctgtaattctaagcatcacatccccattagctgctaaaacaagtaggggtggacctgtgcccaccaaattgtccctgttaatttggaaagagacattttctcagatgctatgccagcagacttccacttgggtagaactatgtcaccccttttgtcaaaggaagctggaaagagaactttaaaaaatctttccagcctctataatgtaagaaggcaggagaaaatacggtttggaagtgatttggggtcagtcagaaccaggtctatctgcacatacaatctacagtaatgatcagtacatgggatatagttttttggtccagatagtgggtttgaccactgccaacaaaaggtgaatacatttttattgtatcaaatcccatattaaatactcttttcaaatattttgaaaatatacttctaggccaggtgggccccctaatgacaactgcagtcaagatgcttatacctatgagagcaaaccaaagaaacttcataattatacaatgataccaaaacaaaccacatttctgactatggagtctgcatttgacagaaccatcctgagaatgggaaataaaaatgctaagtcaytgaactacaaaaagcctcatgtctaaaaaggggggaaatcatatgaagtaaggatggacacaagtgcccaaaaatagagtatctagaaataatatctgatgactatgtctcatactttgcctttgtctaaaagaggaygatggactaaaaaacattttaaggtcttgtcatagtgaatagtccagctagactcataggaatgccgatctttacaaacttttcaggaagtttatgacatccaaggagctatgatcattgattaaataaatctgtttgtcttgggcaagaaagggttttgaaatgaacatttctctccagtaatcacagaggcaagtggctggttttaaagtagtccttatactgtatttgtggtcatcttaagtactcattcagaggtcttaaaacatcccagacagacttactctattctattttaaacaacattaacagaaggcaattctacatcctcaaattaagcatctcataaaaataactcttattcccgctgaactatgcttttgctgttaatatttactgaaagcctagagaattttagagtgaaaaaattttagaaggaggcaacatctatccaactttgaagtgaggaatcaacttatctctgaaaatttaattaaattacatctcaatttcatagaggagtcatctagcattccctgactctctttaaacttatttattatggaatcaagaaaatggcaaagaaagtaaaaaaaagtaaaccacatagtttctgaaaatctagtcatgttgtaaagaagtcatggacaatgcttccttaacaatgtactactgtcaaggaaacacgttctcaaagagccagactgattaatttcaccagtggtcatgagctacaacacagccaggggacatgacagattgactctaggagaaaactattatttttcctctgcagccaatgttgtaacagttgaaatcatagctgggatgaagtaagctcaatcatgcagttaaagtgttgctttgaaccaactagccaataattttctcactaaaataaaacttcagggagcaactcagagaagtgaaggaattgtccatcacaaaagatatttgttcccacattagaagcctaaaactgatgctgattcttaaaatcactgaggcaggattgcaatctccattctcaatgttaaatagaacatcgtttttattttattttattttattttattttattttatttatttttttaattatactttaaattttagggtacatgtgcacattgtgcaggttagttacatatgtatacatgtgccatgctggtgcgctgcacccactaactcgtcatctagcattaggtatatctaccaatgctatccctcccccctcctccctccccaccacagtccccagagtgtgatattccccttcctgtgtccatgtgatctcattgttcaatccccacctatgagtgagaatatgcggtgtttggttttttgttcttgcgatagtttactgagaatgatggtttccaatttcatccatgtccctacaaaggacatgaactcatcattttttatggctgcatagtattccatggtgtatatgtgccacattttcttaatccagtctatcattgttggacatttgggttggttccaagtctttgctattgtgaataatgccgcaataaacatacatgtgcatgtgtctttatagcagcatgatttatagtcatttgggtatatacccagtaatgggatggctgggtcaaatggtatttctagttctagatccctgaggaatcgccacactgacttccacaatggttgaactagttgacagtcccaccaacagtgtaaaagtgttcctatttctccacatcctctccagcacctgtcgtttcctgactttttaatgattgccattctaactggtgtgagatgatatctcatagtggttttgatttgcatttctctgatggccagtgatgatgagcattttttcatgtgttttttggctgcataaaagtcttcttttgagaagtgtctgttcatgtccttcacccactttttgatggggttgtttttttcttgtaaatttgtttgagttcattgtagcttctggatattagccctttgtcagatgagtaggttgcgaaaattttctcccatgttgtaggttgcctgttcactctgatggtagtttcttttgctgtgcagaagttctttagtttaattagatcccatttgtcaattttggctttggttgccattgcttttggtgttttggacatgaagtccttgcccacgcctatgtcctgaatggtaatgccttggttttcttctagggtttttatggttttaggtctaacgtttaaatctttaatccatcttgaattgatttttgtataaggtgtaaggaagggatccagtttcagctttctacatatggctagccagttttcccagcaccatttattaaatagggaatcctttccccattgcttgtttttctcaggtttgtcaaagatcagatagttgtaggtatgcggcgttatttccgagggctctgttctgttccattgatctatatctctgttttggtaccagtaccatgctgttttggttactgtagccttgtagtatagtttgaagtcaggtagggtgatgcctccagctttgttcttttggcttaggattgacttggcgatgcgggctcttttttggttccatatgaactttaaagtagttttttccaattctgtgaagaaagtcattggtagcttgatggggatggcattgaatctgtaaattaccttgggcagtatggccattttcacgatattgattcttcctacccatgagcatggaatgttcttccatttgtttgtgtcctcttttatttccttgagcagtggtttgtagttctccttgaagaggtccttcacatcccttgtaagttggattcctaggtattttattctctttgaagcaattgtgaatgggagttcactcatgatttggctctctgtttgtctgttgttggtgtataggaatgcttgtgatttttgtacattgattttgtatcctgagactttgctgaagttgcttatcagcttaaggagattttgggctgagaccatggggttttctagataaacaatcatgtcgtctgcaaacagggacaatttgacttcctcttttcctaattgaataccctttatttccttctcctgcctgattgccctggccagaacttccaacactatgttgaataggagtggtgagagagggcatccctgtcttgtgccagttttcaaagggaatgcttccagtttttgcccattcagtatgatattggctgtgggtttgtcatagatagctcttattattttgaaatacgtcccatcaatacctaatttattgagagtttttagcatgaagggttgttgaattttgtcaaaggctttttctgcatctactgacataatcatgtggtttttgtctttggctctgtttatatgctggattacatttattgatttgcgtatattgaaccagccttgcatcccagggatgaagcccacttgatcatggtggataagctttttgatgtgctgctggattcggtttgccagtattttattgaggatttttgcatcaatgttcatcaaggatattggtctaaaattctcttttttggttgtgtctctgcccggctttggtatcagaatgatgctggcctcataaaatgagttagggaggattccctctttttctattgattggaatagtttcagaaggaatggtaccagttcctccttgtacctctggtagaattcggctgtgaaaccatctggtcctggactctttttggttggtaaactattgattattgccacaatttcagctcctgttattggtctattcagagattcaacttcttcctggtttagtcttgggagagtgtatgtgtcgaggaatttatccatttcttctagattttctagtttatttgcgtagaggtgtttgtagtattctctgatggtagtttgtatttctgtgggatcggtggtgatatcccctttatcattttttattgtgtctatttgattcttctctctttttttctttattagtcttgctagcggtctatcaattttgttgatgctttcaaaaaaccagctcctggattcattgattttttgaagggttttttgtgtctctatttccttcagttctgctctgattttagttatttcttgccttctgctagcttttgaatgtgtttgctcttgcttttctagttcttttaattgtgatgttagggtgtcaattttggatctttcctgctttctcttgtgggcatttagtgctataaatttccctctacacactgctttgaatgcgtcccagagattctggtatgttgtgtctttgttctcgttggtttcaaagaacatctttatttctgccttcatttcgttatgtacccagtagtcattcaggagcaggttgttcagtttccatgtagttgagcggctttgagtgagattcttaatcctgagttctagtttgattgcactgtggtctgtgagatagtttgttataatttctgttattttacatttgctgaggagagctttacttccaactatgtggtcaattttggaataggtgtggtgtggtgctgaaaaaaatgtatattctgttgatttggggtggagagttctgtagatgtctattaggtccgcttggtgcagagctgagttcaattcctgggtatccttgttgactttctgtctcgttgatctgtctaatgttgacagtggggtgttaaagtctcccattattaatgtgtgggagtctaagtctctttgtaggtcactcaggacttagaacatctttttttaaaggcttataaaaattggggtttttgtaagtattctcggaaataccaaaacgcttgctctgatcacacttatttttcaacagaagataagctaacatccaaatgcagttcctttatgaagatgtaacataaaagtgacatcaccaagktaactaatctgctgaatcagagtaacatatccttgggattctattttccaaagaaaaataatgataaagatattctgatttaataaaagaaaaaaagaaaaaaaagaagagactaaattggagatrtggtaggatcgagggtatggtgggtagagagtagkaaaatggagaagccctcctagctgagttttgcctgggattttgctactcatccagtttatcaacagcagttcacggtgggttctaaaataaactcacctgctcttttttattgtgctctatagagttttmagaaatgtatatccctgtgtcaatgaataaagagcatgaacggaatwtgatatgaagtttttctgtgggtgacatctctctctctgactctcactcttcttcatcaatgcaccatgacmttttaagacaggacactgagtcagaggaagacatctcgagaggaagagctgcattcctctctgaaggcatatatgctgtcctgatagtgtatctgctgttcagtctgcccgtaagcagtgctaggctgggaactttggagaccacaccatatatctaactcaaagtacaatcttattttgaatgttaaatgtggtatctatattgaacgtttttttaaaaaatcaaggttctgtttaactttttttcaattgctaaattctagaaaagtttatcaaaagcaaattttatttttctgggggatggggtgggagggttccctctgctttgccaagaccctaaacataaactaaaattggcctctgaaataatccagcactaccttgctatttagtaatgttatttgtctcatcttagatatctgtttgtcttaattttcaccccaatagaatgtaggttccttaagaatggagaatatgttttacctatttattcacagcatcaaattgtycctggtgtgtgcttagtacctaaaatataattattcaattaaaaaatggaagaagggaaaaaaagaatagagaaaacaaatggaaaggaaggcgagcaggtgtcagacaggtacagtaytactgaatgaagcaattacaggcaccagacaagtttctacatttaggaacctcatttatagcaagcacaccagaatcgagatatttctccatcttctcccacaagtaatttttattgtattttgtacattataacattgtctgtagcttttgtctctacaatcaaccaatctcatacttggccgaactagtgctttcatcccagtgcatgatgaatgtgtcagtagcttgctcatcctctccagagaatagtggaaatatatccttaaaattggcctactcattttaattgcccacagtcaaaacctacagagttatagctacaatgagaaaattatagctataaagttgttttataaaagtttccactccttcaattatcctgttttaaaattgaccaaaattaccaacattctctttctgttttgcttattctgagacctgagagttccattaaaattagagaaaaaaaattttcagatcttcatgggaataagatatatatctcaaaaagagcaaatatttatttagtaagtacctagatttttttctgagcaaatagccacattataggtaaactaaaaatcatacttcttcttatttttagtttttgtcagtgatttgaaactcaacacacttctttccaaatatctgaactttatgtattatactccatttttttcttttctttctttcttttttttttttttttttttttttgagacagagtctctctctgtcgcccaggctggagtacagtggcgcgatctcggctcactgcaagctccgcctcccgggttcacgccattctcctgcttcagcctcccgagtagctgggactacaggcgcccgccattgcgcccgccattgcgcccgtctaattttttgtatttttagtggagacggggtttcactgtgttagccaggatggtctcgatcttaacctcatgatccgcccgcctcggcctatactccatttttaatggttgcattaggtcttttacaacagatagctggccatgctatctcaattcctctgtctttccttcaaatatcatttcttattgtgtcatcttaaagaagaaaatagagaagatataggacactagcatgaatatatctccaaccataaatgaccaacaagttggcatttttattaatcccctaatattaacttattttattgtattttgctctcatccaaacagaatagttgaaagaagcaaaagtccatttaattaaggtaccagcttaggttaggttgggttacggtaaattggtaaatatgatacactgtagcttaatttgctaataaaaaggatgaatactgaatccatgtaccatatccactcacagtgaattccctaggcagtcttcttgagtctagcagaatgtcttaaatgttgctaaatcttcctttgggactcacgtgatccatttatcgcctcccttttttcttctattttttatcttccactgattcaacaataacttcatacctggttcacagtctccctcttcatcactgccttcatgctccatgaaattagtcctcacgtggttgaccagtttgataatcttgcctcacactctttgtcctcagttctatttattacccacctmcgcttgacttcaggcatccacattttagctttctattacctagaacrattccattttttaactcttaaactccaagttcaaatttgttgaaccacatcctcttatatcagttcctcacacacattccatgcccttttccctttaatctctccatttgttcccaattcatcagtccattcctatttattctcttttctacaactaatctaagtgtcattctgaatatactcttgcagactcccttaacacattctcctgatcgattcatcacacacacaaggcaaaacttcagacctggatcagttcagctgtatattcattcttcttctatgcctagactgataggacctactagagaaaagtcacaatgctcaatcgtgaagatgaatgatatgaaaaattcatgaaaaaaggattccggcttcaagtaaactctgaaaattggtctgcagtcctggtcatctccwtattctttgtcccacagagtccacatgaaatcattgcaggatctctattgtcattacctaccttatcatttttagcaaatcaccttaactccttacttcatagacgaaagtcatcatttgcctctccccatcactagattgtgtataactaactcaacctttccttactcatttttttccaagtggaggagctcgttctccatttatgtactattctctcttccccattttccttgttctcaggtgcctcctcctataaattaacatcctcctgtcaactcctgggttttaaaccccttctatgttggtttacccccactgtatctataattatgttcaaaatctttaggaatccatgtcccctctggataccacattgttttttccttttcctttcacaattacactggtagaaagaatagtgcatgcttgctgtcttttcttcctcaccataaatttatgcctctatccaatgcaatctgccctttatcccactccagccaccaaatctttgcttttgtctcagtgttgactccgaacttcaaaaaacccaaatggaaactttcaattcatatcttacctaacccttctgaaaaatatagactactgcatcctttttgatattatttatatctctctcctttaacctcattcaagtctttgctaaaatgccagcttcttggtgagacttacctaaccagactgttacttaaaattgcagcactgactcctgcactcccagtctctcttacattgctttattatatttttattgtacttaacatcttctaacaaaatgtataatttacttatttatttctgtctcatttyggtagcatataagctaatttgctgttttcactgatttttatcattttatataaagtaataacaaaaaatgtttgtcagaagaatggatctcttggtttccagggcaacagtctctctgggcttttctcctgactcttgagtttttctttctcagtctcctttgcaactcctgctacatatcccttaacttctaatgttccccaagtttccttacataggctctttcttcatatttctccctgagacatctcagccactgtcatgattgaaactatctccttcatgttagcttctgaaatatctatatttccattccaaatctttctcttaaatcccaaatccatatatctaatgtcttcttaaacatctacatttggaggtcccacagacaacacaaacacaaaatattcaaactctcttccaacctaccatagcctttcactcacatgattgtaacctagatttatatttatatgtcttctgtaaagtactatttctaagttaaataagatattttaccaaacagctctgtatagaggtaaaaatggtactgtgaatgtgaaaatgaatctgtgctttatgcagccaggaagcattcaaaccacattaagagatttatatttccaatagtgggaaactgaggtatttatgatagatcaaagaaagccttgctttcatatcttagtgatgctttttctataattttgaataatcattaggtgattagtgacttggtacactgaattttctgtaataaatatataaagatataattttacaacattaccatccaagccatttgcatctacaaatgaaaaccatcagctatctgccattatccaataaatttaaccaagatgatcacagttcagagataaaccatacatttataattaaactatgttatctccaaatgtcagaggaagtgwtacatgggcaaaatctgcatcattctaaataaaagtcaaataaatattacatatacaatggagtttggtgaaaataatactaaagttgaaaaccgacaacctggattcaaatttctcttttactactcattaaytgtttggcttcaagtaagttaataatagccattcactcttctaagagttttgcattttacaattctcacaataaccctatacaacaagcactatcatttyccccagtttccagatgaagacactgagtagcctaaaaataaagtattttacccaagatcactcagtctcattttggacccaggctgtttgattctagagcttctgtgttcaatgtcattctgttttgaggctttccatttgtaaaatacgagtttcatctctaaaatagggttttaattaaaatagcacataaaatattttgtaaattttaaatcactatcaaatgtaacatgtggaattattagtctaataaattgctaaacttccaacagtggtttctttctttaggatttgtactgcatcactctctaaataaatttgagaatctcttttcttgcagtggattctgtgaattgaatttcatctatgagtcttaagaactgttctacgaggaccttaaagataatattaaaagtccattgaagttcaagggagagttcttaggcaccctggcaaataatttccatagtagctccctgtagaaaaatgtactacaaatcaaagctgtctgcattctctaacaatcaatgggtcactcttcatatatctttcttaaaagaaaacacgtgactggctttctatagaaaataaaattatagggaagtcagattttaataccattgaacaaagacagttagtcctataagaaatattttatccaaaatttcagtccactataatatgaattatagttacattctttcatttattcattcatttattcaactaactttactaagtatttactatgcaaggcattgcattatatgctgtggatgcaatgaagagataaacatcattattgtcctcagagggtttactgtccagtggggakaattttttactaaaaaagtacaatacaacataataagaaaagtttagtgtcctataagaggacaaaggagaagcaattaacctttgagatgtttgacacatatttcaatggctatgctaatccatttttcatgacacagaaaatacagcatctttgtaatgttttagcgctttgcaaactaaatattaagatatcagctcattccaaggcctaccttaatacagaagtagatccagcaacttgtccttcacaataataatagtttcaataataattcatcacgtaattgttgaccacctctttggatgatactgttgaatcactttgacaatttaaaatcatttgctggtgcaaagtggaatatgggttttcttttttgtaacaggagctaaatttgtctgtagatatgccaaaccctacccaagttaggaactttaactgtcacgtgcctttttaaacttttctctagttctgtttgatccaacaaatccctaattagaagcataatgtgtgtgggtaaagggttaacaaaatattttccctttctcccttagaatctgatctttaattcactttctagatctattcccttgacaacctgataaaggaagtatgtcaaatatgctaatagkcaggattgcttggggtaaaaataaactgattggctaattgtatgtggagtgagaaaaattataaataaatgataaatacctgatagggatactatagctttagacttttgtgactggacatgcctttttcagagaccacagaagccctgcctatggagktgttacaaragatactggctcctgtgggacatgtggtttttaaaccaggggaattttcacagctgctctgagaatcattctttcatagcaaagagaaagcaaagagtatagctcttgtgctgcagcaaagacttcaccatgcactgccgtgagggctagttccacagaagagtaataactgacattgccctgctgggcaactaaggttcttgtcccatatgcttctaagcaaatttgatgccatgtgtaatttatgataatcttgtgagtctaattatttaatataactgctatgatttgttgcgctatgatttgttatgaattgctatgaatgtgtcctccaaagttcctgtgttggaaacttaattttcaatgcaacagtgttgagaagtgggacttttgagaggtgggacttttragaggtgattaggtcactatagcgggagtgggttagctatcacaggagtgggtttcctccccctcccctctctcatgcacatacaatcttttgcccttttgccttcagccacaggatgacacaaaaagtaagctctcaccagatatgggtccctcgacctcggatttcccaggctccagtactataaaaaataaatcgctgttctttataaaatacccagtttccagtaccctgttgtagccgcataaagcagactaagaacctaaaaagaccccctggcccccaccttcagagtttagggcaaagtaatggcagataatagaataatacataagtaattaataagcatgtcaggaggtttctggttgcctttttaacacgcctcatgactaggctcctagtgtgtactgaacctagtacgataaccatatgcttgacatatagtagaactgaagaatgttttgttgaataaattaagcaattaattaattaatgagtgaatgaatgaatgattctaaccaatacagtgaaaaaaggaagctagagcttcagctctcaagtctcatttgatcctaatccagctattcagttgccccagctctgccctatgcttgattccgaagcaagtttcttgattctctgcctaacatcttgtgctggctaacttccacttgcacctccagatctcctctccaacttttctccagtctactctgtgtccaggaggctgggcagcatggaacttatcaacagactaccttgccctccagcttcctgtcgtaccaacaaaggccacaataagttattggatggacagtaggacaggagatgaagtatttactcctccagctccctacctgtgtggtgaatcaggggctgcaaaggtcacagcttttgtgatatgaccctctccacactaactatcatctccaggtttcaggagtcactgtctgtcaccatgtcaggtgtatgagtggtggtaacagcttcttgttgttactttcctcaggagatcacattgtcccttgttacttctctatatcctgtccacatgtttaaattagttcttttattagatattcctgaaattgccaaatgtaagcatgatgtttctttaagatcctcaactggaataccttttctttagctatttttcaaatcttttgcaatatattttcctgctactaatgagtctacttggttcaaccaccagccatgacccaccattggtgctcctgtttctcctagaagtatgatgataaatactatttttcctggtctaatctagctggaatcgcctttaacccttggtgtttcctcattgccctccctccaacaagaccttgctttactttccctggtccaaactaactgtccctcccttatagccactgccacttatatactggcatgacaaatagggattaatttttgttttggagacataagcaggatatagttgaaagaacaaagcctttaagtctggcttgatgagggtttgaatttcaatttgaccactttactggtgcctgagtaagttgacaaaactctctgagcctctgtttcttctgcaaattaggaagaacaagacctatctttacctgtgaggttttttgatagacactgaaaatatgcattgatatttggcacacaatatgtgctgaaaaaatagtggtagactatattrttattgataacatcattgtaacccaaacacattccaactaaggaatcatttccaaaggtccattcagctaaatagagaggcattaaaattctctttagctgcaaaaatctctcattgctaatttctctcatatgaattcacaataacaaattatcaccattattggttatagttgttgcttaaatagaaaatattttcttgtttctagttactgcgaatataaagagcagaaaagttatatgttccagaattttattattttatttcttgcttgtattaaaatgtgttttaattttgaaatttgaagttaacaagaaaatgttatattaattccattctttcccctatcaatgcaacatactatgacagccttcattgtgtataattttcctttaacattaaagttattttttgtaaagttgccaagatatctggcacagttgccattccaaattaagaatatggtctttcaaagtgcaaacattcacagagttaaaaaaaccttccaaggcaaatgaatttcacaccacccaagaacaagaagagacatgatacttctgtttaacttctcagcatgcattagacaaatctttaaatagccccactaactgaatcagccttataggctgaatagctggtaggttgtgagttgcaatttgtaaggctgccagaaaagacttcttaagtcttctccctttctagtcccccacaatgaagtctgaagctcctttgataataatgaagcctgtcatcttctaattagaaataagtttaaaatgcacaaagttattaaacttaatttacagtgagatttgtttttgttttttcctgattctgataaaggactatgccagggaggaaactgaatggttgagaaagaaaagacgggcaaccctgaagacaaacattgtcaaattcacatttgtgcctaagactaaccttgcacccatctcttcatgatttaaacagaattcattaatatgtttctttctgctaaattatgtccccttctctaggtttttgatggccctggacttttttttttttttttttttttgtggtggggtctcactctgtcacccaggtggagtgcagtggagccatctcagctcactgcaacctccgcctcccgggttcaagcaattcacctgcctcagcctccaagtagctgggattacaggtgtgtgctacgacacccagctaatttttgtatttttggtagagacagggtttcaccatgttggccaggatggtctcgatctcttgacctcgtgacgtacctgcctcggcctcccaatgaccctggaatttatatggggatcctgagcctgttcagaagcattcctttgcccaacagccttaaaaagtattatgatatgggccggacacagtggcttatgcttgtaatcccagcactttgggaggcaggtgtatcacttgaggtcaggagtttgagaccagcctgatcaacatggcaaaaccccatctctactaaaaatacaaaatttagcctggcatggtggcaggcacctgcaatcccagctactcaggaggctgaggcaggaaaatcgcttaaacctgggaggcggaggttgcagtgagccatgatcatgccactgcactccagctggggtgacagagcaagtctccatctcaaaaaaaaaaaaaaagtattatgatatggattcactattaaaccccaaagtggcctgccaagttatggaatctgtttgagtaaccatttatataacttgaagtgcaatggctttggtgaaagagaaaggaaagggtttttcattttgctttgtttcgggcagtaagagaagagaaagagatgtaaaggataggaaaatgcttagggtcccatttaacccctcaggatatttgaagcacaaatcgagagccacattaagtgtagaagctggagaatctacttttaataagtttttttctgaagtcctgcccacaagcagtgctatttcaatgtcaaagtgacagcatgccacccattgttgagttggggttcattaccgcttctgcatgaatcctaggcctgctctgaccttgaggattaacgacttttccaagcagcaaggaaaaatacctttaacacagacatcagcattttcgcatctaacaatatagttgcctcataaacagagatatgggtatgggaaaggtggaatcaaaaaggaagaactggcagaaatgtggtaaacttgtttggcagataaattcaaaagaacatgtgacgaactttgtgaaatttccctgaggtgctcactaggtgtaagaaacaacagaggaagagaggaggaatatctggtaaatggaggctggagttcagtttcaccaggttaaactcctgtgagctcccaagatatgtgaaataagccaatcacagtaagatttggtttttctggagtcaaaaggccttggtttcaaatacttgcctactacttaatagctgtatgacctcggcatacagacagttattcaacaatcagtacttccttttcctcatctgtattaatagtctctacctcacagtattgctgtgaggtttgaagggttaatgcatgcaaaacagagtactaactggcaataatatttgagtgttataatttggttccatttgtacaaacaggctgggatgtcagcatcctctaagccaaatagatatttcctactttctctaccactacaagtcaattagagtagcaattggtacacatcataaaaatatccattcaaatcatgtaaaaataaataaataacagaagaaacttatttgatacttgattgagaagtatgcatcaataatatctcagtgaatcataaatgaaccagaattttgagaagctttattatgtttgcaactctgaaattcagttaatcctcttaagctttgaatttattactaaatctacatctatataaccatctaaacaaccagacctaggcagtataagatattaaaaatataataacacatcaagtagtgttatataatattatataatattttctgcaaaattacattttattatatatagatatgtatttatgtattttcttttggtggtatggatgtgtattggtggtatagatatgtatttatgtattttcttttaaattggagtccagatttatttcaggagccaagctgtatgaatcattttggtctccagcacaagcttctatgctgactgattagatgaaactaattaacaggtgtgttattcaaatgtaaatgacatgcaatcatttgaaaatgaattaatggctacaaaataaatactgtcctgaacagaaaagttcacagaagttattattttagcatagatttcccacaaatatttccatttgattatggaaaaataaaattgccttccttcaggtttgtaaatagccaaaataaagtttctaacaaagcgtcagaatcaaaagccacgtaaatgtaattatttctatttatccttgtcctcctaagcagtaactccagctgtgccaaggctttcatgctctgtgtactcctgtaagctactctgccccctcaagtacaagatcagccacttggaggtctagaaatactacttgctttgagacctacaggaccaaatccctctgccccaaatcctccattggcttctcaccctgagtaaaaggcaaattgttcacaatggtctataacatcttaaatgatctgttccctgcctctcctggcctcatctgctgccattctccttatccccagttcatttatgttgacctctttgcagttcctccaataagtcaaacacacacccgtttcatgatttttgcacttgcttttcactctgactggaactctttctcctagaagctcacatgactggtaccccactttcatcaaacttctggtcaaacaacaccttattaaagtggccttccatgatctcacttaaaaaaaaattagcaaaacctatctctaccttcagcactctcccttcctcttctgtttttatatttatccatagacattgttaacatctaacaaagtaaagcatatctacttattcattacttggctcgctctattacaatgtaaattatttggaagcaagtctctctattttctttttagtgttttcctaacacctaggccagtggctggaacacaggatgtgctcaggaaatgtttactgaaagttatgcattggatcaataacacagcctatgtgaaactataatggacatgtgtgtacatacatacacacacagagagacacaaatttctcccatcacctaccttttgtcatctctttaaatagccacattatctaccaagttgctgaagcagaaaatttacatgtgatccttggttcctgtcttcccccatactccacataggattcttcagcaggtcatgtccactctaccacaaagatacacaccatcttctcaccatctttactgtgacatcttgattccaacctttatcatctttcacctgaattcttgcaagaggctcctagttgctttctatctcagtcttaatgtccacacagcaaccaaatgacaattctaaaccataaatcagagcatatcacttccctgcctccctggtttcctgctgcaactggaataaaacctaaagcctttatcacaggctctgccttgatggtgtttcaactgcccctcaggtctcatgcccctcggtcctctactgttcactctacttctctcacactgcccttctttctctctcttgaacatgcaaaactcatctccacctaggttcatttgcatttcatatgatttcattttcaaatactctttccccagattttcatatggctgccttctcaccattcaagtcttaactgaaatgtggtttcctcccagaggtcttccttgacagttctaactaaaattactggcccagtcttgtcactttcttgtatattatcccatttttaaatgcatcatagcatgtatcagtatgtgaatgaatgaataagtgaatgaataaattacaaaaattgtctcctccactctctcagcagtaaaatatatacttcttgagaaacgtgactacttctgtgttgttctccattacattcctggtgtctagaatagtgcccagtacatggtattacatatacggtaatgatttgttggctgacttcataatgtctactaacattttttgaatgactaaaatgcacctttctgggctcaaaatattgaggctatatgaaggtgaaagtaataaataccagtaccatgagataaaaagataagtaaataaacgattgcctgcaatgtgatattctcagtgttcctctccacacttcatagacacaaactacataaattatttgaacccactagtctattagaatgagccattaggctgtgtagtgagtacattgccctgtcattatgacatatgcctaaactccttaatgtttttggtttctgtcattttgataaattcaaatttctctttacaagactcactgcttcagatctcttcttccagttaattcaaattgcatcttctaaaatcttccctttttatcaccatgactacctcaccacactccttaagttcttcctctggcttcctaagtcttaataattcaattcagaaagtgcttgagtgcctaccagaatgcacagtctgtacatcttgtctcagccctcaaggccctgcatctttacacctactctctcgcctctatccagcctccttcatttattaattcacattattttttcctccctgtctctactcccacttggagagcatttccacttcaaatactgcagcactctattcctacctgctctggcaaacacaaatgtagcccatttaaaaatgattttctagataacaaatcacagattataagaaagcaattaaacctcatcctaatacaaaattgcttgtcactatgacaacaaattcaatatttggtgtcactccttaagaaaaattataatagcaaggttcctgtataacagtaataaagatacttagtaaaaaagttttgattaaaagacatttgtgcagtgagcaagcattttatccctcagactgttttcctgtgaattgtatattatagtccaaaaattctgaaaggtgttttgaagatgttacatctatttataacaaaaattctccattttaaataaaaaatacaaatattatgattaaatatcttaaatttttcaagaaacatttttcaaaaactttaaagtattttaaaagcattacacaatttaacttattccagcatccatttaagcacagaaattgaatgcaaaattctattatgttgtaattcaaaccggaaatttgggatcttactgttcaaaagttgctcagcattctaacacatgaaataaagagattagtttgacttataagactcaacattttagtatatttcttgggaggtaattttcgtttactctttacctaaaacaggaaacagtgaagaaatatgagcaatgaatgaaaaaaaatgtgtgctattttttttaatttccttcccaagtacaaaacaaagagaaaaaatgaataagtactatatctaaatgtggagaacactgttgtaaattttacagtctcaatcaaaattttagtaaggcaaagcgctatcatagtctaatgtaactagaattttttaattcaagtaaaattgacataaagtgaaacacacaggccttaagtcatgatttctgatatctacatacaccctgtaaccacaaccccaataaaaatgtagaatatcccagatgttaacccagaaaattcccaaatatccattctaggccatccccacacctcctaagcaaccactattctgaattttatcaccatagattagttttacctgttcttgcatttcataaaatggaatcatgccatgagtacttttttgtgcctggctgatttttctcagaatgatgtttttgagattcatgcatgttgcagatcgcattaatagttgatgaaatattttttattgttagtatttctctaaatgaatatactatagtttattcacttcttgttgaaatttggggttattttcagttcggaaaaattataaataaagctgctataaacatttacatacaaatctttttgtggacatatactttcatttctcttggatcataagtagttaggagtaaaattcctggagcagaggtaggtaaatgttaatttaataataaactaccaaactgcttttccaagaggttgtaccattttatcctcctcttggcagtatttgagagctccagttgctccatgtcatcaccaacatttaatatcgtcatttttttcattttagacattctagtgtgtgtgatatggtatttcattgtggttttaatttgcatttctctgatgactaataatgttggtccctttttgagtgcatattggccatttctatatcttcctttgttaagtatctctttaagtcctttgccccatttcttcaactggtttgtttgtcattattgattcagaaatattttattttctatcagcaaattcagtttttttattttaagaaaactttaataattttttccacttttattttagattcagagggtacatatggaggtttgttacctgggtatattctgtgatgctaaggtttggggtacaaatgatcctgtgacccaggtagtgagcatgatgcctgtattagtccactctcacgctgctaataaagacataccctaaactgggtgatttattatgtaagggaaagaggtttactgactcagttccacagggcttgggaggcctcaggaatcttacaattatggcagaaggggaagcaaacacatccttcttcaaatggcagcagcaaagagaagttccaagcaaaaggggggaaaagcccctataaaaacatcaaatctcatgagaactcactcactatcataggaacagcagcatgggggtcactgccctccatgattcaactacctcccactgggtccctcccatgacatgtggggattatgagaactacaatttaagatgagattagggtgaagacacagccaaaccatatcagtacccaacagctaatttttcaacccttgcccccttctctccccctcccacttctagtagtgtccagtgtctattgtggccatctttatgtccttcagtacctaatgtttagctcccacttttaagtgagtacatgcggtatttggttttctgctcctgcattgattcacttaggataatggcctccagttgcatccatgttgctgcaaaggacatgatttcattcttttttatgactgcatagtagcttaggaatatttttaacgtattctgaaaacaagtcctttgtcaaattctgtattgtgtgtaccttctcccagcatgtggcttgcctttgcatctttccagcactatttcttaatgagcagaacccttaaatgttgatgaagactgatttactatatttttctcctttataattaattcctctctaaaaagtttatgcctatctcaaggtaaaaaatatatattattttttctaaatgttttatgattttagattatatgtttaagtctatgatccatctcaaattaacttttatatggtataaagtagaggttaaggttttttcatacatttatactcagttttaagtgaaagatttttgccgagaaacataaaaacactagatatctaagatcagcacttcaaaatcaattcttttcatttacactttgccagcctttttattgtcattgttgttgcttaatgtaactcttgtctgtataagaataacccaaacagaagtgggctaaaaatggttcataggtctaggcagggcaaatcacatgacatttgcctgtaaccaaatttcaccttttccaggagatttgctggtagcccaagccataggaggtctcataggaagatctcacacatcctggagtctgcatgcatgatgagctaattacatcatctgctgctcttataaaatgcactaggctaggcaaataatttgatcttctatccagacatccacattagcagtcatctgcaaatatacagctgcccattctgcatggcaagtctatggcacggataccagccttctttttaataaatataccacaatgctgttttgcagcactttttaaaatgctacaaaataaaataaggaaaaactaaggtgacaacatttaattatggaatctcactattttaccatttttttgaaatctgcaatttctttttaatatagggtacatacacatcagcattcttgcttcaagaaaatcacaaagtctaacgtaataaaaagaaaataaaggctatgtgagagaagaattttatcttgctcaaagcaaaagcctaacaaaagaaaggcaattattctgaccagttaacaaagccaagagaaaagccacacctgttagctaaatccaaaaatcctcaaaatggttcataccccctccttctctaaaatcctataaataaaatcaactgggaaataatagtaaacatgtttcattttagcatggatatgaactagctcatggcctcacagaagtcaaaaaggtattttaggagaaaccagtacaaaatttttgtactggtgcctattatctccagagaatatacttaccaccaagagccattcagtctaacttaccgtaatacataaaacggcctggtagcatctaggtctgcttttttattccacttctctacttatcaaacagccttactgattaaattcaatgagcagtaggcacaatttttgatttgtctactgtgccattgtttttcattaatacccctccctcatactcctttctattaaaataacttagggggtaaagcattggtgcttttccttatagttgtgagttgcaatttatgttcaagaggctttgtgtcttacatattaaagagaagaacattagaaaactttagcattctaagcatgatgaatctctaagtttcaaattagaaaagtcagcatttagagagctactagtttcactgatttttatcaaaatgtgatattcttatcttgaatcaatactatgaaaattcttgtttgaaaaatagttcacttaaaatggattttattgatttagctattaaagggtaaaatacatttcacaataattataagttagaaaagtaaggggaaaacactagtcttcataaaactgaatttgtcttaagctgaaaatgtttaagttataataatctgagttttagctggagataaatctattaatatctcccaagattgtcatataaattagactttctgagtaataagatattaatgtcatatgaaaatacttttacctttaccatactggattttgatacaacattattctaaagtatttcagaataaggagctaatttatcatttgtgtgagtttttttccaggaaatccaaatatctggttcaaagtgatatagacaaagaaataaaattcagcaaccagaagtaatttaaagtaattctaattcctaggtgcatctcttggaaaatgttaaaagagatctaatgtataatctttttttttcctattccaattgattgccaattttccccacacctcagctttctcgcctctcactttcacccctctcccctaaacctcctttcctatcttgcttttctcttgacgggactttactttcttttccctcttgctttatatcctctgctattctctttttttctcaagacaaaatctccatgcatttatccatccttaattctattgttcagcctctaaagatgatgccaatctgcatggtaaactgattaggcagaggaacagaggaaaacctgtctcctcacacattaataatttctgtccctgttacacacatatcacctctcttcaagcagtctcaagatattttaaggtactcataattacagtcacctcacagccaacagttacctgtcaatcaaacttgacagaaagactgagattaagcaattttctcaattaaatggaagataagaaggaatttggcttagggctctgactcccaaattaaaatattttcccagtgaaaacaaagcctctctaaggctttacatatacaagcacacttactcatcttcagaaccccattcaccaggatgaataaactgttgtcactaccaaaataaaggatcttgattaaaataaagaaaattaaacctgtgacaatgactttgtgcagtcattaaatgtgtaacaatttattcacaggataaatatgcaattctgatcatgatgggctcttaaaagaattcttccaattatattttatactgcctaataaataagcaaaaatgtgaaaaacattatctcaacatctatttaggaaataagattgtagctaatgttgtgtaaaatgcaaggtcactagatgtttccttgctacaatgtaaagaagatctcaactcaaaataacctatataatttttcagattaaagtgaaaattgtgataaggaaatgatgtagtccacttctagcgaatgaccccaaatacttaattctacatggctcataccaggaatattaacataaaatcatattttatcaacgtagaagacccaaaagacagcaaatatcagagaaaatttcaccagcctatgaaaaatgagtgtagtgttacatctkccccagcctaaagatcctaaagtcaaatatgattttattagtttggtgcaaacataattgtggtttttgctactacttttcatggccaaaaaaaacacacaattacttttgctccaacctactaccactagaaaatatgtatgaaaatagaagcatacaaccaataatatgtgttctagtttccaaagtgtaaaaatatatccattttgagttttagttaaaaaaccacctctttcaggaagcttcccatgataaggctaaaacattgttccatcttatttaatctcaatgtttctagcactttatttatatttgatttggtatttaaatattgctggcagtcaatgcctattttacttctttaaagtcatacaaatctataaggctgtacatgaatagcagccatgtctccctaaactttgtaaattcttatattaatactagaatccacaagttgtttaataagtattgtaacattgaaaacatacttttgatcttcactgtgctgaaacatttttaacactaactctgaaaactgtaaatatttccagcagaaattttgtgtcctatattgttagttttttgtttctattttgttgggtttatatttaattcatatttatattgkttcctttctccatgaatcagtgctcttctacttcctcaagattatcacacaatgtgtctatattttcctagtacctatctttactctcatggcccctgaccactagctgtttcaaattaatttcactcttttcaaaccttatgccctttcctactaactttcatttctcagaaaacccttccatctcatcactcacagagaaaatagaatccatctgtactagcccgccatatctgtagtttaagctgctgtaacaaagagaacccaatgtttaaaaaaaagatacatgcttgcttgcttctgacagaacagtgcaaagatagataagcagtcactgggaagattatcaaaattagatacatttctagctacctgtttggacagtctaaaaaatcacaagtcaaccttgactcctctttctccttccttgcccacccatcaacacgttaatcattaattatcagtatctcctctgcatggctaaagataacatgtacagtggtttttactgattgaagcacttcatgtgtattgactcctttattcctcataacaatgctgagtgtctggttctatcattatctggttctatcattgtctggttctatcattatcaccaatttagaaaagagatactgaagcccagaaaggctaataaacagccctgcatcacaatgctagttaagttgcagcaccaggatttggacccaaagtctgtctatgagtctatgtatagtcttaacccttaaccattgctataaactgcttctttatccataacttcaacatctctggaagttgctcacatctcaccaatagagttgagaccatatcatctcttccctgtgtgaagagtgtcctcttacytgtctctgagcctcttctctctcctctccaaccagaaatatgttggatcctgctcataccagctctctagcaccaattgtgaccatcttttttttttttttagacaaagtctggctctgtcgccaggctggagtgcagtggtgcaatcttggctcacagcaacctccgactccctggttgaagcaaaaagtgcaaaaagtgtctacaaaagcatttaattttgccttttgctccctgctgcctaatggcttctctcctacttccctattacccactggggggaagaaaaaggaaataagggtttatagacatcatctgtggcatatcctgggaaagaaactgagttctttttatttttatgatttctaatatattaatgttaaaattaaaatccagggctccagtgttccatgttagctcttagcagtgataatctaataaaataatttaaaagctaatataacaagcttaaatttgatgcttggattactttttaaagtgcctaagtattgagataaaaactaatgcttatgtgactagatggttaagcagacagtaactttttttaagtgttaagttatatttgcaagcaaagttacacagagtaagatgcttaataaccagtgttacttgtttctagttgataaatctaaaagcattgccaggatggtggcacatcaaacattggcttattatgagtatgtaattgtattattttcctacctttagccacatctccactatcaaccatctaaatttaattttgttaacaaacggtttaccaaacattaacaatctatgctatctgttgaaggcttggagtagatgttaccatttatttcaaagaaaaaacaagcacacacaaacatggaatactactcctaaggatgcaaaaaattaaggagaaattttagatatatatcacaaagtataacatcatgatgtttttaaatatgtacctcagttataagtaaaacatacaaaagaggatgggcttacacagggacaattgctaaagggttttctataacaatactttgtctacatcactattttggcatgttttactcatatcaaaagacagacgtacaatcttaaatatccaagattgtttcacataaaacctaggctaatagccaaattggtctgaagttcttactaacaaatgtagctttcaaaaacaacaaaagaaatggcctggatacccatcaagtagacagaatttattctaattcactaactccctagtgtcctagtacattttgtattagaataaggattgcctttggctatggagtctactccaaaatatgaacatagtggagcaatcatcttccacttagcttattatacatcacagggaacgttagttatgtgtagtttaaggaaatatgttctgaatcacagtaagtgactgaaaggcaaaaggagttatgtctagttcagggatctatatgagttgaaggttctgaaatacagcaaaacccgctagtaaaaaaaatgaataaaatttactaaatattggaagtgttaaatcaactgaagtttcaaacagaagcattaacctagcaattttttaaaaactaaaaataaattactaaaaaataaacatatagtcaccttaactgagtgatcaatgttaacatcactagtaatatgacatatcaatgttatgtactccctgatagaatacacaggaaaaagtccttcccccaaattcataacctcaatcaatcataagaaaacattaagacaagtccaaatggaaggatgatttacaaactacctgaacaaatgttaaaagtcacaagagacaaagaaagacaaaggatttatcacagattggaggggattaaggacatggtaagtaaacacaatgtgggattctggatcaaatcttgaaagagagagaggacattggtgggaaaactggggaaatatgttaaagttcatcatttgttaatagtaatgtctcaatgttcatttcttttttttggcttttcatggttatgtaaagtgttaacctttggggaagctgggtgaagaccatgtatgggaactgttcatattatctttgtaaattttatgtaagtctaatattatgacaaaattaagttttgaaagtacataaatttatagtatatggagaaaaacagaaatgtgcacagtttatcattatacaaaacacacatttgatggccgtcttattgatttgttgttttctctttgatatcttgttttcttttcttttttatcttctaagcctctgatcacttatcttagtcaaggttgagcagatagagaagtacgcacatcctgtagcctgaaagcctagcttcagattctatttctaccacttactgtgtgatgtggggcaattaaattaactttcagtgcccagtttctttatggtacaaacaggaagaataatatctgccacatagagctgttgtaaaaataaatgagttaatatatgcaaagcatatggtagagcagtgtgtgcccagagtgagtaccatttgacagaaacaccagaatagttgaagacagagtactgtcttttacttcagaaacaaagtgggacagctgtttctctccctttgctctcttgctgcaatgaagctgacattactagggggggctcaactaaccaaacactcccaattggaatttcgattcctgaaaggataatgagtgaaggggcaaattagcagaatcaaggaagcagaaaattcctcactccagcattctagccacactccccgcaagtggaaatcaggctgtgagcttctctgactacgttgtttcccgcccatcttccaaccctggatctccagtgctcctgcagctctgtgagccatcatatgctcttccaacaaatctctttattccttaaattaaaaaattaactcaaaatggattaaagacttaaatgtaagatttcaaactataaaaaccctagaagaaaacctaggaaatacctttcttgacatcagccttagcaaacaatttgtggctaagtcctcaaaagcattgcaacaaaaacaaaaattgacaagtgggacctaattaaagatctgcagaagcagagcaaaagaaactatcaatagagtaaacagacaacttacaaaataggagaaaattcacagactatgcatttgacaaaggtccagaatctctaaagaatttaaacaaactaacaagcaaaaaacaaataaccccatgaaaaagtgggcaaaggacatgaacagagacttctccagagaagacatacaagaggccaacaaacataagaaaaaaatgctccacatcactaatcatcagagaaatgcaaatcaaaaccacaataagatactatctcatgccagtcagaatagccattattaaaaacccaagaaataacagatgctggcaaggctgcgaagaaaagggaactcttataccctgttggagggaatgtaaattagttcagccagtgtggacagcagcttggagatttctcaaaaaactaaagatagaactaccatttaatgggattactgggtatatacccagtggaaaataaatcgttctaccaaaaagacacatacactcatgtttgttgcagtaatattcacaatagcaaagacatagaatcaacctaggtgcccatcaatagtggactggctaaagaaaatgtggcacatatacaccatggaatactatgaagccataaaaaaaagaacaaaatcgtgtcctttgcagcaacatagatgcaaccagaggccactatcctaagtgaattaacacagaaacagaaaaccaaataccttatgttctcacttacaagtgggaactaaacattggatacacatggacataaagatgggaacaaaagacacttgggactactgggggaaggaggaaaagggaggcaagggttggaaaaccacctatagggtacaatgctcactacctgggtaacagtttcattcataccccaaacctcagcatatacaatataccctgtgacaaacctgcacatgaatcccctgaatctaaaatagaagttgaaaagcaaaaatataaataaataaataaaatgtcagtttctgttatttgcaactaaccacaaccatgctgtgtttatcttaataccaatatcccataacccagtttctaaagtctcagaggaccaggcatggtggcttaggcctgtaatcccagcactttaggaggcaggcagatcacctcaggttaggagtttgagaccagccaggccaacatggtgaaacctcatctctactaaaactacaaaaaaattagctgggtgtggtggtgcacacctgtaatgccacctacttgggagactgaggctggagaagagtttgtacccaggaggcagaggttgcagtgagccaagatcacgttcactgcactctagactgggtgacagagcaagaccccctcaaaataaaaaataaaataaaataaaataaaataaaataaaataataaaataaattcttagaagagcagtgtccttaagttttgcttctgaaaatgtggttcacagaccacactttgaacaggaatgaagcttgttgagctggtgtttgagacaataagctaaagggaaaggaaatcccactggaatgttggctccttgaggaagagcacatagtctttcaaggaatgtcccatttgcccagaacacaagtttttcctagtctcgggattgacagtaaacaaaggtagatgtctattattcatggagacttaattgacttttataataatacaactattgattggactgatgcaaaaaaaaaatggctcatagtttgggtttgtccttaagacaacccactgcaaatcaaacactggaatttcaatctgtaacttttaatggatgacttttaataagacttttatattagataaaggccatggctatctttgtgtttcacaactgggaaaaatttaagaagatggaataattatcgaagggactagattaaaatgtaaatgctacattatttatgtgacagacaagaactcaggagaaatttattggcctttcaagaaaaactcttaattaaaaatttagatgatctgattatagagataagctgttgctcaggcttatataggctaagatttcataagaaactacaaaacaatattcaaatagtgaatcatttgaatgcacaagcagaaatctccacaatgttttgtgaatttaatgtgtaatggacaatgtttatgcatggctaatcaagaattcagaattctaatggagacttataccattgttatgatattaaaggttattcccacaggcaaatattgtgtttaattttttaattcatcctattgtaattctgataattgcttgtttcataactgtattatggacttgctggatatttagtcaactgcaaactagccagaaaaagtagaaacgccaatggagatcatttaaaaaattatactgcaactataaaatagtaacagaaaaggaaacttgtaaaggtaaatacagattttggaggaaaacaaacatataatttaaaattttccctggcaccaagaggggaaagagtattctccctgcccgcccttaggacacttgaagttttaaatgctttatctgtctctctgaggtgtttataaatcttttttgaaagcttactaagcctcttgctagttctacatcctaggaatgtatttcctgaggcttcagaggcatttctttgaaatgggaacatccaagaggatggaagtccccttgtttccctatgtctatggaatcaaagtctaggcacatgctccgtgatgtaatttcctgcttatcattaagacacaagaggttttattttatattttgataaagacaatgaacatgcatgtaataggttgtatctgcttggctgtataaaagggtgagatttcattccctctttttcatctccttagcagatcatctgtaatgtgtgtcacagtctgatttaatgcttattcaataaaaacactattttgttcttttctacatttttataaaaaggattcactggtttagcaggagttttatttctaattatatttccttaacccagcttaccagtaatggcgtataatgggtataattcctatagaagctaattaccctctctctgaataagccctggcccagttctggaaagccatgtagaatatgtcattcaacatgagaagactgaataaaacaaaactcatctggaaaaccatgtagaatatgtcatttgacaccagaagattaaataaaacaaagctgatcaatataatctaccagcagtgctgggcagcagagacacaaaacttctaaatagtgtgttcttttaatgttaattcaacagcactccaataccaaaatagggcacgtaggagaaatgcaatttcaacacacaagagaacagtgtccttacgacatgataagacacaatgaaccgaaaacactttgaaggatttataatctggtaaagtaaatttcccagaaggctggagctgtgccaattttaacttattttttacagcatttgggtaaagtgctgagaacactttcagtgttccaggtgatgatgctgacaaaagggagtgttcatcaggtttgactgcctggatacatggttttataaaatggagaaagaagtgtattcatgatgctttgtaaagctaaatagccctttgatggttgcttgtagtgcaggttatcaatgtaagacattttcatgtctgtttttctattcttgtatataaagtgtgtgaaataaagaatatttcctacactgtgatctgtagaacaccagtgtcccatgagatgttatctgtgctccatgtgggaaaaggggggttttcaagtcaaataaacctgagaatgttcttgaagttttacaatctaggttagcatattaaaggttatgagaagccgcataataaagaaacccaattaatcagcacctcacaaattatttgagcatgaatcctcctcctttctcttttcaacaatttaataataatagctattatttattgagcatttactatgtatcagacagttttatatacccttttacatgtaatgcaatactcactgaatcctcacaaaaactatatgaggaasatgctattattatctccattttacaaataaaaaaactaaggcttaaaagagttaagtaatttgcccaagaacacaaagctgtggtagaggaagaacttgcattctggcaagcctgactctagaggctccattctgctgcctctacttccttagcagagagctgcgcatgctcggtccattccttgcctgggaaaattgattcacttcagttattttcatttattcctctgaacgacttccattctatggttggttggagttatgttccctgattttcatagctatcagcttcgatgtcatcatttcattgtcctttctctctgtattttggaaatacttcttccacagagctctgtgcctcagtttccttgtctgtaggaaaggaataatactaccggcctcataggttattatgtttattataaacaagatctaaagtgaaaagtcctttgaacagcagcttgcacaagaacccagtaaatattaatgatgatgctaatgattgttatcagaattattgttgctgttgtcatcactgattctgtctcgacagagagtcagccttttcatggatatagaaaacactgttctggtaagagttgggtaacagcatttgagtgcctaaacatgcagtacatatgcagtaggaggattatgaatcccttgtgagtaggtatagatctttaattctgtcaagggcttggagtaagaaaagaataaaaagtcttcatagctactctcagaaaagcaggatttttatttttgtccatgaggactatccattgccttttgcagtcttatttacatggcctttcaatgaatgaaaaatccttgtaatctagcagaagtaaataagcaatcctcatttttgttcctgttgtggcttttcatattttcctgtttttatatttaaggtggaaggtgggaataaatgcagtagagtagaccagtaatgtgctaattttaaccaaaatcatggaatcttacctttaaagaccattcttcagcaaaatttatgtattctaaatgacacttttttttttttgagatggagtcttgctgtgttgcccaggctggagtccagtggtgtgatctcggctcactgcaacctctgcctcccgggttcaagcaattctctgcctcagcccactgagtagctgggattacaggtgcacaccaccatgcccagctaatttttgtatttttagtagagacggggtttcaccatgttggtcaggcagttctccaactcttgacctcgtgatccacccgcctcgacctcccaaagtgctgggattacaggtgtgagccaccgtgcctggcctctaaaaacacttctaagatgtctttctagttctttacgtacaactcagatagatttacctatctgaacagagcaattatatgagtgtagtgtcatttcattcatgaattttaaagaagcctaacatctatatagttaccgtattaatcagcactctccagagaaacagaatcaacaggatatatatacaaagagatttattataggaattggctcacacaatttatgaaagccaaaaagtcccatgatctgccttctgcaaaaccagtggtataattcagcccaagcccagaggtctgagaaccagggaagccaatggtatgagtcccaatccaactccaaaaactggataaccaggagctccaatgtctgagggcagaagaggatggatatccgagctcaaacagaaacaaattccgccttcttctgcatttgtgttccaatcaggccctcaacagattggatgactcccacccacattagtgagggcaatactctttacttggtccaccaattcaaatgccaatttcttccagaaacaccctcacagacatactcagaaatagcattttactagctatctgggcatcccttagcctaattaagttgacacagaaaattaaacatcacagttacatgtatttttaaagaaatgtgtaaaccaataaatcaaataaactatttgcaatccttggcctacagagcaatagattatcactggatagcttcttattctttggatctaaaacctgggacatcattggatttctagcctagagcagtgtccctgaacaaaggctttggggaggcaatcttttagaaactaccacgttattctcatagagattctgttatttctctctcccatcactacccagagaaccagcgttactgaatagtaatgataataataataattacaaataacatgtgtagcacttgctctgtgccaggcactgttctaagcactttatattattaactcatttaatctcatccttatagcaaccagatgatataggttctgttattatcctcattttacagatgaggaaactgaggcagagagaagtgaggaaacttgtccaaggttaaagagctaaaaggggcagagttagtaaatggcagagcagagatccactcggagcagcctgactccagagctcctgcctttaatcacaagactgtgcaaaatgagggcagtgtgcaatcctcaagtacttcaggaatgaggagagggggaaggttgtcatcatctctggagcttgaacacatccatctccccacctaatagtagcctcagtctgaataaccctgttagtttgttgatgatgcttctcagtgtcagtcaagcctcacagaagagaagtttaaggctgaaccaaagggattttgaaaactggtaggtagagagcatgtttgagcctgtttgggaaaatgctggcaccgttaacaggaattgaatatcagatctctctgccttaagggactttaagctgcattcaagaaaaaccagagtataaacatgccatttcagttcaatgaggaaaacagaatgatttgcttgaggtgttataagtggaaaaaggaggaacatttacccagccgggtaaggaaagaggatcatgaaaaaaggcttaaaataacaaaatccattttctacgatcatagaccaataaatctagcattttacctttataaacaacccacaaaaaccttttaaatatgttgtatctgcttgtcattgttaaataaaaacactgtaattctattggaggtgattctagttttcagttttctaagtacatattaattatgaactatttctatcaaagaatctactcacaaagtttttgttctttgttttacttttgccaaaactgcaccatataaacttgacatgtgctctaaatacattcttgctcttttctgtatggtgatcttaagaatattcatcacaagataggaaaacacagctgccatcgttttaggaaagaaatagtcatgagtaatgctttaacacacatttcaaagcatcaggmgttctaaaaatctcaagagagttgtgacttttattgtccctatatgttctaagcatcatgcaactttcattgttaaaatgcttacattaaaattactcccaataatccatagattacacactactacataagtctatttaaatcgctactagaaaacccaatcactaccagaaataattcaagttaggataatgttcaataatgttggtggtatctggagtaaagatacagcttagaatttgtctaaaagtctgatctaatgtttcttcactgttaatattcttgtcataaaagtgtgacttactgacttggaccatcaaggcttctaaatatatggaaagaaaatctatatgtgaaaacagagtagaattaagacgttacctagatacagtcttctgaggttaccactggagaggtgatgaccaagatcaaataaattgagtaacatatggaaaatggtatggtggagaaagaatcagactgcaatcagtctaactaacgctagttctgacttcgttatcacctgcgaaaatagcaccacctctctggacctcagcttcaccatgggtaaaataagacatttgactagatgatcactaatgttttttgtttttttttaattttattattattatactttaagttttagggtacatgtgcacaatgtgcaggttagttacatatgtatacatgtgccatgctggtgtgctgcacccattaactcgtcatttagcattaggtatatctcctaaagctatccctcctccctccccccaccccacaacagtccccagagtgatcactaatgttgaactctatgaaatctaagatgctctaatgttatcttaaactcttagcatttttttagctataaaaaccatgatctaaaatttcagatgcttcctgaatgtcactcaactattttctaaaccagagatgggctgtattgtatccaggacaaggtagttgatgatcatgatgcccagtatctctaactagcttaatgcattggggaaacaccagaggttccttgaattgcttctttagggagggatgagtccaagtaattgttaattcaataagtgtcattttaggaaaaaaccctgtgtacccaagtcttttatgagcactggaaaatcagagattaatgttaaagtctttctcctccagaggctcatagtcacatgagtcagaaaaataacttctcattagatacaattttaagtgctatgataggtttttaaataggagggtatggaaattcaaaagagagatcttgaatcattcattctacaaataattatcaagaacttgatatgtgccaggcaccattctaagaaacaggatgaatatagcagtgaaaaataaaagtaaaaaaaaaaaaaagaccttgccctaaataggcaacagaaagataaacaaagaataaaataaataaacactatactttcaggtggtgatgaaggctatcaagaaagatgaaatagaacaagggactatacactggtacagaattatatttagatagagtagtcagatatggcctctgctttatgtgacatttaggcagagacatggataaagtgaaggagcgtttaggatatccaaggcagaaagaacacctagagaaaaggccctgaggcaggagatgctcggatgagtgtgcaaagtgccagggaaggttatgtcttgagatgaggcagaaaaggtagccaggggctagattatatagggttttgttggacatggtaaggaggctgggtttgcttctgaaggatgcaaaatcagggaagagttttgagcagaaaaattatatgatcagatttttatttttaaaagaccattctagatgctgtatggaaaatgaagaggcagagagcaacagttaagcagggaggaaattaggagacagtttctatatttatgttaatatgcataaatattttcagttatagcattatatagtatgggatatgttaatatatgataaattatgtttctatatttataattatataaatcacatacatagcattatgttatataataatatattatgttgttatattccaaaaatatattaatattatatgtatgttataatgcattttataattataatatataatagtgctatatctattatatctattggtctttagttttatattcttagaaaaagatggtgatggtttggagtagtaaagtagctgtagaagtagaaatactcatttgaggtaaatattttgaagttagacccaacaggacttgccaatgggtgttctgtgggatggaagagcagaaaagggctcgtggagcaattctaagttttagcttgagcaactatgtgaataatgatgtcatttcctgaggtggagaaaaataaggtgaagcatttgttggtagtgaggctaagaattgattttggacgtattaaatttgagatgagtatttgactgtgtagatgaaatgttaagtgagcaattggatatacagatctagatttcagagaagccaaggttggaaatacagatttaagtgtgtttggccacaggataggatgagctgaacagggaggagagtgagaagaaaagaattatgatggctgagctctagaattctccaacatttggaaatcaagaaaaggagaaaccagtgaaggagctatcagcaaaagaagaggaaagctggaaagtggccctgtggtagcagagtgatctactgtgacaagagctgctaagaaggacaagtaatttgagaaytgagatctgactactggattcagcatgttcttccttcttccaggaatgctgttccagatgtccacatagatggcaacctctctttcttcaggtctttactcaaaattacctacttggtaatactggcaacggccaatctatcaaaaagccaatctgctctcccagttatctgtatcccctctccctgctgtattcattcttcttagctctttatcattatgtaataaactaggtgttttacttatttatcttaattattacatatttccctcattagaatttaaaatacataaacacagggttttgggtctcttttatttgttgtgactttgtcagtacttagaatgatgcttgactcctggctggcactcagcactcaataaatactggttgaaaacatgaattgatgaataaatgaagccaccatttactatattagatgtagcagccttataaagttgacctttttcctttcatttttaaatctaagcttacctctggccatagacttatcttcctctagtgaaaaactagtatgtaaaaggaagcagatacttgcatatgtctttaaaatgttgagactagcttgctaaaaagctaccagacattatgtaaaccattgttttagacttttatgatgcaagaatatataaggcagggtcaacattctcaaggaacactcagtctggtggtgactgaaaacttgtaaataggaaagctataatacagcatggtaagtgcaactatagacaagaccactagaagtctaatcaagtgagtagataaccagacagcgggagaactgggtcagacttcacctgtgcatgatagcaaaaacatcagaaaacttctgaacaaattaagtcatctgttcactaaatatttattgatcattagcaccatattcagcactggggataaataagcaaaagaaacataacctctactcttatggaattcaatctagcttgataatctaccttgtgtaataccagtacagcacttcagaagagcagctgttgaaatcttttacaggtcccgagtcggccaatgccagatagatgtgctacacatcacatcagcctaccctaaggcaactatacaatgttctgataaatgcttcttagtgaaaaggcccaagcatgccccaactctggtctagtggttacagaaaaagtacaaggttttatttaagcaaagtagtcaatggagctatacacatttttttaaagaaatgcatatagctttggcatttcaaaatgagacatggcagtaaaaaactagatgctactgatgaaaaaatgtagatttacatttataccgtagtataaatttctaattttttagataattcatttctaagcactgtcattcttctaaataatttatattgcattggtatttgctaacttccaaactgaagggattctaaggaactaaatgccctttgattaaaagaggttaaggaaaaaatgactcattttgcaagtgctaatgctataaattcctataaaatacaatatttgggagtcaagtgtaaactaatttgtgaataggcatataacttttcctggataattttataaatttttgtacttaaagtggaaggcaatttcaggcaatcacaatgattccctcaagaaaaaggaccattacattggactttttctcatatctttctgagccagttttatttcactaattgagcccatggagacagaaacttacttagattttatagtattgctgattctgaagagtatttataggaagttcaccaatttatcaagaacactgcaaggttttcaatatttgtctaattattagagtaagaatactttttaaaaatagtatctggtattctatttcctataaaaagttaagaggaacatctagaaatgtgtgcaactgagtgaagtccagaaaaatataatgtattgatctcaatggctattaagaaaatataatacttctctccatatctctagcacaaattcttaagatgatgaagcacaatcctcatcatttccttctgtcaacaatgtgtaggaagaaaaaacatttgggtaagtgaatgaggaaattcctggtatcaactgtatccgtggtatagaactaatagctgtgggctgcgcaccctttaatcccaacattttgggagaccgaggtgggaggacagcttgacgtcaggagtttgagacaagcctgggcaacatagcaagaccctgtctctacaaaaaataaaaataaaaaattaactgggcgtgatggtgtctgcctgtagtcctaactactcagaaggcagagagagtattgtttgagtccaggagtttgaagttgcagtagctatgatcgcaccactgccctccagcctgaaaaacagagggagactctgtttctaaaacaaaacaaacaacaagaaataatagatgtgttttgaaaagtgcctacaagtcaaagggtgaggacagctttggccaaggagatgatattgagtatgggagggccaattaaaccacttcagagaaagcggtggtggtctctggtctcataactatttttgcataactcattattgtttccgtgtccaggccatcaggctacacccctcctcttatgagaaaggtacaaatgcataaaactaagtcaccataagatgttttgtcaggaacgctgctagcagagcactcatctaacctaaatgtttttctctccacatctacaaatacaactatgtctatagtttaaacatatcacattaaataaaattcactgagtcttcagaacaatctaacatttattttacatactctatttaagaaggcaataaaagtgtggatgtatttgtataaaaaaattaatgttccaaaatgtcccctagaatttcaaactttgaggtacaggaaaatatcaaatgtatagaattattaattccttgtgagttccaggtagcttaggtattcacagtactttgaagaaataatttaaagaatgtcctctaataattatgaaaaggaagagaagactgacttaagcctgtatctatttgatcaggtctacttagtctgctgggttgaaatcggagcacagagcacttctttagaaagggtttaacttgcatcccatgtctgatgtggcaacaatactagtaaccctgcttatacccccttggctttcacctctgcactaggaaggctgcttactgtcaacatctgagaatctctgtgtgttaggccattcttgcattgctatatggaaatacctaagactgggtaatttataagaaaagaggtttggttggctcatggttctgcagcttgtacagggagcatagcactggcttctgcttctggggaggcctcaggaagtttacaatcatagtggagggcaaagggggagcaggcgtttcacatggcaggagtgggagcaacagagtgcaggggaggtgccacacgcttttaaatgaccagatctcaaaacaactcactcactatcaagaggacagcaccaagaggatggtgctaatccattcaggagaaatccgcctctatctaaacacctcccaccaggcmccacctccaacactgaggactacatttcaacatgggattccgaggagacaaatatccaaactacaccgctctgcctgaggacttttctctgaccacagggaacatgtataaccagcatgcaggacaacccagaagtgcggagttaacacccacagaagcaactcagcaaatgctggctgatgtgtccacggacatacacccggcttctttcctcatcaatgtgattagctccgaggtgtgctgtataggagcccccagagttccttggcaggactgggccctgggctatagctggtgagtgagtcgataatatgccctttagtgtcttctttcctttccctctctcacttccctactcttccatccatgtttcctgggatcacctcccaaatgaattgctctgcacttgaatccttgcccctaggtttactttgagataacccaacttgaaactcatgggcagaatttttgcttccatggtatacaggtttctaagtgtgggccagagtttacatataaatacaaataggttaagttgtgaaaggctttttattagtttggcaatcaaaagttctactagaacctctgtttctacccatgagggattaacagcccagagaattgccctcctactgtgaaaaagaaaaaaaaaaaagaaaacttcaagaataagtattttctgacattgaaaaatagccagagcaaaattgtgttgtttgaaagaatgaaaacaaattttctttatactttctccaaactgttgcctggaggcagctctaaagcactaggataggaaaagcctaacaaagctcagtggtctcatggcttcagcaaggtgaggagaggagagaccagggaggctgaggtggccagaattcacagggcagaatacgagaaaggagacagcctgaagagaaagagctccggaaacctggatagaaacctcttcgaggctttggctgagtactgatcagcacaggcctggtttgaaaccccacaaggctttggaaagaacctcctgaagcaattcacagagctcaaaccaggctagatagagtttgtcatctcaccagccaaaacggaaaaaccggtgatacagggaacttgctagaggcctcagaagggtatcactcgcatggtacagctaaataaggcctacatcaaagcctgctctgcacctgccaaaatacagcataaaatcagatttgaaaatgtcaacgccatccaaagcggtttaattacgtgttaggacacagcccgacactcacatcccccgactttcacttccatgttatgaaggaacaaaacaacacggtgtttgttgtttaaccccctcgggccccacgccctctgcctggaggatrctctcccagatctctattttacttgctccctcacctcctcaggggtatactcaaatgtccccttttcagtgaagccctccttgaccacccatttaaacttgtattctcctccctactccttaacctccttcccagctttattttcctgcgtagaattttatcaccatctaacttgctctacattttatggatgtaatttttttgtcagcgtcccttccctacattataaccttcatgaaggcaggggtttttgttctgtgttcactgctatctcatcaatatctaaagcagttcctagcacataataaatgcttaaagattatctgctgaataaatattttagaaaaataactgcagctccaatgtgtactgtctactatgatacaaaagaaataaaaacatggttcacaaaaatatgttatagcttttattatgatatcttctagtttcatatatgtctttatatatgaatatataatatataaatttatatatattttatatatatatattttatatatatatatattctctatatttcccatcctcttttctctcttactaatatcccaagggctatttttttccctaccctgctcaaagcggaaaacaaaacaaagactcaaagaacctagcagaggccgggcacagtggctcatgcctgtaatcccagcactttgggaggccaaagcaagcagatcacctgaggtcaggagtttgagtccgacctggccaacatggtgaaaccctgtctttactgaaaatataaaaattagccaggcttggtggtgggcatctgtaatcccagctactcgggaggctgaggcaggagaatcgcttgaacccgggaggcggaggttccagtgagctgagattgtgccactgcactccagcctgagtgacagagtaagacttggtctcaaaaaaaaaaaaaaaaagaaaaagaaagatttgggtgcaatgcaaacttttttttgttttgttttttcttgttcctaaagactggttaagactggatttgtgggaaacaggagaaaattcagcagtgactaacaaaaaaggaggaagggctgaggcttcagaagtggtagggaagaacagaagctcccttctgagggagcacccaggagatgaaaggaaccaatcctgggtggtcctgcaccaggcttatcaacccctgacagacaaatggaaaacttctgtgatggtgggacatgaaaaaatatttcacccttctgataaaatggaaccagcagatagaagtaggaatttttctgttaggtgaaatgtttttaaaaatatgtatataggaaaaagcataaaacagtattgactggcaaacatagaactggaatgtaaatataatgttctttgccctgaatgatttaagtggcatgataaaactcatgccacagactgggtaagacaaggaatctaatccactctaaaaagaagaaaagcatagtaaaattctccttagagttagaattattaatagttcctatctactatttaatttaatcatagttaatgatgagaatttcttatattttatgcatctgatgatgctaaatgtgcatttctcatgattccttaaaacaatttttgtaaattctattcctaggaccttctgctttcagaaaaattaatgtcttgtattcttcgtattggaggagatccatctgttcacttgctacgcagtggttatcaaacttcgtgtgcatcagaatcctctggaagggttagacggggactgcctggcctgccctcagaggttctgactggtaggtctggggtggggcctgaaaattagcatttctaacaaattcctckgtgaggctagtactgctggtcaggaccaccctctaagaaccactgacacttaaaatcagggatgtattttcaagaaactcacaccatctttcatattaattgaatgttgttaatttgaattttattatttttaaatctggttggtaatttgtcaatccgttggttttatagttacataaaaactataagcataaagatgttatatagagtttttgtttgtttgtttgtttttgtttttgttttagacagagtctcgttctgttgcccaggctggagtgcagtggtgcaatctcagctcactgcaacccctgcctcccggattcaagcgattctcctgcctcagcctcccgagtagctgctgggattactggtgcccaccaccaaggtcggctactttttgtattattagtagagacgcggtttcaccatgttggccaggctggtctcgaactcctgacctcgtgatccacccacctcggcctcccaaagtgctgggactacaggcatgggccactgcacccagcctatatagagttttatgtctgtacccacttaaataattttacaataaaaatgatcactaatgagaattgttttcctataattggctctgtatacagtattcaatgttattacccggacgatttttcttatctctactctttactctaattttttccctatatctcagcaagagtgatcgatgtcaaacataaatctggtcacatcatttccctctggtaacctttacactggctccttctttgtgtctagataaatcctaagtttcctaagatggcatagaagatctctcatgactggcccctgcttatttctccaggttcatggctgacatctcctcacctccactcctcttatcccacagtctctttgaacgcttgtgcttctgtgtgtttccatttgcattagagcctttgtctgtgtggtcctatctgcctgacgtgctgctccacttacctgatttgacctgctggattccatgttttctgtaagactcttggatgtccattactctctagtctctgctaactccctgtggtcctctctatgtacctccacagcaatccagattacccagccgaatattcatcacactctattacaatttcctattttcttgtttttgttccccaatagtttgtagaaatttccagatgaggggctatgacaatattaattattgaattcctccccaaatcctgacataaaaaagatactaataaacattaaaaatatatataagaatgatactcaataatacaataaataggtctgaagtttctattatttttaaataaacaaagctactctcatattaaccacccctgtgaccctcctctagccatcaggaaggctagagtgctgagcttcaggaaaccactgaagccagttcctgatgatgccttcactctttgcagacaatgccacaagcacttgaactaacaactgctccacttgtctcctgctctggaagctccatgaaggcagagactgtctctcacagcatctcagtgccaggcatatagtagacacttaatattggttgcctatcttttattttgccattagtgtgtgatcagaattaattcagacagtcagtggatatttgctcctgaattcttggtgactggcccaratacaacttttaccatttcataaccgtcttctattatttttgttcttctttttccttgtactcaaattccaaaaacttaaagcagatcatgagaacagtggttttgattcagttctctgtagagaaccaggtaggaaagctgggaaatggtttggaaaaaaatgaggacagaaaaagtagagagcttcctgcttcttttattttccccttgaagctgacattaatagttggtgctaatgtaacctctaaatttctttttataagaaaagaaacctgaagggsctgcctattattagaatacttgtgagatataaacttcttgatatgtgtctaaaatttgaaccaatttagtggtacaataaatagtgattagagtacaataaggaattttgtttttcagaataaaagcagtaaaaaaagccttgttttgcaactttaagtatgtgaatattcatgaaagcaaactttcgaaataaactttaaataaaaattaaaaggaaaagagattacagacttggtttttggcaacatatatttaagtcatctcattacactgtgctatggtctgaatgtctatgtcaacccaaaattcatatgctgaaatcctaagccccatagtgatgatactttttcagaggtggggtcttgagggcagattcttcataaatgggaattaatgcccttataacagagtctggagagagatcccttgttccttcatcaggtgaggttaaagcaaaaagatgcctgtctaggaaacgagaccgcaccagaggtggaatttgcctgtaccttgattttggatttcccaccctactaaactgtgagaaataaatttctgttatgtataagctacccagtctatggtagttttttatagaggcctagacatactaagatattttgtacatttattatccaaatttcctttctcttgatgaatcaagactagtcacctaaaggcaaatactagaaattactatattatgctatttacaaagaaagcatccaggaaaagagtttaattatagtatttgagagcagaaacacttcccataatcactgttcatgaatttgctaaactagaatattatatggtaaaccgtatttacatcttttaagagagacaataatacctttcttattttttttctttttttgtttttttgagatagagtcttgctctgtctcccaggctggagtccaatggtgcaatctctgctcactgcaacctctgcctcctaggttcaagagattctcctgcctcagcctcctgagtagctgggtttgcaggtgtgcaccaccacacctggctattttttgtayttttagtagagacagggtttcaccatgttgtccaggctggtctcgaactcctgacctcaagtgatctgcccacctcggcctccaaaagtgttggaattacaggcatgaaccacctcacctggcctaatacatttcttacaagaggttctaaggattcattagtttatatttgtaaagagttttaaaagtgaaatgcttcccgcccttctttgtcactgaaatcattaacaaatgatgatcagtattcccttcttaatgtcttagaaaagcctgactatccaatgctgtgcaattatcttcttcatgttagaattcaaaatttgagccccatattcatgcattaaaatgctcacttcttgttttaaaatacctacaatatcatttagatcaatttggagttttcaaagaaaaaaaaaagcccttccttagaatgatattattaagactgtcaagtcacatttgctttatagaatttcatgtaatacacaaatacccaacttaaaattcctgatttatgaaaaagttgtagaacaatacaaaatatttattatttatagagcagcttccacattccatgtgctatatttgtagagcattccttgcatgtctctcttaaaagcaatgggatcatcaagattgattatttctggaacttgattcgcatatttgcttttccaccacctggaatgtggggctaccggcaagataactatgtaccgataagttcagacactggtagcaaagactgagagtctgtctctctctctctcttcatgacaacatcttgacattctgaggaagagagatcaaattgttaaagtattaaaaaaaaaaaaaaaaaacaacaagctaagcctaagtggggagagagggaacagttccaaaaaggagataaggaaggcatagggtgtgattctgaagggttttgagcaagtttcataaaagagcttaatttcctaaccatggatattttgtgctgaaacagtctttgttgtgggggctctcccatgcattgtaggatggttcacagtattcctggcctctacccactagaggctggtagcactctctgccaaccaaaaatgactccagatattgccaaatgcccagtgggagaaattgggcaggggcggggcagatgaaattttccccagttgagaaccagggctggtatttggcacaaggaaaggaacactggaaatgttttcctaaaattactaatgggaactttcactgtgaagaagacaaccttcttcacagtgaaagttctgcaggggatggccaagccaagagttagaaatggcaaaagatgccaccaaaagctattattaatggatccactagctagaaaaaaaaaaatgatgagaagagccacctttgagtggtgtctgctgaaaacaaagtcttggagctgccacagccatacgtaactgtcaactgaagctccatataatatacttagcaatgatctattatcctctttaatgaagggaagagtctaatagacttcttccaggaaatttgacgggcttaaataccagaaaytccttgccagggactcactgagtttcatttaattcatcaaatatttattgagcactcaatgtgtgccaggctctgtgctagctgtcagaaatacaatggtgaaaacagtctaccctcaaagaacttatgctccagagagaaacacaattataacaagtctggttctcaaatgtctgatrtagggtatgatccaggcagagagtgtcccagttctccacactgagaaccactacacaaccagaactttaaaaaaatcacagtactcctcttttttaaatagcaaaaactgcttagcttttttctgtattcgaatgctttactttttttctctcattttaaatttctcagccatttcactggcatctcaggcagctgctttttctccatctcagaacaatcaatatatgaacatttttaaaagcaaaaaaaaaaatccagttgcaattttatttttctgctggcatacatgtgcacaatcttttgaatttacatgatggtgataaccagccgaagtcagcaagcctttctgaaaaagcagttgattcaatgatgacagctgtgctgtcatttcttatttaggcccagctgcctaataatagcaaagtaatattattaataaattactggcatagctagttagagaatgtaaccaattacatatagttttaaattcactacaggcaaaacgctcactagttttctacrtatgattcacagtcctgtcttcagtggtactgaaccacagcctttgtagactagtcattagtattcaggataagaaacaattgcttggaacaggaaacacagaagccagacatttggcaacaccacacagcattcactgctgaagtcaactggcgaagcgactctggactgacagaaactggcctctgttgccatggaaacagcagtgaactgtgttagtaaacagtttgagttctctcacctgccagggcataaattcaaattttactgctgatttttaagtctactatttgtaagtgacctatttagggagtaaatactggaaatcactcttcgcttcagaaaaaaacatccaaatctttgcaaaaacatctgagtcttaaggtacccaaacacaattaaatgtaattgtgcagaatacctgacaaaagccagtctatctattcattctaatgactgcctattttgccaaaaactagttcctgaaagtacataaataaaataaaaataaaatggtaaggaagtggaggtaatgctaatccccaagaaaaagacttttacaaattcacagtgaggattcatgccactgtttaattttatttcaagccacatttattttaaatttctcccatcctcactcatagcaaaatgagccaagtaaggctgcctcctgtccactttagactcaaacatcccattaccggaattcctctgtctggataattacaatcattattacccctaaattacaaatgcacaaagtatgacagaagaaaaatgtcttgactgcagcagttcaggaaaacagccatagtgcgagcctctaattctcagctctcttaatccacatgtctcctaggtcattctggcttcattaagcttcttccttcaactcttttcaatttcatgctaaattatatttttccataaagtctacaagtgaaaacatcattttgttttttgctctaagtaaccaattcccccttatcaacaattgctaaaatattcccattacccttttctgtgacttcgactttcattcatcaataaacatttaccaagcaaacatttataagtcatgtgctatatgcttggcaaaggaagaagtgatataaagatgaaaaaaaaagttttctgcttttaaagatgtagtctagtgggaaaactagaaagaaagaaagacagacagatagatagataacaatttgataaacacagtagcgaaagtagactaaaagtacaatgggaacactgtgaagaaaaagctaattttgcttggggaaatagagaatgccacactgagaaggtggtattttcaccacatctcaaagggtaaataggagttttatatgtggtagttagaaaaggcatgtactaaaaaataattttcaaaaagttgaaaacattgctctcattcatatataaaatgaacacgtgtcaaatattttatttgacttacagagatttataaccgctactggacaaaattcatttgcattagtatgaacaggaaccatttgtattgctacagataagaatcatctgcactgctatcagttttctacaacttaacttctaccactacgaaatcatagaatagtctagttgacagaaagtcgatcaactctgcacacacctatggaatcaacagtccccacaggatcttctagatagcacccagtggtctctttagtccatttccaagtcttgaacggtttattctggcagaagaaataggcattccagattttggggaaagtacattaaaaacaaagagatctggaaaagtaagtatttggaaatgactaaaaataaggcagtaggaggaaaggaaagtcaataaagtcacggaaagaagttaagattacatgggaatgggaatttggggccaaattgtgaaagatctcacgtgccatgcaagagtatagactgtccaaaaacagtgggaagccactgaagaattttaaaccttgaagtgtcaagttaaaagatgttttttgtttcttcacccttaatgcttaatctattcaaatctgcattttctaccattgtggcttgttttggagtatttctttttttttttttttttttttttgagacggagtcccgctgtttagcccaggccggattgcagtggcgcaatctcggctcactgcaagctccacctcccaggttcacgccattctcctgcctcagcctcccgagtagctgggactacaggygcccgccaccrcgcccggctaattttttgtatttttagtagagacggggtttcaccgtgttagccaagatggtctcgatctcctgaccttgtgatccgcccgcctcggcctcccaaagtgctgggattacaggcgtgagccaccgcgcccagccgtatttcttaatttaatattaaatttcttcctgtttgttttctagactgtaaaaacgtctccatttttaatatttttttcacttattcaaagcccttaattcctctagtcctcttagttatctcatgatgtacttaacatgttgctattcttttttcaaatataagttacacacttaactcaggaaaatccaatggccctaattttcactcaagggcatatctgagagaccacctattttttagggacagtgttgtctgaattaaaaatatatggtacttcagtggtaaaggaattgcaaatgaaataatgtgtcatcacttacacccaccagagtgtttaaaattaaaatactagtaataccaaaaacaaacaaacaaaaaatatatggtacttcttgattatttagtattatgcacctatattatacttgaaggacattaacatttattttactgagcctttttccaaatatttttaaaaattctgacctattgttgaaacacattttatttataataatgtgatatataatacatataacttgtgttatatccctgttagtttcatattaggaaaagactcccatccataaatgctaacctagtaaagagtcatgtagattctgggaaattaaagcaattcttactgttttgttttaaggttattcctctgagaaagcttatgtttccattatgtaagatttagaatcattttcaataactaaatgatagtcatgtactagaattaaaactattaagaatctaagaaaaggtaatcctgaaatatagtggtacggcagaagagatatttcattttcctaagttttaataacaacaaaatcaaggccgggcaccgtggtttatgcctgtaatcccagcactttgggaggctaaggtgggggaatcacctgaggtcaggagttcaagaccagcatggccaacatggcaaaaccctgtctctactaaaaatacaaaaattagccaagcatggtggccagtgcctgtaatcccagctacttgggaggctgaggcaggagaatcacttgaacccgggaggcggaggtgtcagtgagccgagatcacaccactacactacagcctgggcgacaagagggagactccatctccaaaaaaaaaaaaaaaaatcaaaacagacaatcactttctttttaagacaagcaggagtctattgtaatacacttttaatcaaggaaatggaatcaattgtcatgcttaatattatcacaatttaaaataatacaactggcaaataaagaaatagataatttgtttgatattattgggacttcattttatatacactaatacaggaattaccaaaytttttacccagatgctcttaaaaataattgaggacccaaaagagcttctatttatgatcattatatctatcagatttactgtatcagaaattaagctaaaaatgtttaaatattaatgtaagtagccacaataaacccattaaacgttagcaaaattaatgtatgattttaaaaaactatatgttttaaaatgtgtgagaagagtggcagtgttttatatttttrcaaatctatttaatatcttccttaatagaggatagctagattctcattcaatctattgtgatatcacatatcatgtggcctctactgtacattccagaaaggatgagcatgaaaaaggcaaatagtatttttgcagtattatgaaaatactttttgacttgcacatttcttgcaagtatctcagagacttccaggggaccccaaatcatactttgcaaacaactgcactaatgtgttcactcaaaactactttgaatgaatgtgtccattagcaaatcagttgcatcagtttaagaattccaaagatattattacattagttttaaaacagtaattacagtgtagtgtgcccagaaatattatagaaaacaaaatatacactataatacattataattttctccttcaatataacaaaatgaaaaataaatttccttagagggaaaatcaaagaaaaatgtggcatatatttgctgttcacttgggaaaatttcagcaattaaaaacagattgaactctaacatttttctgacatagcctttgcccattagatgaaaatcttgccatgaaggccacgagtactaatgttgcaataataattactctccgtgtgcccacatttatatgtagtctttgtggagggaaatatctcactttgaattctgggtattttacatggctgagataagcttagagtctataattcaagcacgggtctagtgactttctaaatctgggcagtcattcaaattgtaaaccaagtagcataagaagagccagatgagtaaatgaagcataactagggtgatatactgggggaaaaaagaagcaaaactcaaaatcttcttctgactcacagtggcataaattgagattccagttctctgagctacattttcagaagaggtcctttctggtccattacttagaaaataaatatgtctttacatagtctaccttgtaatagaaggactccatgggctcacattgcacagtttcaggtgagtttttaatatgctaaaggcagatcttagagcctttctgattttgtacctgagaggtacttagagtgatgaaagctcaattccattcaactggcctaatactttttacaaggaactcatacatgtatgcatgagtgtgggaactagggagttgaaccagtgttataaaatgtgatgttgattataacacaaggaactttaagggaagtgcaaagggctatagaaatgcataaagaaaagagaatgttgtaagttagagaaaggagaaagagttagtggtgtgagacagacatatgcaggcaaataagattttaaaaggtggaaatgagaaccaaggttatcccaggggaaagaaatagctttaaaagaatgcaaagaccaaaaacagaaacatatgactcacattcaggaaactgtgaagagtctagtttggttgggacatagatttgttgggcaaataggggacattaatagggaatagtagagtggtggaatattgtcaaggtccttcatttccagggtgaraagtgtgtagttaattctaaggcaagagggaatcattaaagattttagtagtagtctcagagtcttgcatcagatggatttagagaaaacagaggtaggacaccagcacacaactgttgtctaagtcaaggcaagaagcaatgaatgggtcctaagctatagctctagctgcagaattatagaggcaagaaacattttcccagacaaaactataaagtgaaccaacaggtgaatataacaattaacagagaaaggcctgtcgaaaatgactcagattctgacactagtccattagggaaatgatgatatcattcgtactaawagggaagtacaaaaaaagagaattgatttgggagaaagaaaatggttattgaacacattaaatttcagaatagaggttaagtgagcatttgaaaatagagagtaggtgctgagactcctctatttgtgatctttatacatctcttaataccttaagcttccaaaggggtgggagataagaaagagtttcttatctaattgaaaaaagagattgatttttatcatttcattttcttgcaaagaatgaaacatctggcattatcctatatttctgctatagcttaaaatgagtacagtcttcctacaagctgccacttttctttgctgaattgctgtcttgaagattagacagaggaaaaagaaaaggggaaaaaataaacttgtaagaggacatgataattgaatatctctatrcctctatttttagataaattcctgcaggccatccccmcttttgcaagtgagaatgtgtttcatgacatgatttagttaaattataaatagtccatttagatgcatctatccaagaataatacccacaaactacttactgatgaatcgtcgggcttttagcttagtttagaatagactgggggaatgatgcatctattctgctgacctagaagaaagattcccaaagctacctgggatttgaaagaaagcataccatttaaaaataaatgaccatctaccttttctgctaaatttgttaatatgaactggtattcaattgaagttattaaagctaactgttctgatatttaaattgtattcagtaaacttcatttcatttcataatactaaaaattctcaatatggtgatgaatgagttaacatataaaaagtccttagaatagctcctggcacatagtcaggtgctatttaaatactgctatcatcatcattattatcacactcatcaataacatatacacattttatatcctacaatctttacattaaaatggaaaaaaataaatcattttaaattcaaagtcttatgggacagtattctttgctggcactgatatcttgcccctattttggttttttgttatttatttggtaacttgcctccttatttaaaagttctactgcataatatataactgaaataaaaagtaattgaggctgtaaagcagtcccacattccccactgatgctgctcagcgtgaatatctctgcctttccatcgctggggcaggcaaaccatggtcagatacacagaacagatgaactccggcatgcagatcttcttgacctctctgtgcacaagcattgcatcaatataataggtgaaggaggcatatgctcaggaactaaagaccaagggctacwttgccttcagccacctgcagcctacattcaacagtctgcacggtaattgcattaaggagatgcttccagcaatactgaagtaaccagaaaatcaacaactggggctttttccatttctggctataacctagaaatcgttcgtggtggtcaaaagtatgcccccagagccaattagtctcgattcaattccagcactgctaccaaggtgtgtgatcttgggcaagttactaacctctctcttcctcagtgacaatttcacaaaacggacataataaagggatattctccattgaactgttaagaagaatcagagtgaagacatgggaggaagttaaagcagtgcccggcatgtagcaagtgcttaataaacgcaacctaagcttgcaacaatatgtgccaggccacatacaggcctaaagattaagcactacaccactatcctttgaactgtttgagcctgtgaaaggaaaatatctcaggccccaaaatcactaaggaaaattcaagctggaaactgcttaaggcaaacctgtctcccattctattcaaagttatccctctgctcactgagatacatgctttatctgattgcctcctttggaaaggctaatcagaaactcaaaagaatgcaaccacttatttctcacctatctctgacctggaagctccctcccccttttctagacttcctgcccttgcttcaggatgtcccacctttccagatggaaccaaagtacttcttacatgtattgattcatgtctcatgtctccctaaaatgtataaaaccaagccrtgccccgaccaccttgggcacatgtcaggatttcctgaggctgtgtcacaggcccatcctaaatcttggcaaaataaactttctaaattaactgagacctatctctgattttctgggttcacaagacatatgttagtaacatcattctaagtgaatttgcaatgccctstattttggcttttatttgaaaatacagagaatatatttattgaatatgggtcatccatttttataccaagtaatatacgactgaatgacttgatgaagtgtgaaggtttctgatcaacgtgcatagtacattggatttaccacaagtaactttcttataagcaacataaatatgatattactattgtgaaaataccagtataacatgtcaagggaaaagttgattctaaaatttctggcagccttgaaacctattgaaatgctttcaccttcctaaacttgagtcttatttttaatatatagttcacttccttgagacactatttatgatggcttgctctctgttatttttttcctaatttctcactgtgtgatttagtggtttttttcttctcaaggaaggttctttattcctttcctgctgtggaatgtttttcatgatggcaattttaattatttactccacatctcctactgtggcacaggtcagaacattagaacattacttttaagatgggctgttatataggtttcctgtaagagtccaagatcaaagtcagacccacagatacacaatattaasacacctgatcccaagcactatatgattacacagttttaagttacacacacacacacacacacacacacacacacatacatgcaccccaacagagtcaaccatgtgggctgtgcatatttgtcctgaaaaacaaacatctaagctaatatgcaaacaaatgtaacacatattgcttgaatagtataaatgtattaatatcaacaaaaaatgactcaacattaataaggaagcttaaaagataaaatactaaggaggagaaagttataaaccacaaatcctaggctctcgtcttattattcattagttttatagataatccaaggtaaatctttacctcttttatgattctcagtttttccatcatgactatataaactcttttaatggcactgatcttacattataggatacctttaggatagttcttgtttggaatttgaggacctctaccttcaacactgtcacaatgaaaaacagattttattattttgtggagagcaaatgagactttaaaggactgtaactacatttaactacattttgtcagcaaatgatgacaacttctaactctccctttgcagaaatagtctacatatctagtagtttctaccccaagtatgatggtagaaatggtgagactctttattcctaggtgtgttgcctgcttctggttacagacatttggttatgtcaaaggcaagccctctgtcacatgcctctctaaaaagagaatcacactggtcccaggatccagaacmcttgggactactgaagaattccactttcaggcaaaagacaggaagtgtgaagacactgtctggrtgttaaaatcactgtrtttcataagaaacaaatagaaagatcaatccctcgatcagactctatctctcgttcttctacaccttctcttttattattttataaaagaatcaaaatagccaatagaaggaaagcatctcaaaatggggcagactcataaaaaactattattttgtatacatccttatcctatctgaccatgatttcttctggaattaacaatgacaaaactaataaactcacaagtcagtactatgtgcattctgtactaataaatatatatggacatagaattggaagtttgagaccattgtccaatccaattgaggcatccttccttcatcctgacactggttatccagtttaaatacttctagtgacaagcagcttgtgaccacatgaaacaatttcttctatttttggacagaactaatggttttaaatgctgctctttatattaaactaacatggacatcactagtaattctatttagtcatcayagtacatgctttcttggactctatataccatattctaatttttattacgtgtgactagttttcacatatgaaaatacccataatgtccttccaagtgctccttactcaccgtatatataaagcaacttattggaaatatttctgaaacttgccggacttctggttgaaaggtgaatagcaaatgtattacattgtatctggaatactgtccgaaaattagaattcaaactctttcacaataaatttaaggtttttcacatagtctaactcactacaattctctcagagttaatgatttagatgaaacaatgtaaatagggactgcaggatattaagtgatatctaacaaagatcatttcccaaattcatgttacagtggttcctggtttagctggaattcagggaacgacactaggagtgttttgtaatcagaagaatccagcatcagacagtccgaccagacaggaaattgatttgtcagtcttacacttaaaaacttaatagtggagaaacagtattggattgtctatgttcaatttcacagcaatttcctggcattagtgtaaggaacacaaagctatgtgtacttttggcgttgatattatttaagctggtattctaagcttatgagcataaattctttattgtttttcgcaagtatatacatatttgtatgcccttgtagatacatatgtaggcatatacatacatgtacataaatatgtaggcatatacatacatatgcatatataaatacatgaatacatatatatacacacacatagatagatagatagatatactttttacaattgattaatggcaaagatgccactgcaatgcagtgaggaatatgatggttctgcatccattgaatctgcatttgaaaaacaaaataatataaactctaatctttcctttgacaccacacctaatggatcacagacccaaatgtaaatgcttaaaaagcatctagaaaataagtaagaggaattatgtccttgagataggcaaatatttcttcaaaagaacacacataaaagcaataactataaaaataaaaggttgatatattgaaccttattaaaattgaaaatcttttgtggtcaaaagcctctgttaagaaagtataaagaccagacatggaaagatgttgaaatctacctattcaacagaggacttacaaagagctacaatatcaggaagaaaaaacaactcagttttttaaaagtgggcaagagagtagaataagcacttcacaaaggaagacatccaagtggccaaaaagcagattaaaatattctcaacattgtttgtcattagggaaattcagtttaaaaccacaataagatatctatacaaccagaataataactaacatttctaaaactgacaataataccaagtagcagctgcagcaactgaactcagaaacatttctggtaggaatacaaattgtcacaataactttggaacactgtatagcagtatcttccaaacctaaacatacagggatccaatgatctagcacttccaccccagatgcatacacaagtacatatgttcactgaaagtcaagtgcaagaacgttcaaaagagccaaaactagaagcaacacatatgtttatcaacagtagagatgataaaatatatttggatatattcacacaaggaatcctacaagcaatgcaaaagatcagactacagccacaaaaaaacagcatggatggactttacagacataatgctgagtgaaaagaagaaacaaaaacagtatttaccatataatgccatttatatcaagttcagaacaggcaaaactaacttagaatgacagaagtcagaagagccattgcctttggaaggtattgactgcaaggaggcccaaaggagccttccaggctcctggaaatattctagatcttgacctgtttggtggatacataggttatatggtttggctttgtgtccccacccaaatctcatcttgaattatacacccataattcccacaygttgtgggaggaacccggtgggagataattgaactatggggacagtttcccccatactgttctcatggtagtgaataagtctcacgtgatctgatggttttattagaggtttctgcttttgcatcttcctcattttctcttattgctgccatgtaagaagtgcctttcacctcccaccatgattctgagccctccccagccaggtggagctayaagtccaattaaacctctttttcttcccagtcgtgggtatgtctttatcagcagcatgaaaatggaccaacccgataggtatatayatgtgcgaaaatttatcacactgtacrtttaagatacatgaccttactgcatataactcaatagaaatagaagttgttgttgttttctgattacaaagagaatacatgcaaggaaaatacttagatatacaacataaaaagttacaaatcaaccataataccatctagagtgataagggaatatattgatatgcataacaaacttaagatcatattacacacacaatcttctatttctttcctcttaaaatgaaagctttgtgccataaaattttctaggttttaatgtctacaaagtattccaacacatagaattatttttaacctatcccttattaatgaacattttaaatgtttttaatgtttaaaatacttttaaaaaattctaatgcttataatttttgctattatacattacaatagatgaatatccctatatagtctttgatgacacacataaaatacatttgagaggatggaactggaggtcattatgttatgtgaaataaggcacagaaagacaaacatcacatgttcttacttatttatgtgatctaaaaatcaaaacaattgaactcatggagataagagtagaaggatggttaccagagggtgggaagattagtgggggatgcggggcatggagggggtggttaatggtaataggtacaaaaaaatagttagaaaaaatgcataagacctagcgtttgaaagcacagcaggctgactatagtcaataataatttaattgtacattttaaaataactaaaagagttattggatcatttgtaacacaaataaatgcttgactagatggatatcccactttccatgatgtgattattatgcattacatgcctgtatcaaaatatctcatgtatcccataaacatatacacctactatgtacctacaaaaaaattaaaaaattaaaaaatatttaaatgcatttcagaaaggaaaatactaaacccaacaatgtaaacattttctagagtacttatgatgtagtatattgtcaaattagcatcaagaatatagtaccataatagtttttgcctgttaattttatttatgtgtatgtacagggttgctttctaatgcaaataaccaaaattatataaccttggcaaagtaatacatttttaatgctgacacagacatatcaagcaagaaaaattaggtatacagaagtcactcaacttcaaatgcagattatattaacttttcttcaagtagacttattgaaaaagtctttaatacttctgagatatatagaaatacaaaataaagtattactttcttccccaaagcagtaaaaagttgtatacttaagactcttctcttctgtgcaagtaaatctctatacctattcttaaatgacatttgtctataaattttttttaaaggacgtcactgctagagtggtatcttcattagaaatgcctctgtaacaaacactgttgctactccctaatgctgatgttacactgaaattttcattcctccagaatcgatgcaaatcawatcaaacactacaccatacaacaaagaaaaagagatagcaaatggaagtatattagcatagcaaatccttagcaatacatgacttactgcatgcaccaaaaataatattcacatctgaaaaaattttgcaacgcattaaaccctagcatttatatatttttttctattctaaagtaaaattgaccaaacaacttaaaaccaactttttcttaaggaaagaagagagagagaattgacatataaacataaatctgaattggtcatatractaataatatctatgtacaaattatcctttccagggatatctcacagtaaattcaacaaaatacaacttcaatgtatgtctctgactccctgtcacatatgcatatacatgcacacagaaaaacactatgaatttaacatacaggtgaatttgcaattatttctcattggtcgaaataagacataaaagcaaagcattttgcttttattaagatgaacaataatttataaggtgatatgattttcatcccaggtaagaaaatggtcattgactaagaaagcagtagtggcagacagagattgttccaggggctgcaaattcaagtgcccacagggactacacaggtatcgtagatgcatgaggaagctgagctgaatcccggcaacctacaacacacaagccatcctaacggcattagcggcagccagttgttgtcgtagtagaaatgcccacctyatgcttcagattttatcatttttcatgagagggattttttaatgctggattttaaaaagcttctaattaatactcaaaattttttaaccatgtgcgagccttactaaacatggatttatcccaaagtaattcagtttgcagtctctatctagtccataaaggagaaataatctgcccaaaatcacacagtagggcactggcacatccaaaagaggtttgtccttccaagaggcgtgcccaccactgccacccagtwtgctgcattctctgacaaagttgtattccaaaaccacgttttgtcacttgttctctggggcaccactatgaatctgggctattacgcttttccttttctattagagtctctctcctagtctcaattatcaaaactccaattagatcagcctcccatgcatctgaggttccttctcacgttcgtactttcgttcaggctcttctccctccctagaagatgcccattactctgccctccttagtcctgcccacctctgagggccagacttaaatactgtatttctaggaagatttctttgaagctcacaatgaagtcttcttctttgaaatactactgcacttctaatcagtacagtgccatattatctattgattatgcttcctgttttgtagtatttatatacccaaatctactataaattcctttagagttcaaactctgtcttttccttctttcacaccatctacattctaacatattactaattctaacatattaattctaacatattagtgagcaggtgctaaatactcaagaaatagtcttgactggttgacctcatacctcttccaggctacataaggatgccataaataatcctggaaattatttgctatactattttagcatctctattagtttctgagagctgccataacaaaatgctgcaagcttagtgtgaaacaatgaacatttattctctcacagtgctggaggctgtaagtcagaaatcaggctatcggcaggaccatgctctctctgaaggctctagaggagcctcgtttcttgcttcttgcttctggtggttgccagcaatccttggagttctctgccttgtagctggatcactccagtctctgcctctgtcttcccattgccttctcccaatgtgtctgcgtctctgtgtccacatttccctcttctcataaggacaccaattatattggatttaggggccctctcaaatccagtaggacctcatcttaacctgattacatctccaaagaccgtctctccaaataaaattaaaataacatccataggtttctggtggacataaattttgaggggacagtattccattttatatagcagctaacctattcagggttgattttatgtagaattcaaaatagcagtaaccactggagaataaacaatattctccagtgagttttcgttgcctacatattttaaaggagtatcataatttggggtatttggagaaacccactcataacaaaactaaaaaaactattttgaactagagaaagtttcaaattttgaattagagaaagttcaaaattataaaaaattggctgattttaggctctcttgccccatgcgttttaaagtatagatttaaayacttcagtaatccatgggaagacctatgagaaagctaaataatataataaggagaaataatctgcccaaagtcacacagtggaaaaagaagaagagatgacagaaaggycttgtcccccatttccttgcatcatttgaagggtttctctgatcttgtctgacagttactatgttatctattactgtgcctatggtagcacttacataaatcaagtaaatagatctagcctctagccaccagaagtttgcaatttacagacatttacataaattaataatttatattaggctggcagtatgacacattggaaagatccctaagtaatcatcacagccctgccattactaattgtgggacctgaacrggttgcataatctctctccatagcacttcttcacttgaaaattaaagtgggacagcctagawtatctctaaagtcccttccaactctaagtagaaaggcggagttttctatgtttattgaatctatgtttattgaacctctgagttggagggtatctcagaagttaaatagcagaagggaccaacactcattcttcagttcaaagtttcaaaagattaaaatagcatttcaatacatcacttccactgaaacagggtgggtaaaacgttggttggagaatggaaaatctattgataaaggaagagacaagtaaggtggacctgggaggtgagaactagggaacacaagagaatatgggaagtaggcaggcaaattaactgagaagggtaargggagaagccgtgccggggccagaagtgaagaagaacagaacaggaattatagagagaaactgctgaaaattcatttcagagtccaaagactgaaaacattcctcacctagcaaggatggagacatacatttctccatttcagaaaattcatgcaaaataactagaataaatactcttgaataagggatggaactttctaagtcattccatkgtaaaaatttgaagcagtgcaatcacatgatattatgagaaagtcagcccctattggtgcccttagccacttcctttcactcatctctgatttttcagcctcagctgcagtggacagttccaaacaagctcagacatgactttttttggcagcaacctgaatccaggaggcaccatacctttcttctttatggctggggccttctcaactccaaggaaacctgctcagcccttgaacaagcccattctgaagtactagaagagttaatgtccccaggggcaatcttcaatcaatgagggatggcagctaatgctcccaagtgcttctgcctcaagtccttgtaaagacaaccctgggatacctgatttgccttcaggaagtcttgatcaatcaagccctactgcccaaggcagaaacctcttcctctatctctctttctactctctccctcactcctgtccctctaaagtgacttccaaaatataccacttacacccaagtccttctcagtctctgctgcagactcagatgtttcaaaaagttgtctccttagagaaagctcttgaaagtaatgagaagtagtcaaacttcaagagcaacggtggtattgggaggcacgaaacctggagtctagttctgttactaagtggctgtatgaccttagacaagtcagctaactcatccaatctgtggtttttcacatccgtaaaatgtagctatcaggctagatatcttaggtttttccagttaacatggtctttaatttgaaaatatatctcccaatctatagttcagaaattatgagatcaaagagataaggttccactgcacctagattgttgggatgcaattgcaactacagtgtattatgattcaaaaccttaatgagagcctgcagtgatagaacttgattcacagtttcagcagtgaggcttatttctattccaggctctcaaatactctaataaccaaatcaaatagaatatctacactttttgtcagaaagaatggtatcaatgacttagaactttggataataaagaatcttgtaaatttgtttgagttcattgtagattctggatattagccctttgtcagatgagtaggttgcgaaaattttctcccattttgtaggttgcctgttcactgtgatggtagtttcttttgctgtgcagaagctcttgagtttaattagatcccatttgtcaattttggcttttgttgccattgcttttggtgttttagacatgaagccttgcacatgcctatgtcctgaatggtaatgcctaggtgttcttctagggtttttatggttttcggtctaacgtttaagtctttaatccatcttgaattaatttttgtataagctgtaaggaagggatccagtttcagctttctacatatggcaaatttacaagaaaaaaacaaacaaccccatcaaaaagtgggtgaaggacatgaacagacacttctcaaaagaagacaattatgcagccaaaaaacacatgaaaaaatgctcaccatcactggtcatcagagaaatgcaaatcaaaaccataatgagataccatctcacaccagttagaatggcaatcattaaaaagtcaggaaacaacaggtgctggagaggatgtggagaaataggaacacttttacactgttggtgggactgtaaactagttcaaccattgtggaagtcagtgtggcgattcctcaaggatctagaactagaaataccatttgacccagccatcccattactgggtatatacccaaaggactataaatcatgctgctataaagacacatgcacacatatgtttattgcggcactattcacaatagcaaagacttggaaccaacccaaatgtccaacaatgataaactggattaagaaaatgtggcacatatacaccatggaatactatgcagccataaaaaatgatgagttcatgttctttgtagggacatggatgaaattggaaatcatcattctcagtaaactatcgcaagaacaaaaaaacaaacaccgcatattctcactcaaaggtgggaattgagcaatgagaacacatggacacaggaaggggaacatcacactctggggactgttgtggggtggggggaggggggagggatagctttaggagatatacctaatgctaaatgacgagttaatgggtgcaacacaccagcatggcacatgtatacatatgtaactaacctgcacattgtgcacatgtaccctaaaactcaaagtataattaaaaaaaaaagaatctrtatgagtggttctactaaatatcctaaataaattgtaaacctgttttgtaaccccaagacagatatgtactgctctcatttgtaacatacctccttttaaatttttaaatttttttttttttaaacagagacaggatatcagtatgttttccaggctggtctcacactcttggcctcaagcaatcttctctcctcagcctcccaaagtgctggggttacaagaataagccgccacacccatcctagatctccttttttaaatagaaaaattgagttctgtaaaatataatcagattaattttaaatgccactgtaatcaaatattcataattccattaaatcatatgtcttaatccatgataactaaaatatagccccaaattagtgcacatgtttaagcagcactgtagcatgttttgtgtcatgagaaactatttaaggaacagcttctgacaacattgtttacaaatcagaaaaacagcagaaaaatttgcatttgtttgtccttggcatttcttttctgcatcagcttctcacttcacaggagactatgtctcttacacatgaagcattttagaacacaatctagtcagctagcatacattctgcagagattctatttatagaactcagagaataaagcagcagaaaaaaaggagatgtgcagttacgaacgtctaacataaattaattggtgaggaggaagcaacccaacctgaacgatgcctataaaaaagtctaacatccttctgctcaagtctgacctctttgaagaactcaaaagagaagaagcgacagtaccttggaggcactcctgtggccaaattcaatttcaattccacgtttgtttgtatgactaagtgcccagttctgagactcagcagcaatagcagaggtttactgtttgtttcagatggttttttatcaggcaaggattatttctcatgctactacagcatcttattactgataagtaataagatgtaaaccccattctctttcctggggtttttaaagctaataaatgtggcttatatgctcatcgaagtcattccatatttgaaatatttatgccaggaaatagaaaaatgttacttttcagatatcagggaagaaaatcatccattttaaaaattagcattagcattgcgagcttcacgcctgtaatcccaggactttgggaggccaaggcgggaggatcacctgaggtcaggagttcgaggccaacctggccaacatagtgaaaccccatctctattaaaaatacaaaaattaactgggtgtggtggcatgcgcctatagtcccagctactctggggctgaggcaggagaatctcttgaacctgggaggcgaaggttgcagtgagctgaggttgttccactgtgctccagcctgggtacctgggtggcagagggagcctcygtctcaaagataaataaaaattagcatttatcatcatacatgctggaaaggaagtgctggtaatgaaaggtaagcattttctttgctctcttccttacagtccatttgaagcaagatctgtgtcatctcgaagtctctaaatgtggtcacattttatttctattgttaattcatggcaggtaaggcaaggcacaaatctgacatcaattagaagtggtgtttgccaatctgtgccaggcattgagctaagtgttttatgtaggtaatcacatttaaatctcaccaaatcatgttgagcatcttgaagaactaacctgtccaagatcatataaaaagcaagtttcagaatcaatgtttaaaccgagtctatcagattcaaaatcataatcactcctacagcagtctatacaaaatctagaaattccagagatgactgtaattagaaaagaattaaactaaagatacacaaagttcccagtcatagtctctgaggctttagtgcctggaaagaagatccaatataataatagcattatcaaaaattattttgctattttattcaacagtatactacttttaggcatataactcaaaagtcgatttcagaataattaagagttgaaccactaaagaaaatatacattgagaaaatttgtgtaaaaataatattttaatctaaagagaaataatctacttacaagaaattcaagtgggatgtcgcaggactatttctttgccatcattagaatgcagggttagactaataattctctggtactaaccaaatctaaatagtataataaaactgaaataactaaatctaaatagtataataaaactrtacagcttctctttgaggtagaaagttcccagcaaaggttttagagaagcaacatcaacatcagagtttaagagaagggcattttatacattataagagctagtttaggtcgggcgtactggctcaagtctgtaatcccaacattttgggaggcaatggcaggcagatcacctgcagtcaggagttcgagaccagcctgaccaacatggagaaacctcctctctactaaaatgaaaatacaaaattagccaggcatggtggtgcctgcctgtaatcccagctactcgggaggctgaggcaggagaatcatttgaacccaggaggcagaggttgctgtaagccaagatcgtgccattgcactccaacctaggcaacaagagcaagggaaactccacctcaaaaaaataaaaaaaaaaaagatctgtaatctgttttcaggtcccttacactacttttgatagttactagaagggggtgtccaataaaaaaggcagcagataagcagaggtatgattagagctgggaaaatattaatcgtatcattcattcagtcttatctctccttcctctcagaaattattttctgtcattttgctcacataataatcagataaattattaygttaaaaagaatatcttctatctctataaacctgagaaactcacattatccataaaatccatcgaataaattctatcataaagagcattattaataaacttgtttccccccgatttcttagtcctctttccaggaattcttcattatgaattccttgcctctrcttacaatctaggtgcaatctaggtactttctaaaatactatctttatacacacacatagacacatatacacatagactataaaactcgctcttcatagcaaaacttgtccatttcaatattttttttagtttacagtctgaacaagctctcagacttgagccattgcactttgtgcatattgacttctaaattgcctactgtttcagacaaggacttttacacaaaggaaatagagatttcaatttagtttctaatttccaactctctctctgttataaatttaattaaatcttcttctatacctatgagcttccaactaaagctgcaacttgtactggaaaatactcataaaaaaaataaagcacgccacaccaataattaagtaaccaggatttcatagatcacagaggaagaaatgagtacagtaatataggaacaataataataagagttagtacttactgactttactgggtgcccaggcacttttacatgaaataattaattcacaaaacaatcctataaggaaggtcactactattatctccattcaaaagaaaaagaaattgaggcacagtagcttttgaaagttattcaaccagtaattagtggaggcaatatttaaacccagtttagctctaaagccagcttgcttaaccaccatactacactgcctctgaaatttcatttattgaattaacatcatcaacaaatatgttactaaatacagccctatttatgagtgttaattataaaaatgcatgagcttagacctaagaattaatagatttcaaaaagatatgactgtatctgaattttaaaataaaaatgacattagaacattcctatttttgttgcagtttcaatgtaaagcagctcttaagtaaaaacaatttggaatagaatattgccccttaattcatgtcaccataattatttccttaaacaatgctaaaatgacttataatagtaatacatatgtgttagtatcaaataggataaattatacacaaagaaaataatatttaaacttttataaagcaaaaactctaagcataatttaatcatttgtcaactaatttatactgagcacttactgtgttcatgcagcatgtcagaggaccagcaagaagaaaacagccttacccttgagaatttctcagtcaaagggaagtagacatttcaaaattacaataaatgttaagggctataataaagatatgttgtagagctactgggaccaagaaaatacagcaatatttttgttgggtgtgggaaactccaggaagaccttcacagaggcaatgacattgcaaaatgtatgtgccttacccagtcagaggctggagttaacaagtakagaacattccagtcaaaaggaaacacatgaaagaacatggcttgtttggggaacaagcagggtctcgggttcacaggggcagaagatgaggctggcaagactatgtgacttgactactgtgctttaaaatgtcggctttatggaagtacctactggatgcatgtaagcaaggaagagatatggtctaatctattctagaaaatttactctgatttcagtgtgtctgataagtcacactgtggggaggaccaatagggaaggaattgcaatggcttccctgagagatggtaagggtctgagccagggcagcagtggtgtagaggagatttaatggtgagatggcttgccatagcttctctcaactccccctaaatgctgaaaaaagaatgtgtcttacagactgctgagtaatagtccaaattccttttaaagtaatatacccctggagtcatctgtagtcaggttacactagctttgtaagatgaaatagctgaaaatctacaagtccatatctcttttcactgttgggaaacaaattaagctataacaaataacaactaaaagtctagcattcagtagggagataaaattgctaatgaaaaatggaacacacagtttatgctaacaattgtataaacatccagtggtgcagaaaatacacacaattacttgattttaaatctacactgtaagtatttaacaaccttgttccttgttatattactttcagtgttcttaaatcaactttaagagcctctttatatctgtgcagcaggaatgcatgtaatatacaaggactgtaagtctttttatttcatttagtagggaatccatctcgctctgttgcccagactggagtacagtgatgtgatcatggctcactgcagcctcgacctcctaggctcaagccatcctcccacatcagcctccagagtagctgtgattacaggcatgtgccatcacacccagctaacttttttttttttttttggatagagagaggactcactatgttgcccaggctggtctcaaactcctgggctcaagatatccccctaccttaccctcccaaagtgccgggattataggcatgagccgctgtgcccagcctaaagtcaaatatttcattaaattttacaaatcttggagactttgaatattccaagtgaagtttaccaaacagggatacctttaatttttttttagcacagattatctcaccccccaaaaaattatctcacttttatctcattttttaaaaaatatgaattttttcttcagtccgagccaccatgccacagtaaaatgtctgtcttgtactagccaacacttcccccagaattactatcttttttttttgcaaatgtttaaacatttataagtttcattcttgtattgaatacaggtctttgaagggcaacattatttcaatatcctacataatgcttatttaattaagtagtgtgctactacacattttaaatattatttctgactaggcacggtggctcacccctgtaatctcagcactttgggaggccaaggcgggtagatcacctgaggtcaggagtttgagaccagcctggccaaccctgcgaaaccccatctctactaaaaatacaaaaaaaaaaaaaaaaaagctgggcatggtggtgggcacctgtaatcccagctamttgggagrcagaggcagaagaattgcttgaacccaggaggtggaggttgcagtgagccaagatcacaccactgcactccagctaggcgacagagtgagactcttgctcaaaaatagtaataataataatataaaacaaaaactatttcttataaaatcttcstatggtttgaatgcattctccaaacttcaggtgttgccactgtgatagtattaaaaggtgggkccttgaagaagtgagtaggtcatgaggactctttcctcatgaaggagattaaagcccttataaaacaggcttcctttaacaaatttacaagaaagaaacaaacaaccccatcaaaaagtggcaaaggatatgaacagacacttctcaaaaggagacatttatgcagccaacaaacatgaaaaaaagctcwacatcactgatcattagagaaatgcaaatcaaaactataatgaaaataccatctcatgccagtcagaatgcagattattaaaaagtcacgaaacaatagatgctgacaaggctgtggagaaayaggaacgcttttacactgttsgtgggaatgtaaattagttcaactattgtggaagacactgtggcgattcctcaaggatctagaacaagaaataccacgtgacccagcaatctgattactgggtatatacccaaaggaatataaatcattctactataaagacacatgcacatatatgtttactgcagcactatttacaatagtaaagacttgaaacaaacccaaatgcccatcaatgatagactggacaaagaaaatgtggcacatatacaccgtagaatactatgcagccataacaaaggatgagttcatgttctttgcagggacatggttgaagctagaaaccatcatcctcagcaaactaacacaggaacagaaaaccaaacaccgcatattctcactcataagtgggagctgaacaatgagaatacatggacacagggagggaaacatcacacaccggggcctgtcaggggaggggagcaaagggagggagagcatcaggacaaatacttaacgcacgagggggcatcaaacctagatgatgggttaatagctgcagcaaaccaccatggcacatgtgtacctatataacaaacctacatgttctgcacaygtatcccgggacttaaagtaaaataaaaataaaataaaaaagaggcttcctatagtattcacctagcttgcccttctaccttctatgtgaggactcagcaagaaggccctcaccagacctcaaatgctggtaccttgttcttggacctctccacctccagaactgtgaaaaaataaacttctgtgctttataaattatctggtctgtggtattctgttayagaagcacaaaatagactaagacaaacatcaatatttatttaaagtgtacraaatgttgtaaactctattggtatggtaaccttctccacaaatgtgttaaatatatttaagcacatctcagtcagctgattaattggtttttaattcactgatctcttggttctacccttttttatatttttattattatagagattaaaactacatttaatctagagacactaaattgtgcagtyatattacaattttatttaaggatgcagccatcattgtattgtaagaagtaagatatgtgcagcctttactgtctgcagctttttattatgggcaagggcaaggtcttgagcttggtccaagccagcagcaaygagagatcccagtttggggcttatgacagtgtgacttttctctgcctgttcttatcaccttgttctccactgtgccatctgccatatgcttatgcagagatccggagtcacaatttgcctttcttccttaggcttgctgaataaccttatcctctagtctccaccgataacctcatttctaccttccaaaaatgaaatcaattagtcaatatagcactttttgggaaaacccatcatatcttaagaatgtctcttattatattattttcaaatgctaatttgaaattatacctaatgttataaatatcacaagcaatgaagccactaatagttcaatcttactgggataaagatgggcagaggcatatattctccagacttttaatttagtagaattttatgtccctaattcaggaaagttcagtttggtgggccggcaaagagaatacacaggaatgtgcggctgtatatgagtgtgtgtacacatgtgtccgtatccctgaaaatgagaatctgcatgtgtgagaagtcacatagaggtgtattgtgctgtgtccgttcagaataatcaatgtctttccattggaactaatttatacagtgcttgttttcagtttttttgtgtgtgtttaagtacaaattcataaatagttcagaagcctgctagttttatgaacttctcaacctaacaggatttaccaagtgaatcaaagcagatgcaagcagcaggctttcaacacaaattttatctttgtcattaggtttccctctctgctctctcactcctaagggaagccctggtacagactaagataaactatatggatgatatggtttgtctgtgtcttcacccaaatctcatctcaaactgtatttcccataatccccacacgtcatgggagggacccagtgggaggtaattgaatcatgggggcggttacccccatgctgctgttctcatgatggtgagtgagttctcaggagatctgatggttttataaggggcttttccctctttgctcagcacttccccttcctatcatcatgtgaaggatgtgtttgcttccccttctgccacgattgaaatttactgaggcctcctcagccatgtggaactgtgagtcaattaaacctctttcctttataaattatccagccttgggcagttctttataggaccgtgagaaccgattaatacaagagaccactgctgttttcattactataggttaatttgacatagtcrtaatggggaattcgtgttttaaatttatttttaaattcttaagttaattaaaatatgttcaacatacttgttggcgttctttctggatacaaaaagattgtgtgtaaatactttatccttttcatcctcatcttagaattatagcacaatagctagcatgtaatagataataaatatttgttgaatgaataatgatttgaaaaaaaataccagtgggaaaacataaatgttgacaagtagttcaagactgttgggataaacttagctagagtgcaggtcataactacccatctttataaggaagctgaaaagggaagtatgaggacagggagaacaatgactttctctctcaagcttgacttaaaccaccaggaaagttcttaaagccaaagcctttctcagactctcaccaaaccataagagtcagaaaaatggtcgttttcaaaggagtagaaaattctgtacaaagtaaacaacagctgaagcaggaaaggaacatacattttctcacttagtggcacgcaggcaaaacagaacataggaccagcttggttattttctttgaatacaggaaatttctcaaacatgatatatagccatgttcaagtatgagyataattacagagttccctctgtaccctttaatcagcctataaactcaacagcagagtcttgtcagaataggcccaaactggaaaaaccacatgtttctctctctcagaaaagatactaagcttaggatgtgagcagcgcaccatgagagcacaaggtgttccttctctctcaaagtcagtcccagaactgaaaagaaaaaygttctcagttggcatcactgccctgtttttcatccaacaaagaatattcgctatgaattttctcaagcaaaaagtcactgaattcttttaacaggggcagactcaagcactttttattaagagtaacaaatcaatcatgaaatgaacctcatgaaatatgctttataggtaatgtgaacaaatgtacaatgtgacaaatgattcaagaagtataattatctacaaggcctgtttagaaggaaaaaaaaagctgtaccaaattgatgctttagctgcttttgcttatactttgctgtgtttataactacatttcatttaatcattaactgtatctttctgtcattaattccctttacatttttaatgactaaatgggattctggagtgattagcagataatctcacacttttttgtaaaaatgtgcatttagccataatagcaaagctccatttatggtacacaatttctttcaaataatatgcaaatatactgcaaatatttcaacacacacaaactagaagtacaaaaaaattaagatattaaaacaataaattatatttaaatgcatattacatttaaataagtttaataaaactttaaataaacttgtttgaaataacactttaccttaaatgaaactttacatttaaatgcatcattttataaatcattctccttcattgggaagttatttttttaattattctaaaaagttttaaaatctcatcaaacacatgctgtggatttaggattgggaagaaaaaaatgtgtagaatcaacatgctttaacattcaatgtaaaagtgttctcagtaatctcagctctcagtaatagaaaaaggaaagaatatcacccatgaaattacacctaattttagaggatacgtttcagtccaccttcgtatggaggcaccacttgtggtttgacacagcacagttccactgtgacgtttgtcacatttttctgagccctgccttcccacagagaaataggccatttcatgccgtaaccttccataaaatctttcagaagagctttttaataatttggaggttataacagagatggtgatctaaccaacctagacaaaagcctacggtcaaaattaaacctgattgaaattacaaggaaaagccctgggtgaaagcactccatttatggctggttaaaattcataatgtatttgttcccaaggttctcaagagagaagtcacaaatctgtttgtttctggccataggttttgcawccaaatttaaggctrctgactrataggtaatggtagtcaactaatcattgtatggctgcggagttttgtttgtttgtttttgtttatttttagagacaggatcttcaggatcttgctattttacacaggctgccctcaaactcctgggcacaagggatccttttacttctgccttccaagtagctgagactacaggcgcatgccactgcacccagctgtagagatttttttaaaaaccaacaaattmaataamrtataatcaagtattactttataaatatgttaggccatacccgcttccttctagaaaacgatttctagaataagagaaatgggccagtcmatactctcagataatataacaggagagttctgataggcatcaaaccaatttcattcctctcataaagaacccctctctgctctgccccgaaatcaaatcctttccatgccttttttcccagtcatgaggagttgagaattctcctagtcctagctcctcaccttccagccaaagttctggacagcatcatctacactacactactcatctcccaggaggccctcagcctactgctgtctgccttctcaggctgtcatgacagcaagcatgttcttataaatggcaaatgtcactaaacctaaggggcaactttcagccttaatcttccttgacctctaagcagcaacaaggctgataactccctctcttcccagagtttctggacagtgcactcccatgctttccagtagaatatacagaaaaagcccacaatctctgaagctaggatgcctggttttaaatcagctctaccatatactggttgktgacagtctctaagttacttaacctttctggggctcacatatttttcatctgtaaaatcagggatcacagtagcaccaacctctcaagaagattaaattgatctaatatatgtaaaaacacataacacagtgcctggcacatagtaagtgtcatatatgttttaacttttaccactattattattattattatcattatgctccttctctggtcacttcttctttgttggtatttgtcaaggtttgttcctagaatctctctttgccccattatcctcctatttagtgatgaggactsaccatawcctccagcccatgcctatttcttkaacaataaacatatgtatgcaactgcctgctggatatttcaaattcaacatgtccacagatgaattcaacttcttccttccaagcctgttcctcctcagtgttctctttctctaaaattgcaaccacctcccacacaggcatccaagccagaaagcaagaatcatgcctgactgtcattcccctcatcttccaaatgcaaacgagtcctgcagattctacctacctccttactgtttttgagaacatcccctcctcttctaactgtgtcagtctagtctaggtcaccactatgtctctcctggaccaccttgtaccttcactgtcagtcttatccttccctaaacattttccacatagcaaagagagcactcttcaaatgctcaaatctgcttgtgtctgtgactccacttaaaagtcttccatgtcataactaatatggcccacagagctcttcataatgtaatttgaccctgcatacttcttaagcctcatttattatccctctccctcttacacaactttcatctcttcaaatctctgtccccactggaccttcacatatgctgtttcctcagcctggaacttttttccacctcacaaacctccccacttcatctgactattcctatccaaacacgtttcctcarggagacttcctctgacacccacagtatattcagtaccctatgctcattaaaaaaacaacaaamaaaaaaactaactgcagtctcctgaaaatattgttttcttataatttattcaaatattgaaggttagcaygcaaataaataattggaaactgtgatacctactatgaaagaaaatgtctgtttccctcaccagactataatctcttgaggacaagaccttttctgaactcaatgcctagaataatagtctttcacatgtatgttwtatatatatttgtatgtaaatctgtagaagaagaggaatatgattaatgccaacaggaaaatacataatggaaaagaaggagaaagcatcattgcctatcagaacttacctgttatattatctgggagaattgactgtcaatacccatctccacacaccaaccctgcgcctctaatttcatctccatagcctgaacgaaatgaaaggtaatctrtcaaatagctgagataatccctgatacatgttttgaattggtcaagaaatattaacaatttgttgtacatgttacattgcagtagacatcaaactctattcaaactaaaagactgcaaaggttgtagaagctaaaggcaaatgccattatatgaaacaagtataagacattggtatacaaacaatatgtgaaaaayaattttttaaatttaaaatctgtctgtaatgattctgccttagagtcccaggtaataaaagataaccagataagtttgctaaatagaaatggcrgactaaaaatacggttttttaaatatttttgcttttcatcttcttgctcttcctctctcacccccttcttcttcttctcttactcctttctttctccctctttctccccatgccctgccataaataatatagtactgtattagttttttttttcacactgctataaagacatacctgaggctgggtaattgataaagaaaagaggtttaatggacttacagttccacatggctgggaggcctcaggaaacttacaatcatggcagaaggtgaaggggaaacaaggactttcacatggcggcaagagagagaagtgtaagcaggggaaatgccagatgcttataaaacaatcagattttgtgagaattcaytcactatcatgagaacagcatgggggaaaccgcctccatgagccaatcacctccctcccttgacatgtggggattacaggtccttccctccagacgtggagattacaattgagatgatacttgggtagggacacagagcccaactgtatcaactacattattcatataatgtcagagatgtccccctgactggagatttgtcaaggaaatcaaactagaatcaaaakattttttaatataaaaagaaaattataatttgtattaaaatcaaatagtaaatggataaacaaggaaatgtcttgggaaaacaactagaacatgaaattactctataaattaatgtcagataattgctaagggcagaatcaattttatggaggagggataacacaaaaatgttttaaattgytttaagttggtgatgtgggtattttgggtaagataaaccattataactaactccagaacttggtcttagctatttgagacctgatcttaagcagaattacatgttttaacttaagcctgacaaccccactttttcttgtaagtgatccttgagaacttatttggagcttctatcaagtaattggggctacccacagactaccgaacagaggacagtcttatccaggaattccttccacttttatcaagtaacagygttggaagggacaaacatggaatcatcaagagagggagaatacaagcctaggacatcatatcaaacaaggtctttgctcaatgacatgccagggaggtcttccctcatccctctatctgaaactgaaaccctccaccacactcyctattccatatttctgctcaacattctcctcgaccatacctaccatttaacataaaaaatatttcatttattcatccagtttgttttctgtctccttccaccaaaatataagctccacgacatcaggaatgactccttttttttttttttttttttttttgagacggagtcttgcactgtcacccaggctggagtgcagtggtgcgatctcagctcgctgcaagctctgcctcccaggttcacaccattctcctgcctcagcctcccaagtagmtgggactacaggcgcccgccaccgcgcctgctaattttttgtatttttagtagtgacggggtttcaccatgttagccaggatgatctcaatctcctgacctcgtgatccacctgcctcagcctcccaaagtgctgggattacaggcatgagccaccacgcctggccaggaatgattttttaatcatattcactactgtattcccacagctagaacaggacctrgcacatagtagatactcaataaatatttgttgaatgaataaatacaataaaatctattcttggaatcartatggtaactgacagtgcatttcagattacctttacctctacatggttcagtttaatgtagctagaagtcttgccatagattaaattttaaaatgattttctgcactaatgataagaggttggtggtcaccttgatcaataaggaagtgctaatcacatatgagtcaattcagattaactccccagaaattactctatatccacatttatgtgagtggatgtccagaagaaagtatatagtaagtctctttgtttggagaatcgtaaaggagaaactgcttcacaccaaaaacagaatggggaaatagaaagttgtgagaattatgggtcctcaaaatggtagacatctgcacccaccatgatcagataatccagagcaagcttgcaacctaggaggagggaccatggcaaatagtccttgtataagtgcctggatcaagagctggagtagaggacacaattaatctgccattgccattccacatgcagtaaagaaaatgttgcttgctaattccctggagaacccaagaacagatgtgctgaggccaactgaatatcacccagaattccctacctagcactcaaggctccattgatttgcccagatagatgtcaaatatccagtgctatcagactggycattttttccttatcagatatgctcttacaayatacatttgtcatttttcagctaattgctcaaattccaatttcctccaatcctatccatctactttccttaagatataatggcaagacatcttcctctcggccttccttgactaaactaatctcagatttcctgtggaaattataaaaataatatcttagatttgcagagaagttgagaatctacagagcacattcacagtagtgtscccccacttyccctcccacacayacaccttctttctgtgtcctaaccgaaaatctcagactgccttgaccatttcgtgacccggccagacgcaggtttttcccagcaggcttgaacccaaactggggctttgaacattcctaagtactaataaaggcatctaggtcgttgtccaaaacactaaaaswaactggctctagccctgagctgaattcctgaaaccctcatatgaactccctacccttacccgcttctgcagacaaacctacgtagaacgccccttttgtcttgtgtatctcaaggactgctgcagccctctgtaagttcccctaataagtgttttggacagatcaccctggtatttgggcttctttctttggaatctcaactggctccatctcaggacagtttggggcatgctcttgtggggattcccatgctctgggggtgagtccagcttcagattctgcattcacatactgacttagataaatacacagcagtgtactattttatagacacatgtttttcttgtacgtgcaagccctatagcctttccacggcttgctcttcccagtcctagtagggttcacccaggagtacacatgttaatgaagaaataaaattagtttattatactgaaaagtactcccagggcatttgtcatgataacaactgagtttattttgttatttcagtgatgaaagtgcttggtaatgatccaaagcaaaccaatctttttcaaagtttttagtgtttagtgttaacaaaatttagtgcctagtgttgacaaaattccctacctgacacagtattaaaacgttttacattcaattctctcaaagactcaggtatgtgctacatacccattttgtagattaaaaaaaaaacccaagtcttaaaaatgctaactaatttgcccatataagcagattgagaatctgaatctgctctgtttgacttgaaagcagaagcccttaggaatcacactctgcagtcaggcactattctattacacacagtgtatcggcagggctgcagtacaacaagaggtcatcccaaatatcaccagggacattcagggtctaaagcaaatrtgtacaacttcctggggcctcaggcagagtcatgcagtgactaagggaggmatgcagtgactaagggaagaagaggctgaggctaaataagactggaaatattcaagtaaaccatgctcccacctcatcctcaagataaaacgagcttttcttggggaaaaaggactgaaggcttcaytttcacacacaccactgaggtttcaggtgtttaagaggttgccttaccttcttttcttctttagtgctacctactaatcttcatttgaaccagatttatctgaccgtattaatagattcagggtttgaaaaaggtcaggacacagtgagagcctcagtcattagcctaacagtctaattttcttttccaaatatattcaactatttyctttattgttgtagagcataatggataaatgcacagattttgtttcaccattctctcactgtaggaccttggaaatgttgcttaacytctctgtgcctcaatttactcatctgtaaagtagggataacaatggcacctatctctttggagatattgtgaggaataaatgagatagtgtatataacatacttragatattgctgacccaaaataagttctccataagtatttgctattataattattatataagtcatgtgtcataaggattataaaaaatgatagctaatattcaatgagcaattatgctaagtgcttcccatttatttctcatataaaccctggaaggtagatattcttactgtaccaatttacatgaaacagaggctcagaaatgtgaatccacaaattacctaggcaacaaatgatagagttagaactaaagcctaccaatctactccagaatcaagctcttaactactatattatttcaagtaggtaatgatacttgctaaaagatactaaagttttgctctgtgccaggcatagttctaataactttacaactctttcctcaattaattatcacagccaccttatgggatggatgcttttattgttttcaatatacaaaggagaaaactgagggaccagcattagataacttggccaagatcacatattgtattagttcgttttcactctgctataaagaactaccaaagaccagataatttatgaagaaaagaggtttaattgactcacagttcatcaggctgcacagaagcatggctgggaggcctcaggaaacttccagtcayggcagaaggtgaaggggaagcaagttcaccttaccacggcaacgcaggagagagagggcaaggagggaagtgctacacttttaaaccatcagatctcatgggaactcactcattatcataagaacaggatgcgggaaatcyacccccatgatctaatcatctcccaccatgtccctcccctgacacttggggattacaattcatcatgagatttgggtggggacacagagccaaaccatatcacacatctagtatatggttaaggtaagtgtaccccatactaaaaagtaaacaaagcagaggtgctaaattttcatctctgtgacctaataccagatagaggataacaattttcaaaaaggaaactcccttctgctatgttcatctaaacagtttctaagccagtgtgactaagagaaagactcaatactagaatcataaaagaactgattaaatgctaatatattctgttttgccttactactcaatcattttccacctctactagcaggcattttcaatagtcatttttaatgtcctatacaatttgaatagaatataattcwctattagcaaatatggatcaatttttcacatgaagcaagaccattgatttcatttggttcatgacccaaggaagttatggacaacacagggagagatggtggctgagtattcattctatgtaactatgacacaaaggagaatctgccaatgatatacttagccaaaacccgcaggaatttacagtcatgacttaacaatactaatggataacaattgataaggtgtgaaacaggatcacacactagcccaatatactcttgaagtctttgtgcaaattagaaagacgagctttggtttgctgagcataacacaaacttggctgtagcttctgcactctagaccaagggcttggtgtatgttccaaacagatctcaatgaatctgagacaatatgggaaggtatttttagaagtcttaagagacatgatcaatagcaaaaacagaaacatactgatatagatcttgagaaaagaataaatacatgagtccaaaaaggaaaatggcaagacaattttctttacaggacaattgtgtgggaggacggcaatgtgtcataggaaataatacttgtcaatggttaggacaaactttttagatcccttatatttatatcagaattaagtacttgacttgctggaggaaaagcacaagaggaatatatgaaaaagcaatgaataaaatttaagatttttgtggatattttagaatgttactctaggtaataaaaaggtcatgatcaattatgttatcacaaattaactactagaagacaaataattaattaacaagaaatggtaaaggaccccgattaggaaaagagaagacatgatgacaatggtaataaaaattgaccaaaaaagaaaaaaaaaaaaaacaccggcagctactgagcacctaatgctatgagctttaccttcattaccttcacaataaccttatgggaaagcaccattattagtaccattttacagatgaggaaactgaagcgtaagaggttaygtgacytaaccaggatctcatgtaaaataatagaacttggatttacacccrggcagtttaactctggagtttacctacttgaccaacagactatacagccatgggttaaactgaagaaaacagccaaaattgacaagawcactgatgcaggtaactagacacatcaaatgttgtcccatctccatttgcgtagggaaaagtcagaataatgatgtccctgatagcgatggaatacgtgaccagaatagagtgataaaaataatgagatacaatgaaattcaaatactgttaaaatgacttctctactaagcaggaaaatagtttacaataagraagacttagaataaacaaaatggaatgaacttccatgcctggcttcatcttgcctttttggaattgactgagaacaagtttgctgtgtaggcgtttcgtggtaatcactttactattattaacaatgacaatagttccaggcagtatttcatatttacatagcagccttcaacataggagcaaaagaacctggcaaacattctcatttttattattgatggcttagattaataaagtgtcttcctgtcagagctcattaatccttacacagactcctgtgacacaaaaaggcaagcaatccatttctacattttacatatggagaaaccaaagctaaaggacctgtgcataattgcttagcaagactgtagctgagcctagaatgaaatcataaagaacccagtgttttcctgcccttgagtgaaactctctcatttacagcttcttactccaaattatctgagacattggggccttctttaacaatgagaccctcctactcagatttttactgcctcttgttcaagctggattccctctctctccttccttttaactgctcatcctgcctctcttacctctcttcttcaaaccaacattactgccagaatcattttcttaaaccagtttagaaaaaaaggagaggttcttcatcatctatagaaacagaccccaaattccttcacagatcattcagggcctccctcagtctggccccaatctattttcctagccatgtctctgatgccatgtcccctatgcataagccacgcaagcctaaacttctgaactccaaacccactctgctccttgatcattctgttccctcttccagaaattacctttccaactccagcactatcaaaatatgttcgcatttccaccccagtgctgtcttcctcatgaagacctcctgacctaccatctgtaaaggactgcttcctccagctcctccatgtttagtcttatttgtaacactcaccacattctacctaggactacagggacttatgaaagtacatccctcttgttagaacgttctgtcactgagattcccagagtcaggttctacaccagattttgtgacaggtaatgggtgaaaatgagaaacatccctgcttttgtgaggcttatagtctggcagccttcctcatttatggtacctcatctaaatagcaaaacactattttctcgattttttcaagggtgttacataatagtgccaygctagatgcataaaagagacatttattcattacatacaacagatamtttttaggagtggttctcaaagtatagtacacagacccctgagtgtccccaagaccttttcatgtggcccccaaattagtcaaaactaattccaaataatatgaagacatggttcaacattgtcactctcgtactctcacaggtatatggcagtcttccaaaggtgacttgatgtatagtataacaaaaaattgaaacaataggtagataggagaattcagctgccttctgttaaagcagtcattaaccagattggcaaaagtgtaaaacaatgccactttgtcactaaattatttttatttcttaaaagtagttttcataaaaagataacwatttatgttaacatgtaatgggtttacaatcrttgatttttaaataaattacataaatatttacaattttatattttaatttataaaatggtaaataccagtggctacaacaaaaattctttaggtttctcattacctttcaagaatataaagggatcatgagactaaaacrtttgagarttactgcctgagggcagtgggctcatgtctctctgcagaacctcatttgagaatgcctgggtagaagctgagtttagagacagggtcttgctctgtcacccaggctggagtgcttatcacagtcactgcagcctcaacctccagggctccaggaattctaycccctcagcttcccgagtagctgggactataggcacatgtcaccacactctgctaattttttcgtagagtcagtgtcttgctatattgcccaggctggcctcaaactcctgggctcaagcgatcctgcctcagcctcccaaagagctgggattacaagtgtgagccactatgcctgctctcaacttctatcaaagaaactatcctactgtgtgggatttattcacaagattttcttctttctctccccacctccaaagccccctactttaatagtgagctgcttagaaacaaagtgaaatttatctttgtttctgcagcacctggtacagagtaaacagtcagtaaatattcgtgggagggagggagggagggaagaagtgagggagtgagggagggaggaaggaagggaagcagggaatatgaggggagggaggaaggaactgtgtgatatttaatcttccaagactctaccacagtaatctgcccattgaaaatgtctgttaacttcatgtaaatgtgtttatgttgatatcatatctaaagtgaccaaggcaccaatagtttcacctgatatgttagaaaatcccagtagagtttagaaatcattatttctaaaggcaaattttaaaagatttctcttataagtaaattaataaacaaatatttgtgcacactagtctttcaatagcaaaggataattttgggataaagaatgatgcaaacctggaaaattgatatagtcagtttggctggctatgcataaactatcttccttatgtttagcacatctttaataattagaagtgacttcctatagctaaaatatcttatttattgattcagagtaaataagaatgggcagaattaagctgaagacaacaaaayggggaaagttaaagcaaaaytgtgcattagcaagtccctctctaatagccttctgagccccctcttcccctcgtagctgctttgcatcctcatggagtccttcactagccaaggcttccctcaccaaggtaccccacttggatgagaccgcttaggtatcatctcattctttaattcaawctgtgtgcaacttaatccacataatttttacaattaaagaaatttagacaccatctattacaattctctcatatacagttgaagctcagctttgtcttatcttgaaattattctttgctgttgaagaactggtgtgcacaaatatttgttcattgattacttatgagagaaatcttttaaaattcacctttagaaatcaggatttctaaactgtactgagattttccaatatactcggtgaaactattggtgtcttagtcactttagaaattaagacttgcccaagggaatattaattcatgacatagctgggataaaaatctagcttcaagggctcttccttttccagaaactatatgaataaatcttctaaactcgaacaaacactctgctctagaccattcttgattccctctccatataaaaatcttgaacaaaacaccccgctctagacaattcttgattccctctccatrtaaaaacttttcctatatattcctgcagtgtcctgctattttaatgcaccatatttattcaaatgtggttttagtacctatgatccaaaatccattacgaccaattcacaccttaattcaagttagtttatcaggttagcaagccaatcaatttgcctcataacatttctgtttgaatagcaatggttgaagtcttcaactaaaagaacaagtggaaattttatacatgatatcagattcagaagcagagatagatgaaaacagaatgtgttttggttccttaaattataacacagagtcagacatctatacaaaggaccaaaactacaataagtgcaatgaatgagagcttattgcctgtgatgcttcactttgttaacctgaaccctggttggcaacaggatagtaggatagtcaaacaaacatatgacatgatataaaggtgtcacaagctatcttcactggattgattccaggacaaccccggaggataccaaaatccaaggatgttcaaacccgttatataaaatggtagtatctgcatataatttacacacatcctcccatatactttgtcaactctgcattacytatggtacctaatacaaggtaaatgctatgtaaatagttattatactgtattgtttataacaagagaaaaatgtctgtgtgtgttcagtacagacataacmatcataggcctaactacattttcaaaccatggttggttaaatctgcggatgtgaaactgcagacacaaagggctaactatattagtctgaaactcacaaaagatgaaatayggtcattccttggtatatccgggacctcaggtctctaaccaaatccacacatactcaagtccaacaatcagccttataggaaaagtcagcsctccgtatctggaggtttcacatcccaggaatactgtatttttaacccaagtttgtttggaaaaaaaaaaaaaaaaaaacacatstaagtggacccacacagtttaaacayagctgtatagcttaaattgtttcctacccactttttcacgtagtttttgctaaatatattttattcaatctttttggcagggaatgagtacaatattatatatgtactcatgtgtgtgcacacacacatatgtcttaatataaaagagtatctttattaagatttatatatatcttaatagactaaactccaaagtagaattgcattcattcttaagatttataagtgactttctgaaagcagtactatcaagattgtccagtcaaatttgaaagagcttaaaagtcagtctcaggatttaaagcactaacaaaccacctgggccctccaaaagtacaaatagaaagaaaactttaaatttatggtatctacaatgcaaataataaattatcacataaaatgaatgctgttaaactatacactaaatttttcaagtcttaacctgaatagctttgttatgttaaccaatttttcattaaaatctcatactttgattttaatactagttcctctgatactggttatcaaaacacagagaattctttatgaagaacctaaaatttttgcagatgcttactcagtcttcaaataaactccaggaaaatcccaatttctaagagaaagcattgaatttgtgctcctgatctggcatcaaattacttgggaactctcaaacagtgacagccccatcttcctaagacacatagctacatgttctaccaatcagtggaggaaaaaagtttgtaaaaattttatacaatactagagtgtcttagtccattcaggctgctataacaaaatgccataaacttggcagcttataaacaacagaaatttatttctcagttctggaggctggtaagtccaagatacaaatagatccggtgtctgttgaggtttcgctttctgggtcatagacagtgcattcttgctgtatccttacatggtggaaaatactagctagctctctggggtctctttcataaggacactaatcccaatcacctctgttttcatgacctaatcacctctcaaaggccccatctcctaataccatctccttggggttaggacttcaacataagaatttggagggaacacaaaattcagaacatagtctggggctacttatatcggttttaccaggttaaatactcctaaagatttaatttcccatcttggtaactgctgcagccattgagaagcaagacagaacagcaccacagaattaaacatttctgaatattctcttattcatctcatttgtaaggtatttgattccacaaatctgttatgctaatttctatttctcttcactttgattgttactgttactattccttggaattcttatccatatacttacctggaattcaaaccatatcaatattttaaggctctatttrggtccaatattcatctttaacactacaaagaakacagcacagtaataagcatatgctccagagtcagaatcatgcaccactagctgcatgaccggtggcacattactaaatcatctgtgccttgtcttcaccttttataaaataggaatgttcagtagtattgctgtcaggctcaagtgaactaggacatgcaaagcactatgaacagtgcttggcatgaagtaggcactctataaatgttagccactattgtagttctttattataacccccattcttcctgtacttctctgaataactatagattcataagtaatagggaccttagatcctacagtcatttagttcaatctcccacacaaagtagtatcatctctaaaaagctcttcatacttggtcaaccatgaagatggttaaatactttcagtgatgaaaactttactacttttcaaaaagcacaggctcaaacagttcttataataaaaaaaaaatttatgtgcagtacctactatctactctttggtctcttagttctgccttcagtacaacttacaaacaatcctgcatcctctagcctctttcatatgaaagccgttaaatattgaaggcagttgcttggtaagttgcactctctttcactctctagcgctgccaccctccacctcgatctttcctcttcatttctcttctccgggcaaaacactataatttttcttgactgtccaccacaagatatgttttctatatcttcaccatcctcaacaaaatcttcaggactcatttcattttatgaaagtcattcctaatagagggcactaaaagctacacataatattcccaacaggttctgaatagtaaaaatgacagaacaacagtttgtttaggaaagtaaggcaaattttggaaaaatttacttaataacaatcatcaaaaaacaatgctgttaaatgagcaattaagttaaatttttcttctgagagattggcaaacaacataggctattacctaacctatttaaataagattatggactctctgccaggctgccttccacattgtatccagagacagaatttgtgatgcctttgtgtaaactgcttttgtctctatggaagtctctttagctatgtgtttttttcttcatgtgtctgtctttgtcctgcttctgcttctttctgtatatcaatctctttctcattcttctttcttttgtcaatcattcaataaatatttatgcagtgcctatcaagtgtcaggcgctgtatgaggtataagaaattcaaagatgagtcttgctcaaaataccccctggctaaggtgggaggcaaagcagacacaaacagataataaacagataataagatactatggtaatacagtgaggtagataatgcacaggttactgtgagaacaccaagaatgattgaatgctggatgaaagggatctgagaggtttccaggaggagatagaatcttatgaaatctaaagtgattctaaacagtactctcaaactttaacatgtatttaaatcccctaggaatcttgtgaaaatgcagattcttaatcagtgtgtctgtctgagtagtaggacctcagatgctgcatttctatcaggctccaggagatgtccatgctgctagcccccagaccatcatagagtcacaaacgtcttaaaggatggaaaggagtaagtaagggctgtgcagagtgaatacaggcagtataaacagcatgaagtaaatcacagaggtaggaaacacctgagtagatgtgatgagactgaagcacactggtgtttccaggcaatttaaaaggtcaagagtatctaaaatggggatggatgggagtatgacatatcattttttgttttgtgtgtgtgcgagacagtcttgctctgtcgcccaggttggagtacagtggtgcaatctcgattcaatgcaacctctgcctcccaggttcaagcgattctcctgcctcagcctcctgagtagctaggattacaggtgcccaccaccatgtccagataattttttttttttttgagayggagtctcactctgtcgcccaggctggagtgcagtggcacgatcgcggctcactgcaacctctgcctcccaggttcaagtgattctcctgcctcagcctctcaagtagctgggactacaggaacccgccaccatgcccagctaattttttctatttttagtagagatggggtttcaccgtgttagccaggatggtcttgatctcctgacctcgtgatccgcccacctcggcctcccaaagtgctgggattacaggcgtgagccaccacgtctggccaatttttgtatttttagtagagacagggtttcaccatgttggccaggctggtctcaaactcctgacctcagctgatccaccagccttgacctcccaaagtgctgggattacaaaggcttgagccacccacctggccagaagtatggcatgtcttaaggaaaagggaagttattacatggatgacagagtatatygaaaattctttaagtagggcaattatacggtaacaactgcaaatcaaataacaagtctggtggcttcactggtagaataatggacaagaagatagtatgctaggctacttaaataaacctgccaaagatgatgatgaggacctaaattatggcagtaacaacagatttagatgaaaaaggacttgtctgagaaatggttaggaaatagaataggttgattgtgtcatcactcgttaatttaaaaatcaggtggttgttatttctttgcatttttttgcaggcatcgtatctattcttaacctgacacttagaaacatgtgatcttggacaagccacttaccctccttagcagttgcttccatatctttaaaaaaaagtgaagatttgacccaaatgaacagtgtcattgctttaaaccctaaaatttatgagcctgtgaactaaattcatctcattgaattgtagattcacaaaatgtactcttagtacctacaatacctggactttataaaatgaattattagtacctaccacaatatctgtattttatatatatatatatacacacacacacacgcaatatatatatgacaatgtattgtacaatatatgtacaaaggatgacaatatattacaacattagtcatacaatgtgtgtgtgtatatatatatacagtgtgtatacacaaacacacacacacacacacacacacacacacacattttatgacaaatattgaatctacctagccgacaggtattaaaacttgagactttaaaaatccttcctcttgtttgcccaccacattcattaccaagtccagttgtttgttacatatgccctactagcaattctttggtttatgcacttatttttttaactggattcctgcaatagcaccttagatgttctccctggttccaaccaaatccccttccaaacaccgagaaactgaagaattctggagtcagaaagacttgggcttgaatgctaagtccactgttccttaactatgtgattgtcagcaactgatttaacctctctaaaccttggtttccttacctctaaattacagggatactaggaagatgaactatttgtaaagtacttactatagtgcctattacacagtgagaactcaataagtgttagttatcattttgaaagacacatctcaaaaagatttgagcaggtacttcacaaaagacgaaaatcaaattaccaaaaaacaaaaaatggaaagatgctcttcttcattagtaatcagcaaaatgcaaattaatacttttatgagtacaattatgtatctacctgattagcaaaatttaagaacttgtaaatcaagtgttggtgagaatgcagagtttctcatatactgctgctgggaatgtaaattgatgcaactgattggggaaaatattttggaattatttagtaaaattaaaggcgcacayacccmaaaactcagcagttccttcccttgctatttatcctagaaaacggtaaatatcagaaactatgagaactaatatatataaacataaaaatgatattatatttatatttatactagcattaagtaaaatagatttaatccaaatgttcaacaacaatagactagataagtaaatattggcatattgatacaatagaatactatacaacaatttacatgaataaactacatgcatgaacatgaaagaatctcacaatgttagcagaataatcaggtgattgagagtatacatgctgtaactccaaatacatggagctgaagcataggcagaactaagattcatagcctagagatgcacagatagatggaaaacctacaaagaaaagcaaggtaatgtgcatgacaaaaggtgggatagtagctagcggttacctatggtggggaaggaaaagtatgtgatctgaaagggacacataggggtttgctgggagtctattacatcatgtttgatttacttgatttgttttatgttgtttgatttgtttacatgatgtttgatttataattattctttaaccagtatttgttttatacactcttctatgcgtatggtatatttcacaattaaaaaataaactgattatgtcaatctcctatttaaaatctttcaaaagctcttcactttgaaacaaaatccaaactccttaattttgtctaagagatccttcatggcacatgtcttgtatccctcttcaactttatctctgccactaccatttctgcttcagcatagtaaatgatacctagtattcccacacaatcatgctctctcaggcttctgggtctgttaaaaaatgttcccactgtgcactgcatcctcccttcctctggctatcctttcactgtgcttaatagtccaccaaaagatcccttcctctgggaagtcttccttgactaatctctaccacatccgtggtagagtctcctctgatgcacttcctttggcactctagacctacccatgtaatagcactttgtaagtgccacactctttagaacacaactacctccattaataagcacattttattgtaagtaccccactctttagactgagggctcctttaaagcaaggactgtcttttatctgccccaaaagctaaacattctacctacatcacagattctcaataagagtttgattaatgaattaatattcagaatggagagaacatggtatgctttctacatcactgggagtaacacataatatattagtttcaaccatataaaattgcccttattttaggtcaaaaatagtttgttattggcaattgcataaaattatttataacgctcattgaatacatgttaattaagcacagtatagtgatgctattagatctgctttctcaatataatggtagatggattgttttttatgaattgttttataaattcactatatgaaataactctaggattaatttcatcagtcttccgcagtcataggctgtgcattaattcacagggcagcctacctatctacagttatataagccactaggcaaatgaaagaaagatattgatcactagctcaaaatagcttcttttggagtcttataagcaccacagtcatactctagttctcaaagatgttatttgacagattataactcgttcatctctgctggaatctattgattattgactttggtgactatgaagcatcaagtatttgatttaaaaagacattctacctgtgtgtgctgatatttttataaagtaataagttttaaagtcattccaactaggcagagcaactgtatctatttttaacattgctttgttaagcaaaaggatttgtaggctaaaatgcccatgaattgagttttataaaactgtgatttctcttctcttatttcagaagagctaaatkgtgtgtgtgtgtgtgtgtgttcctgaaagaaaaccataatttagctcagaaccaatttttctactaaaggagatgaatctgtaaaatatagtacaatgttgcaaataataaaagtcacttaaaaataatggtacccaactgttactctgccacatgaaaatgttaattgcaggtatcatccatggtggtagtatcatggtgttatatgctgcacccatgcacctcaagacttttcactactgtatgtggtattagtagtaccacaccaactattaaacttctgttctattgattttcacttctgtagtcgaaattatttggagcagtatttctccagctccatgtacaaaaccatatgcaatatttaaattggctatatagatcctagttttcatgctaaggaatatttttaaattggcaactcaccacagcttgtatggtttctcatctataggaaacgggtctaattcaacagtttcttgcataagttgccatagtgaagatctgagatgggcctgctgttggtgtttctcacactagcctgaaagcaaagccaaaaaacagatgagtttgattttaagatttaaatttgtatttagaaaaccaaaaagctgacatcaaagacagttggttactgggtgggtgagtgtaggcagaggaaagaaaatatctcaaggtaattatctctattcatcatttattgcaagcacaagaactttgatgttataataccagaacaactattttaatatctgagcataaactaaattagtaattcttatttcagttaatataattagtcttgtgatatgaatttggttttctaatacaaggcaccccactcatcctcaactgggacagctccactattacatagatttacatattctgcttttcatacaagatttcattggaacaatggttacataggtaccaataaaggaggagaattttgaaaacctctgaagtatgcaaaagaaagtaaacctaagctggagctcatctgaagagacctgtatttatgttcttctagttactaacctactttttcaccattatagcctgttacttcccaacattatattagacaagattcttcagaatatgtggcagtctgcaacattctacccaatgtcaaaccataagtttttatttctagtttggaaaatatggtcatcatacccaaaataggcctcctctttaccccaagtaagagtttctttcctgcccaggtgctcacaattactcctaggactaccaccctctcactatcccaccacctcaccccaacaccccagtgtagccccattgtcacctaccatcacttcagaggaggtaaattcctttctcctctgaatttctattgcactcattatcaaaacactaatatgggcccttgattttataccatctttattgttatttagcctcatcttcccaaatgagtataggttccaaatggcagaaactgtgttacagtttcccaattttttctaccatagcacttagcagagaactcagtacatgagagatattcattcaatgaatatttggtgtgtccctattgtgtgccaaacagaaaawgtcagtccctgatggggattaaaccttagtagagaatacaggtaatagaagaataggcaattactatattatataaatgctgtgctggagcttccgcctacaaacactgaataaacattgccaaataaacagacctaacctaagagctttccttcactatcaatgctttcagatcctatttccaatgtataagaagaggacaattgctttaagcaatccattttcagaaagcacatagggcacccaggcaggttaacacagacaaacaggagtcagttttatttctatgaagacaagtcactaagatgaatttctagaactttaaagtcactgctgtttttgtttttgtttttcttcacacacacacacacacacacacacacacgtgtacaaacacaaggtagtgaaaatcctgtttattactgtgcaggtcactgcaaatgcccaattgccttatagggaagctttgccttaaacctgcacaccatgcagggttttagagcagctgtggttagggatgcttctcaggagactgtattcatttctttttccattgaaaacttcaatttccattcctactagcattatttccataagcctcaaggattttacatctcatagtcaccagagataagaactgtaagaaaagccatagtggcttgatatggatccaaaacatcaaataaactagaaaatcctttaccagaaatagtatatgtgtgaggtctactttttaaacctaaaatgtttatatttagtgattttcaatattacctgatgtctcctcttaagagtttctaccaagattcacaataagaaatacagcttctccctattaaatacagaaaacaaaagatatgcaaaacacaggttttgtattttccccttctttgccttgatcggttcatgaggataaaatgtactcaaactgaaaaatcttgagtcaaaaccttacaacttcactctgcaaacacgtacaggtttctgaaaagatgggctccaattctaagttacattttttaaacaatcaatatgcagcatgatctttttatctgaatcagcagtacagtgtctcatctcaggcttatgtaatgcaataaatatatccaatatgccaaagaagcaaatggattctgttcttctttaccagtaagcatctcccctactagtctataggcccaactttttccacaagtccttggtcctcagaagaaggtgcaataatagatgcatgtgtggtaggaggaaggcactcagcagtcctgcagcaaatagagcattgtactccattcttgtcactactggacacttccgtgcctctttctgcatgattgttgcaatgtccaaccaaaagcttaaaagagactgtaagaggaaatagaaagggcaatgaagaaagaatttaagacaacaatgtgtttgcttctcattctaattgaaggaagtctctcttgctttgagtcctttattctgataagcaaccaagcaatcattcgatttgaacacaccaattccactgaaagtcctttggctacaaatgtgacctgaggccagaactagagcatgaagggagaacatctatccccatatttaacaaacaagtaaatacccaatttgtctttagcttttagtatcagtataaaaagaatttataactaggcttacatccaaagaaacagattcatttacatgaaaccacaataaaaccttaaaaatatatttatgcctttaaacatgggaggtttttctagattacttaggttgggcaaatttgttttgcttatgatgttcctgtaggatatcctaacaaggaaaatcttattaattttcctataaatttaaaatatctacattttatagcattgacaataaattatcagttcattctaaccttagaatatatagaccatgtactatgaaaccattaaatactaatagctgcagacataccagacaatgacagcaaaaacacactcagcccctctgggatctgttcataaacatccccttccagcatggcaaacacactcctctcaacagcagatgctgttctggggctagcaggcaggaagctggaggcagctgattttcccactctacatataatttcttactgcctcactatccagaatcgttttactgaaactgtgaggattttttaagaacaggagcccctcaaattaaagacactttgcaacagcagaggaatgacaggcaaatgaggaagcatgaagactctctaatatttaaggtcayaccacctttgtcatctgattttctagtcccattgtaggggagagaaaacccagtttgctccacataagaaaataagctaatccaatactttatgtcaattttaagagtgtgatcaaggtagagaaggaaatacataccagaggcagccaaaccgctacatccaaagcatccagcccctaaaatctaatggttctgaagtggagtcagaagcttgtgatatacttatatatttatttgttatatatttgtaacatatatgctcacctaaagtagaaaattcacagaagcttctctgagagaaatggtccttactgcaactattttaaatatgttgataagcattctgtgttatcttccagggtccgacaactagccgatgagggatagaaggagatattggatgttgtgctggcaatgcctggtgcacttacactcgttttccttccacctgaactgtagtctatcccatatgacttagcctgcttccttgcagtttgttcataaaagttatcatcaacatggccagaagcaggcagggctgctgtacagacactgtcaggctctgcaccaaaggcagcccatgtaaacaaccttgtgattgcttcagagcctactgctgtggcataagccattctttttctgtggctaaattgcagtaccctgggaagttatctgtttaagggggtaaaagcagagactaggtctctagatttaaatgttkggggagggtgagaaaaatatatggatagatagttttcttgtaatatctatagcctgatttacttacagattttccagtaaattacatttattttgttgaaggcacaaatacatagattctaacaaatatactgccatacttatttctgatttttttttcaaaagagctctgacatttgcaggggacacagtatcccagcacagaatacctgggaatcttgccatgaaaaaaagaaagctgactgctgtgactaggagatcactttcttaaagggaccccttacctatttgactgcagtgccaatgtttcctcttatctctaacctgacccctgttctgtgttcctctccccggctcagatttagcctagagttgctctgcaagagtaacgccaatagttttatatctaatatatatataaatactgttccttagtaaaatacatcttaaaatatttaaattatacttctcacaaaagtaaacataaatacatactaaaagacattatttttaatgttttatggaacccatcacatttttcagatatggaactaaggtcagcacttctaacaagcacagctgtttggtgttttttttttcctctctctctctctctctctctctctststgtgtgtgtgtgtgtgtgtgtgtgtgtgtgtgtgtgtgtttctctctctctcccttcccttctgtagccctgcattggtctaaaaacccctggtcacaataagaatgctccctccctccctctgctacccctcactccaaatggaaaggtttcaacacgcccaagtctggaaagagatgttctgcacagagggaaaaactggtagcttcttgcttcaaagctagttcacttgattaacctgctttccaccccacctctctcgtctcttccatactccctctcccgccccaccaggagcaatcaatagacatcaccccaccctccaaaaacaggttagaacccagaacgagcaaagagccacctaccattccgtgcctgagaactacgatcctgatccggcagtgtttgccccagaaatcctccctacttgtttttcattaaccacattccagactaacatggaagagattctttggagatatggagattgtttaaaattaacgatggacaggtgatttccaagaaaacccaatcttaaactcactcaagcccctaggaattgaggggtgaggacaaaaaaggaaatttgtaaaaatgaaaaaagaaaagaaaaaggtaagcatatagcaagcaccacccacccccataaaaataaaaagtgaaggggaggttaaagaaaatagaagaagagtggcttgctgaatcaccctctttcactgcctggaaaccattgtgcagcgtgatgctgcctgtaccattgtggaacctaccagaggagacggacagagggcttggggaatggggttgctatggcaaccgaaaggagcacacatgacgtcaaagcccagagaggtctagggagggggatgagggggaaacagaaagaggaagmgtctatgtgcagctacagctactgtgttttccggtgaaatgaggaccaggcaaatgtaaaggaataaggttcgtcggcagccaacatcagcaactacgacatcaaggcagccagcctgcacaacctgaagaaaagatccattcgatgcagttctggccctttgcacagcagcacggaggagcaaataccagcrgagcaaaacaccactggaaatgcaacctctgcttttcaactatctcttgtagtatctctaaacgtcaaacaagtaagagatggtaataacctcagaggagaagcaggcatttragtgtcgcctgaaccccgaggtcatctgcacagcactattcctcttctctgtttccttgtttttgtaaaaatcctgaataaatatccactaaaccaaattcaacagactaatacttaggttgcaatctgagtgtacaaagaaaatactgattaatttgagttaacacatcagaattcttttttttttaattgcagataattttctagagaactgatgmaaattgtactgttactatttggggcaaatatcgcaattttatttcagtaatttgctctgcctttaactgttatagggtatttttaaagtctccaaacagttttactatccataaataatagtttcttagaatgacaacagttgactacttgcactataaaaaaaaattaggtttaccaaatttgttttaccttttttatgtaagaaaaattttcaatacaaatttcgcttaaaccaactccagcctttggacttctcaaattacgtaatctaattcaattccttttttgcttacactcttttgaggtgggtttctgtttattgctaccaagtagtgctgagttgtaaatgattcyacattatgttttagaactagcatacttatatgaatatgaagcttcttccatatgttaccagaaagatacaacatgcaagagatgcaaactcagcagtactgtagacactgaaacacatcataaagctgtaagaaacgcatacgtttttgttgtctttgttgttgctgctgttgttttatttggggagaaaatttagaaaaaggaaggcttgagtgagttgtatgtcattgtagttcattggataagtgtttggatgtccctttactctaatttcaatttcaacaagaatcaatcaagactatcttctagtcttctcaatgggcctacctgcaagataactacctcatgcaaaaatatggattgatagccaaacaactttataacacaaaataattggcattctggcttttgaggtattatatactaagtttggacatcaaaagtcagttccccaatcccatggaaattaaatcagtttgtcraagagatgtctgcattcccatatttattgcagcactattctaatagccatggaaacaacttaagtgtccatcaacagatgaatgtatatatattatgcataccacacacaaacacacatacacacacacacacacatgctggaatactattcagacttataagaacaggaaattctgtcatttgcaacaacatagatgaacctagaggacattatgctaagtgaaataagccaggcacagtgagacaaataccatataatctcacttatatgtgaaattttaaaaaggacaaacttgtaaaactagaaagtagaatggtggttaccagtggctggaggacggaaaggtggacagggaaaggggggacattggttaataggtacaaagtttcagttagaaaggagaaataagctctggtgtactattgcacagcacagtgactatagttaataataatgttgcctatttcaaaatagctaaaagagaggatttcaaaagttcttactacaaagaaatgataaatatttgaggtgacagataatgagcctgatttgatcattctacaatgtatacatgtatcaaaacatcacattataccccataaatatatacaattattgtcaattacaaataaaataaaacaattttttaaaagtgaatgtccagtaacgtaacatgaatgaggaaaaaaggaacgccatctcttaccttacattgtgaacacaaatatttattcaagatgaattgtacacctcaacataaaagctaaaatatataacactattaaaatataatataactttttttaaagatggctttctgaccttgcagtaggcaaagatttcttaggatacagaaagcacttaccataaaaaaaaaaaagagacttcatcaaaattaaaagcttccacttatcctaagtcaccattaagaaaatgaataggcaagccagagtctagatgatacatatatctgaatactcttgatagctgaaaatattctgatacacacaaatcctagattatagaaaacatgtcctacaattcaataataaacatgaacaaacaattttgtttaatgggcaaaagactctgacaggcatttgacaaaggaaaatttataaatggccaataagcatatgaaaaagtattatatatcattagtcagcagaaatatacaaattaaaaccaaagtgagataccatttcatgcccacaaaagtgactaaaattaaaaagactaacatcatcacatattgacaaggacatggaaaaccagaactctcctacatatattggtaggagtacaaaatgttaaaactaccttgggaaattttggtagtttttataattataaacctacacccaaagtatggctcaacactcctatttataaggattcacccaagacaatggaaacctacgtctaccaaaaaaaagttggacataaatgtttatgctagctttgcttataataagcaaaagcaggaacaactccaaatatatcaactagacagcagataattatgatatacagtcagccctccatgttcatgggttccacatctgtagattcaaaaactgaagatcaaaaatattaggggaaaaagaataaaagataacacacagagataaataaatacaaatagaagtacactataacaactgcttacatagcatttactttgtactagttattataaataatttatagatgatttaaaataataggaggatggaacactatgccattttatataagggacttgagcatccactgcttttggtatggagaggttgttcctggaaccaatccccctgagagtactgagggacaactgcatttgcctaatagaatattactcagcaattaaaaagaatggcaaccagaaacaggttaataccaatcattttcatccgttaggtgttagtttcctttttaagctttttgaaaatttatttttattaatgttatttttattggcagttataattgtacatatttatggagaatattgtgatattttgatatatgtatacaatgtggagtaattaaatcaaattaacataactgagacctcacatcatttttgtagtgagacatttgaaatttactctcttagttgttctaagatatacagtacattattgttgactatagtcactctgctgtacaacagatctgaaaatttattcctcttgttttactaaaattttagttaactaaaattttggttaaataaaactctttttttttgagacagggtctcactctgttgcccaggtgggagtgcagtggtgcaatcacagctcactgcacctttgacctcctggcctcaaggggtcctcccagctcagcctcctgagtagctgagactacaggtgcctgccactccacctggctaattttttatttttagcagagatgaggtctaagtctgttgcataggctgatctcraattcctgaactcatgtgatcctcttgccttggcctcccaaagttctgggattacagacaggtatgagccaccacaccaggcttgaaactctttattgttgttgttgttgttgttgttgttgatttgttttgttttgtttttgagacagggtctcactctaccacccaggctggagtgcagtggtgcaatctcagctcactgtagcctcaacctcccaggctcaagagattctcctaccttagcctcctgagtacctgggaccataggtgcgcgtcaccatgcccagctaaattttttgtgtttttggtagagacagggtttcaccatgttgcccaggctagtctcaaactcctgagctcaagtgatccacccaccttgacctcccaacgtgctgagattacaggcatgagccactgctccaggtccattgaaactcttttgaagtattttccaaagatgttgattcttggtattagttacaaagagtgatagattccaaccttccacatatattttggtgtggatcttacatactcatttcaattatatttatgttatttaaaaaatcttttaagtctattctatacacttcaggaaaattacttttctaaaatttgattatgcaatacaagttagtttaaaaacatcagtacctaaatatttcccattcccggttggataaaaccaaaactcttggtcaggtgtggtgtctcacacctgtaatcccagcactttgggaggctgaggcgggtggatcactcgaggtcaggatttccagaccagctgtccaacatggtgaaaccctgtctctactaaaaatacaaaaattagtccagtgtgatggcacatgcttataatcccagctaattgggaggctgaggtagaaggattgcttgaacccagaaggcagaggttgccatgagccaagatcacaccactgcactccagtttgagagccctccccaccaaataaatgttttcaatgaaaggagaaagaaaaaagaacagatacatattgggattattatgtttgtcaggcactgtttatatgtattcatactcaccatataaactcccataaaagtatctacttactttcatttggcacttaccgtattgtattttgtattactgtaactttgtgaatatgtaacatctcaccttggccaggtaatcccaacactctgggaggcccaggcaggtggatcacttgaggtaaggagtttgagaccagcctggccaacatggcaaaaccccgtctctactaaaaatacaaaaattagctgggtgtggtggcacttgcctatagtcccagctacctgggaggctgaggcaggagaatcgcttgaacccgggaggtggaggttgcagtgaaccgagactgcaccattgcgctccagcctgggcaacagggtgagactctgtctcaaaaaaaaaaaaaaaaaaaaaaaaaaaaaaaaaaaaattctcaccttgtacttgattatgacttaatcctctatttctcattatctcccctgaaagttccttttccatgtatagcatatcatcttatacatggtaggtgatcagttaacatttatggttaattataattatctgcagtttacaattcttttttacagttatcaaaactttttatttcaaatattattatggagtgttayrttgtgatatatacaatattaaagcaggtaacctctgttacaatatcacatatttgaactttgtatttaggtctaaaaacactttaactgcttcaaactctttttcaaagtgctttcaaataaaactgtatgtaatatagaagtctgacttgaattttgaatcttatcagttctatcaatcataagagtttttgaaggaagagtcttaaataagtcaatgtaagttcttattttcaaaagcatggaamtgtatttagtatcttttatatgcaaatctatttatttaatggcatgtgtgtagtctgagataggactaaagatgtttaggaatatctcttgctctccaatcaaggagatcttccttaccttataaatacaaactttagaacattacattttcagaataaactactgaaacatgcaacaatacagatgaatctcgaaacatgctgagtgagaaataagacaaaaaagagtatatactatatatatatgtttacatgaagtttcagaacagacaaaactattctatggagataggaatcagagctgtgtttgtctgtgataggaggaggcaaacagtcaaggaccatgttgatagcaagagggaaatttctatagtgatgagaaggtcctacatcttgatagagatgtgagttatatgggtatatgcattcgtcaaaactcctcaaagtgtaattcttaagatctgtgcatttcactctatgtaaattaaactgccataaaaaatgtttaactaaatttcctcttgggaaagaggaaaattgctgaatgagccaataagttagggttcctaaacctgaatatctagtcccataccctgaatcttgatttttcagacccaagcagccacagcaataggaaaggccagagtcaccaggatgttaagagacctaaccctcagagtgaggcagacaattgatggagatttacatagcaatcaacagatgagaattcagactcttaaaaaacaggttttcagaaaagcgtggcagtaaggagatttctgggttcagctgcagggactaattcagtgctaggactcggatgcagaaggaaatgaaggtgctgaagaacactttctgaatccaattctcaagtgaattaagggggtagcagtgaaaccaactaatgccctaaggtctcttgtcaaaagaggtcctggagtagggtgaccaattggtctccatttgccaggtacttctcaggttctagcaggcatttctcatgttctaacacttaaagtcctacatcataggaaatctctcaatcccaggcaaactggagaagctggccatcctatcctataatctagaatagacttgaaccctcagatggaagttgagagatagcaactgtgaaagaacgagttgcaaaagaaagaagtcatgagttccttaaaagagtgatgtcattaaagaagtgtcacctagctatactttcaacagttagattattatgtcatgaattaggatggtagcaaggggatggaaagggtttgataaaaagcaagcaaaattagcaaaattatggaactgaatcaatagaacatgctgactgatacaatatgaggggatggtggagggtccacatttactctttgagtaccatgttcactatgatttcacagaatgccttccctcagagtcagtcatgtatctttcatgatactattagaatataagatttccccaagtgtattctacttggggaacastggctttttgcaaaaactattccacagttcaaaagtttcagaaatgctgcatataatagctgccctttggaaagccatgttttattacacgtactacagtgagcaggtctatgcaaacctaccctcaaaggccaaggaagctgagaggccaaagaaagaggctaccacatccagtttctcagaaagaaacatttaatccctgtaccctcacttgagaaagtattcttatgtagcaagcatttgtttttttttttgttttgttttgttttttttggtgaaacatgtgcagctagtcctgtgtcagactgtcttgcaaaacttgtgaccactggggaagttagataaacatttttatgagggatttttctatgctataggcattgtttcttgaccttgctgcaggaacacagaatccagtcgccaaacatcagtcatcattggctactatccagtagccaaacccatcttggttctgcttcaagatggcattactcttgccatgtgacagggtgttttctatattacattaataaattaaaggtgctgagaagccctgaggaaaagaaaactattaaaatttctcaatattacttctcaaatgcagtttttaattaatatcttttatcatgctgttggaatgggaaacacagagcccacagcttaccatagtcatagtgattggcaatgctgcgaatttaaaacactaacagttcccaataagggtaaactttctgacctttaaacttcatgtaagaaaaggggtctaccttccacttacttttctttttaactaatagactttatttgtagggcagcttcaagtttacagaaaaattgagcagaaaagtgtagagaattcccatataccctactccctccccatagtttcccctattattaatatcttgcactcatgtgatacatttgttacaactgatgaaccaataatgatacattattaactaaaatccatggtttacattagggttcattctttgcgttgtgcatttctatgggttttgacaaatgtatagcatcatgttgcaatcacttttaatttttttcttgctcaggagtcaattttacattcagaaaacaattgtgttcacatcaaacaaaagtagataaattggtctcctgaaagttcttcctagtggacagagcactactattagaattcaacggtactttgaaccaactgttattaagcttataaaagtacgggtttgcttttgcttttgttttggaatgggaacctcccacaactagcaaaattatgtccctttgtggttaaacgtactttgattccaaatacaaaatatctgccacaataaaaacagttccacacaacttttcagtatcctaatagcattttttttttgaaagtctgaatgtagttcacaaatgataacggggggagggaaagtctattgtaaaataatatcaaagaagattaagcctcctcaggtagcagcagcttaaaaaatctaattagtgtatgtgtcttttgaacaatgatgctaatagaaaacgcccttttcttagatcccagcagaagctggtgtgtgagataaagaaagttattcttgccagacatcctcaggtttactcacacttcaatccatacacatctgtagcatttccaatttcccttatcctagaagcatgaaaaaagcatgaagataccatggactacatttgagtttggtctggaaattcaacttcccactctgcggcaattcctgcaacctttaatggggctattctcacctctgaccgtaatttgtcagcatggtgctcaaaaggcagtcactgaggtaggctaagaagcaaaatatgagccaaacattgtgtaattaaattaaaataaaagtttaataattttttataaacargtctgccatcactacttgctaaaaatttctaatattaaagagcttatttttaaacatttatatgagaagactttttcaatcatctaactaattggtgaattctgggtctgtcttatcaaacaatagtacaagtaatagtaatacatgatgatcgtatacaaacacttaaaagagtaataatcagaattaataatatgaatttggtgtatttartcttacatttttaagccaaatacttatcagcataaatttatatgtgtagcttatgtctggtctaaaaatctgctggattttcaaatcattaacaaaaaatattttcttagagtatcctaaacatgctatttcacctatattgcaatgctacatttgacaaggaaacaggaaaataaaaatctgatcttgaaaattgtccaaattcatgaaaatagtgcaatgataatagtagttaaattcaacatatgctttatrtgagtgcaagataattaaaacatttttgagataatgcataaatactttcaaagcttattagaaatatgtataggccagtctgtgtgacctgagcagatcgcatggcctcttcatttcccaatttaggcactgtcataatagggataataatattcacttcacagacttttcatgagaaacaaattagataatgtatgtgacagtgcctagcacaacccttagtagatgacagtcactcaatagatattgaacattctgattgcaatgagagatgtaacccacacttagattaaaatttcctgacataacgttgtaagctatgaacattgtccaatggcccagaagcattaattttctgttgtttgataatgttcttaaagtgtatattcaaaaggagatacagttgatcatatgctatttggaggtgttgaagcagcactatagaactaataataaacttgaagaaatttgagcctatctgccagtctacacctgagatactattcaggacatcagtgattcttactggaaatttcccagataaaattcagccactttgtcagcaaatattcagagacatagtctttcacaagaaatagataacaaatttaaaaaaaaaataattgagcaaaaatagtgtcactgttagagctgtgtgacattcttttcatttaattaaaaattaattcaaccagcaaatcactgagtagcatatcagtataaaactctatgctagagattagaaaaagaaatctgagaaatggtcaccatcaaaaaggagtttgtgatcttattgttagactggaccacttgaaagaaaaaatatctataaatgaatccctacacgtgaaacaaaaaaaaaatgaagtctcctgtttgaaaaggaaaaacctcaacacagtcatgcaagtagaaaatatggatctcaaatcctgtatttaccttgggaagaagcatagtcaaataaaaatggaaaccttagtctcagttccactgtgactatgactacccatcagatgttgggcagatagtggctctgtcgacatgtttcttcatctacaatgtatcaggtctagatcacatgataattatggttctgtaacaaaatggaaaagagagtcttcagatgactcaatgaacagaatttagacagagatttcataagaatagacttaaaagtgacggaaaacatatcttgtttggatgagagtaaagagatcactttcctagttaaaacaagaaggaaagcagtggaatatcttcaactatattgtcttctaggcaaaatatacaaaccaaacatttacattgcaaattaaaacataaggcaatgagaataggattcactgctaaagtcagttctggctttttgagtcatttaacaaatactaccttatgataagtcaaagtcgctatcatttttatcattattatcacaaatgtcatcattaatatcatcattattttagctattatctgttgaaagcatcctctgtgccatcactggctgatgatttacagacatttgctctagtcacacagcatttcttgatgattatctctaacatctatcaaccatccacagtgtgcctgggcccatgttacaatacaatcctcactactgtatcataaggtaggtagagttattgtccttattttatatacaagaaaacggagacttagagagagtttaagtcatttattcaggatcacaaatgaccgccatgggtcagtattgacatctgtgcatatctaactgaaatttcaactttcagagaggttaagaaaaaaatgcgagtgaactcaatgataaggtggcaagatggccgaataggaacagctctggtctgcagctcccagcgagatcaatacagcakgcaggtgatttctgcatttccaactgaggtacckggctcatctcactgggattggttacacagtgggtgcagcccacggagggcagaccaaagcagggtggggcatcgcctcacttggaagcacaaggggtcagggaactctttcccatagccaagagaagccataagagaacaagagaacatgccatgaggaacggtgcattccagcacagataatatgcttttcccagtcttttcaacccacagacctacaaagagacttagactcccacacaataatagtgggagactttaacaccccactgtcaatattagacagatcaatgagacagaaggttaacaagaatattcaggacttgaactcagctctgcaccaagtggacctaatagacatctacagaactctccacccccaaatcaaaagaatatacattcttctcagcaccacatgatacttattctaaaaccaaccacataattgtaagtaaaacactcctcaacaaatgcaaaagaatggaaatcataacaaacagtctctcagaccacagtgcaatcaaattagaactcaggattaagaaactcactcaagggcaggcacagtggctcacgccagtaatcccagctctttgggaagctgaggtgggcagatcacgaggtcaggagatcgagaccatcttagtcaacatggtgaaaccctgtctttactaaaatacaaaaaattagctgggcgtggtggtgtgtgcctgtaaacccagctacttgggaggctgaggcagaggaatctcttgaacccaggaggcggaggttgcagcgagctgagatgacaccactgcactccagactggcgacagagtaagactccatctcaaacaaaagaaagaaagaaagaaagaaagaaagaaagaaagaaagaaagaaagaaagaaagaaagaaagaaaagaaaagaaaagaaaagaaaagaaaagaaaaggaaagaaactcactcaaaacttcacaactacatggaaactgaactaccttctcctgaatgactactgggtaaataacaaaattaaggcagaaataaataagttctttgaaaccaatgagaacaaagacacaacataccagaatctctgggacacagctaaagcagtgtttagagggaaatttatagcactaaatgcccacatcagaaggtgggaaagatctaaaaccaacaccctaacatcacaattaaaagaactagagaagcaagagcaaacaaattcaaaaggtagcagatgacaagaaataacagctttaaatttcatgtggaaccaaaaaagagttcatatagccaagacaatcctaagcaaaaagaacaatgctggaggcatcatgctacctgacttcaaactatactacaaggctacagtaaccaaaatggcatggtagtggtaccaaaacagatatatagaccaatggaacagaacagaggccacagaaataatgccacacatttacaatcatctgagtttcaacaaacctcacaaaaataagcaaaggggaaaggattccctatttaataaacgacgttgggaaaactggctagccatatgcagaaaactgaaactggaccccttccttacaccttatacaaaaattaactcaagatggattaaagacttaaacataagacctaaaaccataaaaaccttagaagaaaacctaggcaataccattcaggacataggcatggacaaagacttcatgactaaaacaccaaaagcaatagcaacaaaaaccaaaactgacaaatgggatctaattaaactaaagagcttctgcacagcaaaagaagctatcatcagagtgaacaggcaacctacagaatgggagacaatttttgcactctatccatctgacaaaggactaatatcctgaatctacaaggaactgaaacaaatttacaagaaaaaacaaccccatcaaaaagtgggtgaaggatatgaacagatacttctcaaaagaagacatttatgcagccaacaaacatatgaaaaaaagttcatcatcactagtcattagagaaatgcaaatcaaaaccacaatgagataccatctcaagccagttagaatggtgatcatgagaaagtcaggaaacaacagatgctggagatgatgtggagaaataggaacgcttttccactgttgatgggagtgtaaattactgcaaccattgtggaagacagtgtggcgattcctcaaggatctagaaccagaaataccatttgacagagcaatcccattattgagtatatacccaaaggattataaatcattctactataaagacacatgcacacgtatgtttattgcagcactgttcacaacagcaaagacttggaaccaatccaaatgaccatcaataacagactggataaagaaaatgtggcacatatacaccatggaatactatgcagccagaaaaaaaaggatgagctcatgtcctttgcagggacatggatgaagctggaaaccatcattctcagcaaactaacacaggaacagaaaaccaaacaccgcatgttctcactcataagtgggagttgaacaatgagaatacatggacacagggaggagaatatcacacaccagggcctgttgggggtgggggactaggggagggatagcattgggagaaatacctamtgtagatgatgggttgatgggtacaacaaacctccatggcacatgtatacctatgtaacaaacctgcacgttctgcacatgtatcccagaacttaaagcataataaaaaaaaaatttttaaaaagatgtatccctcattagaaggtctttgcacacactcagaacgggagcactaaatcactgtccaatcattattgtcctgtgtggagcctatggaaaggtggcagtcagagcagctatgaccttgtaagctgaagcagagaaatccccaaaaagaaaaggcagaagaagcccttcaaggatgtggcatacacagctttttaaaaatgtgacatggctgtgaactgctgagaaacagcagctaataggacacctgatgttccgctataaggaatgtgacttctcctttttgagcacaggctctttaggccaaccgtgaatttaagagacaaattctgagtttcttcaaatagctacagtccctaaactgaaatccccattcatatacacaacgtagaaggaatattggtagtagtcttttcaaacactgatgtacgctctgattgaagacgtcatctatagaaatgaaatacaatgatattatgaatgcmtgtgtacatgcacaaacaagcacacgtgttcatccagttaacaaatattcattgaattcatctactctacatgatcaagacaaaaacgtgttcggatattgcttctgctctttcatggagctcaatgatttttagacacagacatgaatgattataatgcgagggatttttaaattgctaaatcattacagtgatgggaataaagcaatgaatacttggaaaaaagagattatttctatctggggtgatcagagtgctcagaaatgtgtgcacacacacacatacacacacatatcatagtcagcaatatattttgtgagaaatgtctagaaacgtacaaaaggaaccagccaatggtaatgaagagactgttaaccaaagatctacaatacaaatagaaaaatgagccaggttactcactaccacaagtaacaccaagaacttgcaagagcttgcagtgatgaatttggaatagacaaactagaagtgaagttcaactaccaaaacttataaaaattaaatgaagggccaggtgcagtggctcacacctgtaatcccagcactttggggtgccaaggcaggtggatagcttgagcccaagagttcaagacaagtctggacaacatggcaaaacctcgtctctacagaaaatattagctgggcatagtggcatgcacctgtggtcccagctacttggaaggtagggatgagagaatcacttgagcccaggaggtcaaggctgcagtgagccatgagcattccactgcactccagctagggtgacagagcaaggtccactctaaaaaaaaaaaaaaaaaaaaaaaaaaaaaattaaatggaaagaagattctgtttctaataaatataacagtcaaatagaaaacactctctcaatcaataaagcaagtacctccttcccttatgtgtgaacctcatacaactttctgtaatgaactctgtgaactcattgttattctaatgaagtggatatgtaagtataaattaattctctcagttccacatgtttaacactaaataactgagtgtctactaggtgcaggattgtgctatggtctttaacatttgtttacctattctgggtattatctcattctaccattaaatattattcacactcagtttgtaggaaaaattgagatatgccaactaaaacttcagcaatctttcaataacatcacttgcttctaacataaaggaaggtattccatttttccccttattagagcatctcaaggcttatctttgagtttagtaaggtactactaaataataaacagcacttatcttttcttctccccactcaaaagcttgtcagaatatattccagaatatcaaaaacaaaacatagcaagcctaagtaagtccttattttagctaagtgaataacatgctggtaattctgatttttaatagatggaaatgtacacatcatgaaattaaggccaaagactaagtaaacactgtaaaacccatraaaagtttcctaaaatctggagactccaattcactatattaagacatcacaagaaagaaactgtgaattacagatggttcaaaatttttgtcaaaataacacatttaagttggttgttgaataaaggttatggtctctgcttagactgagagcttgctgaaattatgtctcaggcataacatcctccctaatagttaacatagtgcttggtagaaaaataggaagaaaccatatttattaaggacgtatataattaatcatatccattctatgatagttgcctaagttttcctagcattagacatgagaaacaaccattcactttcccaaagctaaatcgagtctcttaaataaatattttgaagaagaacacattctgacatgtcttttgaaactaaagaaaacaattcaaattcaatttaacctatttctacattcctaaatgaaaccactaaagagaaatttattccagtctaaactttgcaatcacagaagaaaaacctctgtggggaagtctccccatggatccctcctggcccttgttgggcatccctgctccagagtagcccatcagagtcagtgaagcacaatggctttacaagcaggcagccatttccaaggctgagtgtgcaacatgtcattcataagtaaagccctcaggctcatccaaattctacagcagccagtcattccctgtgaggtcgctatcttaaggagattaaagaagtctttcatgaagtcttgccagtgcttaagattgtcattgtctcatcagattaacactagcactctgatgtaaaagacatccaggttctctgtggtttaaggcaattcttttgcaggaatctctgaggataggtggccacagctatagcagcttccagtacagctctactgcccaactaccagaagacctggagttccagaagaaaaggtgattctcatgattctccaagtgctgcagagaagctgacctggcaatgataatggcacttctactgtgcctctgcagtcaggagtttcccagtccagctgcaggccttggtgaaggagaagagccagaagggctgtataatctcaaatcttacttggagtggggagtacctccctcattagagtgtaagtttcatgagagcagggacctttctrtttatgtctatatccaccatacccagaagagttcatagtaaaaattcaatacatttttgttgaatcaaagaatactgaatgaatcggtgaatcactaaagcagtcaagaatgaacaatattaggaataaacatttttaagtctctcagcttgtgctcttcctcctctatagtctattctcagagcagctatattagtcagggttctctagagggacagaactaatggaatatatatattatatagtccgagttccaaaattaaagaacttggagtccgatgttcgagggcaggaagcatccagcacaagagaargatacaggatgggaggctaggccagtctctcctttcacatttttctgcctgcttatattctagctgctctggcagctgattagattgtgcccacccagattaagggtgggtctgcctttcccaacccactgactcaaatgttaatctccttggcaacactctcacagacacacccaggatcaatactttgtatccttcaatccaatcaagttgacactcagtattaaccatcacagcagccatgtgataacttatattacaccatgtctcttccctatgcaataccccacaatggctgacaacacactgggaataaaatgtaaattccttatcatagcctgccaggccccacatgctccaactcctagctccttctctccctcactggcctctttgtagtttctcagacaagtcaagaatgcttccacctcatggcttttgcacttgctgatcctcctgtctgcaactctcttccttaacgtgtgcattattcacacttcagttcattcggaactcactgaactctggagaggactttttgacaagcctgtctaaaatagtaccccacatcacctytatcccttactcactggctgtttttctttacagcagttactcttttcgacatattaaatgttgatatgttcattttctgtctccccctctaaaatgtgtgaggatgaggatgatattttgtttatcagtggatcctcagcacctgggcaaatgcccaaaatatactagagtacattatgtaaaaatttggtgaatgattgaatgcaacaatcttacaaatttgctctgacatccttgaaaattccacaaagcgaagatatcattcagtcactgaacagttatctggtactgcttttgtacctggcactggataggccttgggagaggcacgggagagagtcacataaatccctcatggacccagcccttaagaagactagggcaggctttaaacatgttccatgaattgctacaggcaatatacaaactgtaaagagaaataaggaggaaacagttctacctgagggtgagaaaggcttcatggaagaattgaaatgtaggcctgaaataactttccataaggaagtggcggcatatgctcaagggagcatggaacagtctggtgggatgaggtaaggaaatgtaggtaagtatggtcacagcacaaaaagcacagggctccaagagcagcagtgcatgtgtggtgagagctgaggcttcatgggaaagtgagaaactgattattgtttatttcccatgttaaggatctggaactttattctgcagcccaacgaatcctccttaagtcccggcctagcaggatcattactactttaaggtctgaaagggacgaaacgtccatctccatctgcgtgcatcacaactttactaccagcatttctatattgtagaaatcattttgcatgtgaataatgcctaaaagggaacacaaaaacaggaaaacaatttgattcactgggaattggagctttgggggtttcctttttgttactgaacttcttttctgttgggaataggcccccaaaatctsgccataaactggccccaaaactagccataaacaaaatctctgcagcactgtgacatgtttgtgatggccatgacgcccacgctggaaggttgtgggtttaccggaatgagggcaaggaacacctggcccacccagggaggaaaaccgcttaaaggcattcttaaaccacaaacaatagcatgagccatctgtgccttaaggatgtgctcctgctgcggataactagccagagctcatccctttatttcagcccattcctttgtttcctgtaaggaatacttttagttaatctataatctatagaaacaatgcttatcactggcttgctgtcaataaatacatgggtaaatctctgttcgaggctctcagctctgaaggctgtgagacccctgatttcccactccacacctctatatttttgtgtgtgtgtctttaattcctctagcaccgctgggttagggtatccctgaccgagctggtcttgcacttttcatttcctattaaaacctggttttcggcagggcgcagtggctcatgcctgtaatcccagcactttgggaggctgagaagggtggatcacctgaggtcaggagtttgagaccagcctggccaaacatggtgaaaccccctctaaaaaaattagccaggcatggtggtgcctataatcccagctactcaggaggctgaggcaggagaatcacttgaatctgggaggcagaggttgtggtgggccaagattgcaccattgcattccagcctgggtgacaagagtgaaactctgtctaaaaaaagaacaaaaacaaacaaacaaaaaaaacccccccaaaaaaacctgtttgtctcagcctctgtcatatgttggactatggtctccaggtttacagttgccaccctctttgcaggtctgatttccctgacatcagcactcctctggagatacagtttcacaattatttgttgactttgcttggagtaattaagccctaaattctgcctttgcacaagccttaacacagtgaataggtcaattatagataaggactgccactgacaaacaagcttttctgaccattttagccctgagcttcaggccttctggttatcagttttccaatcaccaacctttagggcattcatctagcctacttgttttcaatgtttttaaataaaaaccttttttcttttcctcaaaacaatctcacagagtccagtgtataaaatctgtaaagcaatgttttattaatgataaatacattatgcatgtttacatttgtaccattcttttatagtgaaagtgaagaatgaacacaatgtggctatttggatgagccagacattttcaatcctgacttatgggtgacagttgtggttctgtcattcccagaataaaatttgtttctgtactttttgttggaaagcattaaaaaaaaaaaaaaaacactggatctagttcatacatcctgcatttaaaaaagaaaaagagagactgagagaccgaagcagagctgggaactgtctaatagacgcctcatttgtaacaaccctcagtaggttgaggttgcaaactcattgttctagactctagagtcaggagccaaatccagttcagttcacagtgcatgtgttttcattagtgtcactgtttaaaaattgaaaattttcatgtaagaatctggagacttgtcttctcttggaatctttgaggatctggcagtactggggccacattccaacctggtaatggctttaggcctgaaagaagctgtttgccctttccagatggccttacacatgcatgcctccccttcactaccctcctggccttgtaacatggaagtttgtgtttcccaaactacaagtccaaaggcaatgggagacacgtgtttgccttctctctggctccatcaaccctaatccaaaccaccatcaggctctccacagactgctgcagtaaccttctaatattcacactgtagggctgctctccttgtgcaggtcccgggcctatttaccctcagatccatccttgcccttcactgactcctgggacctgcattttcagacactcatgttagctgtctctcaactggcttcagccaatggaaggcactgcaggatactggaaggcaggagaaaggaagaagccaaggtattcgtgtccctgcctctctgccttatgtggtgtctctggcaggagcagtctctctcccctggctccgcttgtggagtccccacacaggctgtcttctgccagaacacacttgcatcactcagggtcccaacaagaaacagatggcatagtttaaaaggataatttgaggtgcatttatttacacagggacggtttacaaacatgtgggtatagaggaatcacagtggatagtgcttaacactcctagacccaacaaggagtgagtccagaagagtcacccgttttgtgaggagggggcacattcaggcaagagatgcagtcaactgaggctaactctatggggcaggaatgggagaataaaacccttgacattgtttttcctccctcctcagggtttctctacagtggcgctattgacattcggagccaataattccttgtattgggacagggctatcctgagcactgtagaatgtttagcaagaagcatcctggcctctgtcagctagatgcctcccagttatgacaatgaaaaatgtctccagactctgccaaatgtccctggggtgcaaaataacccctaggtgaggaccactgagatacaaccacctgctgtagtccatttagatcagcctcagagcagagagacgaatggagggaggtggaaagtggatttggagaggcataactccttaccccacactgacctggcactgaccccccactcagtcttcagacctcaggattacctggaaccttctcagagcacccttgcctggccagccccacatgacttgttaaattaagcttttacttattattctaattgtaccctattgctttccctcagaccttatcacagtttgtgattatctattttatgtgtctgtttatgtttaatagctctctcacctgtggaccraaaagcatttgcggatatgggctgtgactgcttgttcacctagatgctagcccagtgcctggcataaagtcggagcgcaataaacacatggtgtgtaactaaattaagaatgaatgtattcacttgcagcaactatggcagtatatagtctttgggttactaaccaaagatggccatacatttctttgagagtatgatctttttgattcccatcctgcacctcacattcctgtcatggtgattctgctgctcatgaatgttagagaacctctgtttttctgtttctcagtagtgtcagagagccactgttttagttcaacgtgacaggcagtggagtattaagagcagggatccagagacaaatccttgggttcacatcactgcttcttctactcttgacttgctgtgtgaccttgagtgagctgtctaacctctctttattttcctcatcagtagaataagrataatgaaactacatatctcataaaattagtacaaatagtaaattgagttaagaatttttaagcacttagaagatcctcattctgcatagtgtaagaactatataagtaaatgttaaataaaataaatgttaaataaaataaatgtaatctcaggcaaacattaggcttccttcccatgaagtcttgttcttttatttcccttccctttggtggctataagactggaaaagtccaagctctttacagtaaacttctccctaagaggtgttgagtatttagtctagactatgcagcccacaagcagcaaatcctttagcccttcaatggtgcctctgggctgtgtgactggggcaagtttatgtcaggatctgtccgcctgttaagcaagctttccacagtcaagggtagaatgtaacctgttctactcatttaccctttgagctcttctttttccatttagcataggataaacaggtagctaaacaatttatgaactaaacttccttcctggtttttatttttatatttttccatggagtatattaatgccaaaaataaaccagttattaattttatgtagaatatgacctaagtatgaaccagtgaaatagttattgtacttttatatcacttcaagctgaaatattaaccaaaggtattctaattaaaacaccaagacatgtcttcaaaacatagaaacttggcttgttttctaatagagaataaaataatattttcctctttaattttattttatcctttaagcttacatttgataaaggtagaaagtttactttctaaaagaattaaataccatttacaaaaagaaaacttaggtaatcatatgtagagataacaatttacttcacacacaattgaaaggcaaaagggcaaaatgtgtgactaacatgcatattaattctgaagaattaatggcctgatttatcttctttgattaatttttaatccttcaaatctctttgctctcattcttcgatctctcagaagacatatcatttctttcatcctacatttcgaagcctaatagactagtttgtactcaatagtttctacagaacatttaaatattacaagtgttggagaaacataaaatctctccttaccttttaccgtgacttcatttatctgggcaatctccacaaatctagaaagtagctttgatgttttcatcagacattattcatttataaactttagagtgccatctgtgtgccaggtgctacaccaggaactggaaaaactgcaagaacaagtccctgctatataagttttcaggcacaaaataaatttaaataaatttaaacagaaaggtttgtgtattcagggcaaagataatagcaagtacaagaacgctgagatgggacagagtgtagtgtactcaaacaaacagcaagaaggccagcgatggatgggagaatggtaggaagtgaggcccatagggtagccagaaggcttggtaaggactcccccgaactttattctatgtagtgggaagctatgaagtgcggaaagcgagcctgatttacactaggaccactctgggagcagaaggcatgtgcagactagagtctaggtggaaacagtggaggcaaggacacaaattaggacatcagctgaggcaagagatgatcattacattagaggaggacagcaggggcagataaaaagagaagcggctgcactcagaatatgctttcaatgtggagacgacagatttgccaactgtaggattagatgtacaagctgacaaaagtgttttatttatgatatttcacagaaattatgacaactctgtttgcaacattttagtagagcaagaaattaagtagtacacagctatattgaaagaatacaactaaagttttaacaactttcayctaaactagagagaaaaaggaaaaaacagatatagtacatctaaacagatatgatacatttaaatataatatatctaaacagatatgatgcatttagatatatctaaacagatatgatacatttaattacacctaaattgttttcttatatatataatgctcttgggcatagcattagcatagtaggtttattgaggatgttaaaagtacagaaaacactttttttcatactttgcccttcatttaccattcctttactacatatctttctcagttttagaaaataaaataaatttcaatgaaaataaaataaataattaataaataataatattgccaatttattgactagctactggggaaagaattggcaaattcctacttgttattcaactattttagtttaccaaccattgctggttatttttgccagttagcaatttaacaaccattgttaatttaccatttaaaagtttaatgaggcaaaacttggcattagaaatggcataacctttccaaaggaattctttacatgtagtgaaatttcaaaaacactctgtggttgactttaacagtgttctttctctcatctcactgctttgctaacatttcttatacatatttctttttctttaaaatataaactatgtaatcattggtcctttataaattaatcatatatctttaatatgaactgataaagaatggttatttctgaacatctatttgggttccacaaatcacttcccaagaattttaaaatgaagaaaacaaatctgaggtttaaacttgtaaaaatccacacagaatgaatacgattagctcccggatgggtaaatcaaaagattccctgtagatgcaaaaccaaagaatttggaacacccaacactccattaaaattacctgggtataatctctatgatgtcaggctgaaaattgactataatttagtgaagtgaaacaattaattgtattgtgtctaatgtaaacaaagactatgactagcaagaaggtggttagactatagcacacatgcatacacacagaaagaaaaccctagtactgtagtatttatccagtcttagccaggtaaagaaaactctgtgactcataaaaaaaattatttaaaagacatgcaatttatcgtccaagatctgccccctgaaagtacaatgtacaaaagaattgcatccttcttcatcatttctaattacgtgtttaaaatgtgccttctcccacctgattacgaactccattcggagggaaatgggggggaatcatgtctacacaacactacatctctagtacattctgttagaagagaattgcgatactccgctcctggttgacattggagatacgattcgctaagcatacttctagcatctctctgtccatttactcactcttccctggggaagagaagtggaagcttgagaaaagttagcaggaatgctcaggtgtaccatactccctcttgggagytgcctgcccacagcaggaagtatctcccttcacctctagagcctaaatccctgtggagaaaagatctgcctgccctagtccaggactgcagggaccacatgggtaggtcttcctaattctgagagttggttcattggttcgcttgggtctctcatgaatctatgactctaatcttgatctataaatgatagagatgatattttgcttccatctgcttttcagagttttttttttcttaaattattgagattccaggcacagcagggggaaaggtcctatttactggcccccttgaaactctaacacataacacaatgtctgattctctgtaaatgcttagcaaatatttcttgagcaactgtagagattaacacaaaaggctgattctacaaatttaagttctctgcccacaaaaagccttagtatactacaggcggaaacttggaggcttacatcttggccatccagtgcccacttttcagataaaataacagaatgatctggggctctgagatcaagattgggctaggatatctttggaaactgggtcgaatgtggaacatcatatgcctcaagactgtggtagagaggctgagtaggctgtctaaaaatactattcaatttaaagagtgtacagaaagaaaaaaatctgggcaagacaccaacaggataaaaatcaaggagatggaaatgagtagttagaacagaagtctatggaaaagacaaattctggagaaaaacgctaatctggcttgaaaatggctgcagcatattttattatgcacttcatggctggaaatgaagcagccggaggggcacagggagctggtcacgttacggctggttgtttggggaagtgggcaatgatgattgtctcagatagggaggatgtccttcaagcccaagagcacaacggaagcacattttacttgaataagaaaaatcattgcctgatttaattttgccaatgattttctgcactattactaaaatatactcagtaaaaacagccaactataaaactcaaaataatcaagtttttacattaaacaggaaattagagcttccttttataataaacaactatttaggttgtgcaaggcataatatttatcaattcacccagaatcttgaattataaaacacatttcctgatgtttatttttcctcaacatccaggcttggactggagcaagtccctgaccacttaactcttaatagctgacgctgcctcaccgcacctctattcaatgtctgtacattattcaaaagaagtgaagggaaagccttggttgccttggttgtttggaagctattattttcattctccttgtgtggcagaagaaaaaagacagcaatgaaggacctgtcaatatggaaagagtaaactgaactgacgtttttttcaagtagtgagtcttttttccaggttttttagccctcctcctcctatcagttgtttatgttttaactggatctatctggtgctgatttatatgaaatactattactacttgagtataactaatggctttaagacagttacttagagtagctagaaagttgtctctttaaaaactattttaaaaatatatacaaaagtatccagaaaaaataatatataatatttataaaaatatttatcaaatatataataaaaatataaaaaacaataaaagtactaaacaaatgggagattatcaatgtaaatttaagaagttgataactgtactgtaatcgggttagaaaatccacactgaatacttaaagaaccacaatctgtgatgtaagttgtaatttacttcaaaaggtttaggaaaaaaaygtgtgtgtgtgcatgtatgtgtctgtgtgagagagagagagaatatatataaaatatacacgtggcttacataaaactttccatgatattacatggcattatatattacttatcgtttgtcagtaaacatycatatattttatagttgtgactaaggatataaaaatgtttgagtagtaacttatttcatataactctaaaattaataactgaaaaatattaataaccaagtacagtaaatataaaagcaaacacaagaagaacccagcagatacctcagtgtcaattcagtaatatgcctaatcatacataagatgacttttatttactgctccttatgggaacttgagttaaaagggcaagaaacaagtatctgtagcttgctgcttctagaaatcctgaccactggcttgatgtcacaaaaccttagctgacttacttttgtacttcactgttattgtataacaagttaattcaaggatggcgattgaatccatgtaaaaatgactatatccaaatcactttatgtaaccttaatatatagcataaacatacatataaaaatcaatattaataaataatagaaattatatccatgatatttgtttcaaaaggaaacacagatgcatgaaatgtactcaacacaataggtcatctcttatttctagctcaaagaacactgcctaccacaaagtggcacataataaatatttgttaagtgaataagcaaatgaattaataaatgaataaaacaaaataatatatgtaatgtttttaatgcaaaaactggcagatagcattcaatatgtgatatggttcagatttgtgtccccacgcaaatctcatgtcgaatgataatccccagtgttggaggtgggacctggtgggagatgattggatcatggggctggatctcccgctttggtgctgttctcctgctggagttctcacaagatctggttgtttaaaagtgtgtagcagctccccccaccctcttgctcctgccctggtcatgtaagatatgctcactccccctttgccttccaccatgattgtgagtttcctaaggcctccccagatgcagatcctgccatgctgcccgtacagcctgcagaaccatgagccaactaaacctattttcattataaattacccagtctcaggtattttcttatagcagtgcaaaaatggattaatacaatatgatctttgtaataaacttaataatactactgtataacatttaactttgtcctagccatcatgagacaataaattagtaattctcaatgaaagggagcatgccacactcccctacgggatagtttttagagtttattgtttatcttctgtttttttgcctttactgactgttactgtgattggcggtccaactataagttgggaccaaggggactgggtgttgtgaaatgtgtagtacagccccacagaatgaagaattgtcctgtgttttgtgcaattttataatatccaacacatgacaaaccttcacattttgtcatagttttcatatatatcaaattttctaggattctgactactgtatagtagaggaaatattgtatgatgctttattttctttgtggaggtactgggagttagtaagaagttcagagtatgttactaaaagcagtatcacttgtgggatttgaattgctaatatttcaaacagatgagtctgcatttatagctgttgaattcatgttgaaagaacctccctctctctctgcccccatctatccaactacaaatacatttatttgtcgcttgttttaaaataataattatagagaagaaggattgaccatcaactaaatattgccttttcctaaatctaaatttattcattccaagtaaggacaagcatctgcctctttccttttcttttccagtggagccatgctgagtatttaaatactgaaatgcatatcattttactacatacataaaattttatttctctcttatttcacagtttaggtattatattgattctttaaaatcatatatgcaggtagattgtatttctatgagttttattcaatggtagaaaaggaagatgataaaaagatattatttaaaaagtctattgggttggataggattgaaaactactgcacttgatcctatgagatgccaaaataaaaggcagaattttcaaaacagctttgcaacacttttgacaccttagaatgtagagaaagaagagaattgatgagaactatagttccataccctccccttcccccaagcaacttgggcaggatgctacctctactttgagctagggtaggggcttccatgagagcacttagaaagcttcaaatatgttttctgcagttggagacatgtgtgccttcctcaagtctgagaaagctaaaggagctagaagagactgccagcaagatagaggtgcctatgttttgattgactggcactttgagagttgttgaggataatagatacatgcccagatatgggtacaagagagagggaacccacacatcacccttttatgtccaacttagcctataggatttcctaggaggacagtacacatccaatcgtgaaggtctgtgtggagtggatcatgaatgctaagggcttgtgggaaggtgctgagctttaagcccaaagcaatatatttgctcttgtcaaagaagctatcaatcttctgtccatgtagatattatctctggtatcttactaggcttgactctttgagagattagctctcagagcctgtgccacataattgctatctgagaagtttcattactttatctgtttgcattaccagtgcaacctttttaaaaatgttagaatattgtttaggaaagatccttttattttctccatatttgtactcattttcagatatgaaagctacacaaaaatcagttatgaaattgaggaagatgaaactaaagatgcatcatttacattcaatcctagttgtatatttaacagcttcttctgtaagcacaggtttagtacataaaattatatttgaagttctcaaatttgcatgttaccagaatgcaagcctctgtaagtattatcatagatcaccactccaatcagagtaaaaagctttccttgaaaattttttctttaagattagagcaaatggaaacaaaatcctttaatactttagatttttaccttgtggtcatacaagtcagagtagttcagtcttgtcatatcatgcatgtatctacatgcaacgtttttaactgtaccatgattgaagaataatagaaccatcaattctaagcattcatgaattttttgtcactccatatcaagccaagtgtggagtggaaaatgaatcagagacctgattctatggcatatagagacaaggggcagcatacctcgccaggcagtgagctctctatctctggggacactcaagtgaaggcaagaatccttcatctaggacatgaaattcctgcattgactctgagattacacagataaagctaataattcatatgcaacaagacagatatcacttgttagcatgaggaggggaggttggatcctgcagagaaatagtactaaaacaagtgacgtgaaccattgtcttttgattacccagcatgcattcacacttacttccttccaggacaaatagccctttcacattctcaggccaattgcttcaagtaaaattatctctaccttagggatccaggattgaagcccaccacaggtttagcagtacattcccttccctggccacagtggcaatttcaggattgagtattagacctataagtcaggctaatcaggaccaataagctcaattctaaaattccctctgcagcaggctggaagtggagtatctcttacactggatcgggtgttatcatgctgtgagcctggaactctgcaaggacagctggcagagtcagaaaatgaagcctatcaagaggattcagcgtatggccaggcgcagtggctcacacctgtaatcccagcactttgggaggccaaggcaggcggatcgcctgaggtcaggagttcgacaccagcctggccaatgtggtgaaactccatctctactaaaaatacaaaaattagctggtcaygctggcgcacacctgtagtcccagctattcaggaggctgaagcaggagaatcgcttgagcccaggaggtggaggttgttgcagtgagccgaaatcacaccattgcactctagcctgggygacagagtgaaactgtctcaaaaaaaaaaaaaaaaagaggattcagagtagaaaaatagcggactctgagttctgaaccaagacacacctgttcagttacataagccatcacagtactttttccctttttactaagctattttgagttgtatcttttctaacctgcctgttccggcaaacaaaaaagaaaaaaaaaaggagcagactagcagatcaagtggagattatagtgttccattctatcctcagtactaaggatagtgtcagatacataaaaggtgctcaataaatacttgctgaatgactgaaaaaaatgctgcaagcagcaggaagagccaagatggcttggaaaaggagagggataaggaggaagtggctggtgactgtgtgttggtgaggagactgcgtaggagtacaggagagatttttagcagctgttatgagtgcaagactttggggagatggagagaggtataaagagaactgttaggaagtttgctctatgataagctgcatatagttttccttacagaaggaaatataacctaaaattctatatattattcttcaaggcttctggagtcatacttatgtccttgaatgtaacttcttgcagaggctggctttgaggcagagcacacttgccagatttaatgaggattatacaaatgcatctaaatgctttatgtggagatcaaatttaaatgtattgataaaaacaggcatatcttgacttgtcctcaagagaaaaaataaaaggaacggtttttacccccaagcataacttcaattagaaggttaagatgcatatccagtatagcatgttgatatttatttcaacaaattcaactcaatttttggccatctaagttcttttcttgcaatttccacttctatatcaaatcaatgatctagtttttttttttttaaggaaaataactattgtaaacaaaaagaaaaagtctattaaagaatcaagaaacttgattatacattgacagtccttccattttttaataaatctagaaaaatattcatgtttacttgtaactcaatgtttgtgatcaaaaataaagcaatgtttctaatggaaccattaccaggcaagcattgacaaactgaatattttacatactgccactacagctttgtggcactaaactacaatgttttttctgaagaaatcaagtaatatttttagctttttttaaaaagacaattctatgttgtgatgctaaccagagcatcctttatttaaattctggtgaggtactgtcactatatctgtgggtaaagggtacttagtagaataataaaaaatgaaagcaagcttgaaagtctctccacgacaccagtgacaacaatagagacctgacttgaagttccacagtaactctctccctgaccttgagtgtcttcttcaccttctgcatgtctcactaaatcacataaggtgaagtacctctttaagagtattaaagacctactctgttattgcaacattaagagcataacacttaaacacattggtgaagaaagagaacatcagatgactaataagaaataggggctgggcgtggtggctcaaacttgtaatcccagcactttgggaggccgaggtaggcggatcacctgaggtcaggagttcaagaccagcctggccaacatagtgaaaccccatctttactaaaaacacaaattagccaggcttggtggcatgcacctgtaatcccagctacttgggaggctgaggcaggagaattgcttgaacccaggaggcagaggttgcagtgagcccagatcgcgccattgcactccagcctgggcaacacagcaagactccatttcaaaaaaaaaagaaagaaagaaagaaagaagaattgataatactcaaacttattcctcttgagcaaataaaaatatgtcatacttgacttaccaatatttcagaatgaaagctattgtcagtgattttttagagagactatatcaccaaactacatatcaaaactgagaaaacatatatatcttgaaaataaaataattatttaccctttgtttaaattaatttttgttagctccaaattgttttttgctacaaataatatttaaaataatttttaattattaacagtggtatgggatttttttcagctgagaaacatttatttaataggtttaaggagaagaagaagataaagttcacttggaaacctgaaaactcggaagatacaatgactcgtggaaagggatgtcagggaaaataccataaatgacagacattttagcatgctttctatcttgagtaggatctcatttattttaaaaagtgaagtgagatttggatctacaatgacagagttttccaaacgttagcaaatcttggctcatatagggaacaatgtttgcactatgctcggggataatggatgaggttgctcctagctgaagtgacagccaaaggttctgggccaccccctggcaaaactcagctgctctagcggctgagggtatcaatatattcacgcacctgtgcccattctttcaccatctgtggggaaacgttgctctccaaaataaaaaggcatgtaaatcttccaccacttctgggaaacagctccatgtacactcattcacagtattgagtcaataaaaacccagtatgtcattgcagccttcaatattccataaagctatttggggccaaagggtactataagctcagacttgcatacaaaagcaaaggatgttacctttgttttataatcataccaaaaaagaaggtatcattaatattatagctaaggtcaaaattcatatttattggttactatttagtgtatataaaaattcaactgccttatatttggacaactaaccaaaattaatctctagctataaaataaacattttctccttataattcctattttttagctagccattttgattaatgtgttagctaacatgtgtcaacattttctaaaatcatgctttcatgtagcatctaagaattaagaaatattaatatcaaaaatgccaagaggagcaaaagaatgcatgatgtaactgaatcattataataaaatggttcagcaatcaatcaccaggtattgatagtttttggggcggagggagttgtggctggagtgaggagaggttgccaggggagtggagataatcctacacaatgtcttggtcagcctgggctgctataacagaatattatagactggtggcttaaaggagagatattcatttctcaaagttctagaagctgcagagcccaagatcaaggtgctggcagatttcattactggtgagggttctcttcctggcttgcagagggctgcttcccactgtgttctcaaagggcagagaaaggaagccctggtgtctcttcctcatcctgtatgagcactagtcccatcatgggggctccacccttatggcctcatctaaacttaatgatctcccaagggccctgcctcctaaggcacactttggggattaatgtttcaacatacgaattttgggaagacacaagcattcggtttgtaccacataaaacacaccattctcgccattctatctgtgcaggcaggagccttttttacgtgaacctaagaaagtagtgtttccggccgggcgaggtggctcacgcctgtaatcccagcactttgggaggccgaggcgggtggatcacctgaggccaggagatcgagaccatcctggctaacatggtgaaagcccgtctctactaaaaatacaaaaaattagccaggcctggtggcgggcgcctgtagtctcagctactcgggaggctgaggcaggagaatggcgcgaacccaggaggcggagcttgcagtgagccgagatcgtgccactgcactccagcctgggcaagagtgcgagactctgtctcaaaaaaaagaaagaaagtagcgtttccaacagagaagacctaaagctcttccacccaataccatagccactagccacaggtggctgttgagcacttcaaatggggatagtccaaattgagataaactatgtgtaaaatacactctgtattttcagaacttagtaccaaaaaaatgtaaactagcatattatattaggccattcttgcattactataaggaaatacttgagactgagtaatttataaagaaaagagatttaattggctcacagttctgcaggctgtacagaaacatggcgccagcatctgctccgcttctgggaaggagcttttattcatgagagaaggcgaaacgggaacaggtatgtcacatagcaaatgctggagcaaggggtggggggtgccacataattttaaacaacacactattgtgagaacagcaccaagtcatgagggatccactctcatgacctaaacacctcctactaagcccaccgtcaacacgggaataayatttcaacatgagatgtgagcaaactataacacttactagtaatttttatattgatttcatattaaaattattacagtttgagttaagtgtacacactactaaaattaatttcacctatttactttttaatgtggttactagaaattaaaattacatatgtggttcaccttgtggcccacattatatttttatgggacagtgctaccagcctagagcatgaacagaatgaggtagaaaaaaaaagatgaacacataatagaaagagaagatgctctggaaacagatcaggaaagaaatatttttattaagcacatctaaaatatttattgattcctcagtgagaagaaattataaattaagaagcaccctgtgtggttggtctaacttattgagaacctgcgtcaggttctcaatctatgaggtgaatttagtcattcttaatgaaacctttatattgttacctttatcaatttctccttcaagtgtgttacagatagatggatatctctactccatggagtctgactattgcaaaagattctggtgaagaaaatgtggccacattacaactacatatttcatgtagtattgccaagggatagagagtactttaagacagatggttaaatatcccattttaaagatttccaaacatctttgaagaagagagaaatggttgttggcatctttgcccttctcaaagcattgagaactcccaggagtgcttgttaacttcccctgggcttccgggtgtgagatcccttctttccccactgattgactccacctaccatttcctccctgggcaatacccttgttcttgcacctatcattctgcctttttctgtatgttaataggtatttatttgacccttagcctttgcactcaatctattcaaatttattctgatatccaatgataaggaaagatggaactagtttgtgatttcagttttccaaatgaatttcccagatcattaygtaagctctgaatctgctatggcaaaaaamaaamaaamaaaaaaaaaaactggctttttctctgttccaatcaattgccatgtagaaaatatgattcttttttaagaagtgggtacagagaactcgtaacatgcaatactctgaaacttttgaactacctactttccactctatctgtatcccaaactatcacgactcctaacactagtcttcaactcagttctggggagatagagggtgagaagagacaggcgcacaggcaggcagacagacagaccacacaacaaaaactttgttcttcaggtaatgaagaaacactaaaatttaattttgggtaaaaatgcccataattagtatttctaaagattctcaaaaacaaacaaacaaaaaaaaaaagaaaagaaaagaaaagaaaaaaggcccaaggatctggtagataattatcactaagtatttattttaggtcagatgctactttcagggttctaagggaaccaactcatttgcattcataacaactctatgctagatagtattattatcaaagtcctctttaaaatgactgaaactgaaacccacaaagtaaaattccttttctgcagtcaggctgctagtaaataacagagctgagaccaaacccaaatattatgtctgcagagtccatgcactgccctgcctctcttaaggatgaattcaagtcaaaagattcttacttaccgcacatttttcttacaatattaatgtaccttgttatttttcttaataatttagacttttattttagattcaggtggtacatgtgcaggtttgttacaggggtacattgcgtgatgctgaaatttagggtaaaattgatcctgtcacccaggtagtgagcacagcacccaatagttagttttacaacccttgcgtccctctcttcctccctgacagtagtccccagtgtctattgctaccatctttatgtctataagtacccaatatttagctcccatttatgagtgagaatatgcagcatttagttttctgttcctacattaattcacttaggataatggcctccagtacatccattttgttgcaaaggacatgactttgttcttttttatggctacatagtattccatggtgcataggtaccacattttcattatccagtccaccgatgctgggcacctgggttgattctgtctttgctattgtggatactgctgcaacraacacacacatgcgtatgtctttttggtagaaaaatttcttttcttttggatacatatccagtaatgggattgctgggttaaatagtagttctgttttcagttctttgagaaatctctaaaccgttttccacagtggctgaactaatttacattcccacctacagtgtataagcattccctttcctccacagcctcgccaacatctgttgattttgagtctttaataaaagctgttctgactggtgtgagatggtacttcattatggttttgattttcatttctctgatgactaatgatgttgagcttattttcatatgtttctcagccacttgtatgtcttcttttgaaaagtaactgcttatgtcttttgcccactttttagtagggttatttgttttttgtttgtcaagttcttatagattctggatattagaatattttctcccattctgtaggttgtctgtttattctgttgatctttcttttgctgtgcagaagctgtctacttttatattatgaccattttgagggcaagaattgcagctataatctacacccaatgtgactttatcaactggttcatgcaacaaactcactactgagcacctaatgtgcatctggcactcttaacaggcactgggaatacaagatgagcaagaaaacctctgatattaatatccttaccactgaggtggttcattagtggaacaataatgtggcaaatgctgtcctagtggtttgaacctagtgcaaggagaacatagaggaggaaacagttagtaattctgcttagcaatattagaaaagaatgaaaacttgataatgactaaaaatacatttattttaagttttctataatasacatagaattatctacttcctatagaaaaattcccttacatgagatataaattggtatgggaaaccattaccttgaaaacatgatgcygctgaagctttcttttgtggtatatgttgctaatacatacaaatataaattacacatttatcatgcagatatacaaatatatttttcacattttayggtcatatcacatataaagttcctgctaaactatcattattttgctactgcattagaacttttaatgatatgtcttagggttagacaagtttctgacaaaagctcacctcttctctgacattacatgctgattattttttctcttaattactgagtgttattgctcttccactgatgcatttctttcccacacccatgtttatacatttctcaagataaagtgtcgtattacaaggaagccaacatctttcaaaccctgagaacattactatagtgacgtacatgggatcgtaatgatttttctggttcctctctctctttctctctctccctctctctctctttctctctctctctccacgtaatggggagttttaatttatttggaatggtaagttaccagaaagacatgacagaagaataaaaaaatgccttttagttccaaagcccagtttagtgcactcaaaccaggatattgttgatagctaacttgttttctataataaatgtacttgaatcaatttacatctttcacaaaaataaaacatcaaaacaagctttataattctataagatgttacttgacatataacagacgctgccctctgaaagaagggttcaatattggtttaactcccttgcagttttttggaagtcaattacttctaattcaatgacatcctaacggcaaaagttcaaaggcttaattatgagatctactgataaaatataattattcagtgaaatacaagtatgccattattcytttatttttaaaagaattttattaaatccaaaaatacaagaagatttttattgtgtgcttacataaacatggaaagtaaaaataaatgacaaaatcaaatgtgggtcacgaggtcaattttctcagttaataaattgtaacttaaaaaattacaaattartggtcttagtatatctaactacatgcattataagtggaacttttattttccacttgcctctgttcctttaacaggattaaaaatatattgaaagcaatgtactacaggaaaataactaaattttgagtcaaaacacaatttgatgggtayaaaatgctgaagtgtccaaggagtttatcactggactcctrtatatagaatatattctgttctacgttagaacagaaacacaagatgtgatatatttctatttcctttatgtatacaaatgatgtggtatacaagtaggcatcagcaataatggtttgaacctcattattctatcctctactaggattagcttttgctgatttgcactttagattcttcgcttccattgaaaagcaatgtaggaaattgtgttaaaaattacaattggtagaaagatgttcttgagataactaaaagcactgtatacaaactgccacaagataaatttcttacatatcttaaagtcagaaaagctttacttcccattaggagctgatatgttttattctttctaatcatgtttctctttttactttggccacctggaagcttaatgtatgactcaaattcactgcagacaattctataatctctatgtctattttatgtgttttaattaatatgaccctaaagaaatctcttaaagtttccattttctcatttataaaatattcacaagatgttgtaaaactcaaagtaaattatttatgtaacagtgttttcaaattggtttacaaatattagggcttattatcttcccaaagagagaaccactgaaatatgtatttcagtggtgctgaaggtccataaccctagtattggatatctgctgccattttggagtatcttgaaactttgagaaactatccctcctcctcccctatgttctactgtcagagctccaggggtagacacatgactagagcctcactgaaaaagcatcctacgcccccagccatagtaattacttccatatgagcacatgacctgtgctgaaacaaggaaggtcatacctaagactgctggaacaaaaaggaaactagtgctctcattttacggaaattgttcacagtaagacaatctaagtctagagctgctaagaggactttttttttttcacttcactgggaaaatatgctttagaataaaaccaaaccaacacaaaggaaagcagaattgagaaagacagagatggtattctgataaaagagtttgagtgtcttgacccaaccatgtctgaagccatctgcaatccccaaatacagcatcatatcatttatcaccacgggctctctaattcagttttaacataggcaaattcacatggaagcagaaacatacttgattatcctataatgctattttaaaatatgtccaatcagtgcagaaaatataaaagaattcatgggccaggatatttttaaaaatcagctgctaaacctgtgagcagaaactttgggattttaaagaggaaatcccttataattgcagtatgttattccaggttttcttagaggttgataagacaggataaaacatttaaggatttcattaaaagaaacccaagtgagaaaaaatagggagggaaccaggcaagactagccatttgattgaggtataagcctgaccctcagtgaaagagaaagggaagaaagtttggatggaaacttcctagactgctgtgcagtctaaggaagactcaaaaggccattcggtggcctcaagtctaaagttggtccagatatcccagaaacaggccagccttagcatctctgtcagtcagccctgggctgtaagcagcccacggaaagcatggcctgggctcaaatgcaacattggatttcagagagcagcatctgggacccttggtaatytgcactccctatagttggaaattttgcaatcacattgtcatggctgacacctatagtgagatcctatggcacacaagatacaattaaggctaaggaagcagttaaatataatatcaagtggttaatgttgagtcagaagaagaaaggaactaaatcaattttggttttctggtaattcagaaacaagagatagtgatggcttcatatgtgttcctggtgctggatgatatgggaaaagtggttataagacttagagcctgtattagtccattttcacactactataaagaaatacctggccaggtgtggtggctcatgtctaatcctagcactttgagaagtcaaggcgggaggatcacctgaggtcaggagttcaagatcagtctagccaacgtggtgaaatcccatctctactaaaaatacaaaaaattagctgggcgtggtggcacctgcctgtaattccagctactcaggaggctgaggcatgagaattgcttgaacccgggagacagaggttgcagtgagttaagattgtacaacttaccactgcactccagcctgggcaacagagagagagtctgtcacacacacacacaaaaaacaacaacaaaacctgagactgggtaatttataaaggaaagaggcttaattggctcacagttccacatggctgaagaagcctcaggaaacttacaatcatgacagaagacaaagggggagcaaggatcttcttcacaggcggcaggagagagaagtgcaagcaggggaaatgccagatgctaataaaaccatcagatctcgtgatactcactcactatcatgagaacagcatggggaaaactgcccccatgatccaattacctccctcccttgacacatggggattacaggtccctcccttgacacgtaggcattacaaccggagataagatttcggtagggacacagatctaaaccatatcagagcctttgcctaactttttaatatgaagcctgagtaatcactttttctcccccttccgatctccttgattatgtttgtttaccctcccaaggttaaacttaccattatgacatattcaataccaaaaaccaaagtaataatcatattgtcatgatgtcaggtccaaacttgcaattcttagttgtagactattgtgaactccccagattagagcctatattagctatttattttatgtctctcttgaattcctagtcaagttttaggattcaaagttcagagcctaaacaatattcttttttttttctagtgaaatgtttttcacacagtgggtgcataataactatattcatctgaatgacatgggagagaatggtacaacacttaagagaggaaaggaagagaattgatatcagtgcatgctctcaaatctcctcttacaattaaccgttcctgtgaaaattactccctaaggcttaatgcacagattataggactgttttcttgaactacagacttctattactcttcattcatgattcattgactctctctatgctaatgtacttaccaatgcctactgcttcatgccacttttagatcatccattaagagtgatgctttcttatttttatgtactgtggaggtttatcactgtttataacccttattgtggtccctttaaattcaattttaaagttgagttctggcaattcaatcctaccattttaagcacccttttgaaaataagaaaagcaaaaatatttcagaggaagattgtctgtaagcagagaggggcaaatccatagaaatcttgtctcacagcattaaaagaaattcctgagggaacagcaaccatatgccccagatgttgagagtcttggtttcgaattctatcttagtagacagtaagagttgtatagcagttagaggctcctgctttgcagacaggcagtctgattcaaacccctaggctataatacatataacataatataataattatataattgctaactcataaccttgaataaggaaatgaaatagtgatattatctacttcacagaatgatttacatagactaaatgagataatcctattatcccaggagtttggcatgagtcccaacacatactgcgcactctataggtattagcaggtagcagtagctacactcaattgcttactgtctgctatcatggtttccaaacacagagttccatgtctctgattggattagtctcctctaggcctttcttatttgaatcaatctagctggtgttcttgatttctgggtctgacataaccaattttgagctcaataatcatgataggtaagatgatctctcatattttatataattttatatagcaacagaatgtgttgttaaaactaaaggaatttactgtataatatgctataataatgagtgctgtgtaacaattggctatacacctcaaataagagttaaagacaaagtttgctgtgttctgttgaacattaatatctccagtatattctctaaagtatttgacgttagtccaaagaggtaccagtataatttgattttgaaaactcaaagtcccagaattcttatcaaccttaaaggaaccaaatacaaatttcagtgttgacacacacacataaaattgctctcaaatattcaacatactagaaagtctacacacaaatatttgggcaattaaaggtaatttttaacacatatcatatatatacaacttttagagccacagaatatgtgagcatcgtatttttcacagactcaatcactcttttttacctactcctagcaacacagtccttagctggcaaagatctagatgatcacttctagatttcctcatctgtaataagcaaagagtagaatctctgtttatagctgtcttgtgagaattgagtgagttaatgcttttagctcaatgtctagaaggaaagtgttggaatccatcatcttgttcttccaaacactacagtaactcacatatttgttgtgttttacaatttgcaggcgtctttttaactgactaaatagaagaaacaggtaagaaagaaacctgcaaccacctgagcactgtctgctatgattacacaaaggtgtaaatgattaatataagactatcacgtaagaggactgagaggacccatgagtgctagacctttcagaagaatacaggtaaaggagagacctatatatggacaataattttgctggcaacaaaaagcagagtccctcggctttcactatggcaagtttggttggataagccttccaatagcttacagcagtgctaatcaaatatggccccttgactaccttcacctgggacttgtaggaaatgcaaatcctcaaggtcctattgcagactcactgaattagaaacgctggaattgagaccagttattccgctgcaagctagagtccaagaaccactagcttatgatatagttagaaaaacagggaaatgaacaagaagatacaaccctttatgttaaatactctgtacaatagggctagtcccacaaagctactcaaatatagtggagactcattttaacccaactcagtgtaggaggtgagttagatgaatcaccaggtattagtgggaatcagtcagatgggagattaaaaaaggactgaattcaattccagttctctgcactgaacacagaacacagctctgccataaacagttatagctaactattatgccgaaatcctattaacctctataggaaaggcaccaggttcaagaggccagagagccagggccagcaaaagagacatggggcttaattaggggcttacatacagcagaaagagtccagtggtgacaggctggacaggagaaccgccttaattacagaaatggtccagtggcagcaggctggacaagacaactgcacagcccagtggtggcaggctgggcaggaaaactgcaaccacttacgacagcatgtagttaacaacacattttcatttaacaacctctccttaatgaccttcacatggcaatcttcatttactccagaactcagggcctcaatctcctgcacaacccatgttccacgggatgggatgggggctcacatgttcctcatagacaaggaatgaatctctggtatggccactcctggattctctagctcagaacacacattcaggtgcatctgccatacaaggtcattctaaggtaagcttaagttattgctaaaaggtgcatttaccctatactaatatttctttagaacttcttatttgccaggctttgtattaagtctttgacatgtgttattatgtttaacatttagaacatccttattttaaaaaaagtactattattctcccaactttgttgaaaagaagctaaggttcaggaagtaaatgttcctgagaagatgggcagaggaaatacaatcaagagaacatatggagggttcagtctcgaatggaaagagaggcatttctccatacttacaggagaaaaaaagatgagtgcagagtggggaggttcacagattttgtctaccaatgtcattcactgaatgaaaggcacggctagaatttgaatccagtcggtctgttaggagagtttatgatgtcaactacttcactgtattgtcaaattacacttagcatattgaaatatctgttcatctgtctgtcttccctattaaatgctagagctccttaatctctagatcccagtctgagcacatagtaggcactcaatgtttataaaatttgtgaatgtaaaaagataaaaataaattgtaaaaagaataaagtgatactaaagtataaatgtaataaaatataaaataattgaaagaaaacgttttttgaataaatggtgacaggaatctcatttgtatggctttttttaatgtggtgaagaatatcaattagttgtatatgtttcactgtaattttttaaaaatctggccataatttcaggcygggtgagcaaaatttattttctttttttattactattatactttaagttctagggtacatgtgcacaatgttcaggtttgttacataggtatatatgtgccatgttggtttgctgcacccatcaactcgtcatttacattaggtatttctccaatgctatccctcccacagccccccaccccccgacaagcccccgtgtgatgttccccgccctgtgtccatgtgttctcattgttcaactcccatctatgagtgagaacatgcagtgtttgcttttctgtccttgtgatagtttgcttagaatggtggtttccagcttcatccatgtccctgcaaaggacakgaactcatcattttttatggctgcatagtattccacggggtatatgtgccacattttcttaatccagtctatcactgatggacatttgggttggttccaagtctttgctattgtgaatagtgccacaataaacatacatgtgcacatgtctttatagtagcatgattaaaaatcctttgggtatatacccagtcatgagatcactgggtcaaatggtatttctagttctagatccttgaggaattgccacactatcttccacaatggttgaactaatttacacttccaccaacagtgtaaaagtgttcttatttctccacatcctctccagcacctgttgtttcttgactttttagtgattgccattctaattggcatgagatggtatctcatcgtggttttgatttgcatgtctctgatgaccagtgataatgagcattttttcatgtgtctgttggctgcataaatgtcttcttttgagaagtgtctgctcatatcgtttccccactttttgatggggttgtttgtttttttcttgtaaatttgtttaagttctttgtagattctggatattagtcctttgtcagatgggtagattgcaaaaattttctcccattctgtaggttgcctgttcaccctgatggtagtttcttttgctgtgcagaagctctttagtttaattagatcccatttgtcaattttggcttttgtttccactgcttttggtgttctagtcatgacgtctttgcccatgcctatgtcctgagtggtattgcctaggttttcttctagggtttttatggttttagttcttacatttaagtctttaatccatcttgagttaatttttgtataaggtgtaaggaagggatccagtttcagctttctacatgtggctagccagttttctcaacaccatttattaaatagggaatcctttccccatggcttgtttttgtcagatttgtcaaagatcagatggttgtagacgtgtggtgttatttctgaggcctgttctgttccattagtctatatatctgttttggtacaagtaccatgctgttttggttactgtaaccctgaattatagtttgaagtcaggtagtatgatgcctccagctttgttctttctgcttaggattgtcttggctatgcaggctctttttttggttccatatgaactttaaagtagttttttctaattctgtgaagaaagtcattggtagcttgatggggatagcattgaatctatgaattaccttgagcagtatggccattttcatgatattgattcttcctatccatgagcatggaatgttcttccacttgtttgtgtcctcttttatttcattgaacaatggtttgtagttctccttgaagaggtccttcgcatcccttgtaatttggattcctaggtattttattctctttgtagtaattgtgaatgggagttcactcatgatttggctctctgtttgcctattattggtgtataggaatgcttgtgatttttgcacattgattttgtatgctgagactttgctgaagttgcttatcagcttaaggagattttgggctcagacaatggggttttctcaatatacaattatgtcatctgaaaacagagacaatttgactttctcttttcctaattgaatacctttaatttctttctcttgcctgattgccctagccagaacttccaacactatgttgaatagcagtggtgagggaaggcatccttgtcttgtgccagttttcaaagggaatacttccagtttttgccgattcagtatggtattggctgtgggtttgtcataaatagctcttattattttgagataatttcatcaatacctagtttattgagagtttttagcatgaaaggctgttgaattttctcaaaggccttttctgcatctattgagataatcatgtggtttttgtcattggttctgtttatgtgatggatgatgtttagtgatttgcatttgttgaaccagccttgcatcccagggatgaagctgacttgatcgttgtggataagctttttgatgtgctgctggattcagtttgccagtattttattgaggatttttgcatcaatgttcatcagggatattggcctaaaattctctttttcttgttgtgtctctgccagacttttgtatcaggatgatgctggcctcataaaatgaattagggaggattccctctttttctattgattggaatagtttcagaaagaatggtaccagctcctttttgtacctctggtagaattcggctgtgaatccatctgctcctggactctttttgtttggtaggctattaattattgcatcagtttcagtacctgttattagtctattcagagattcaccttcttcctggtttagtcttgggagtgtgtatgtgtccaggaatttatccatttcttctagattttctagtttatttgtgtagaggtgtttatagtattctgtgatggtagtttgtatttctgtgggatcggtggtgatatcccctttatcattttttattgtgtctattttgattcttatctcttttcttctttattagtcttgctagtggtccattttgtagatcttttcaaaatccagctcctggattcattgatttttcggaagggtttttttgtatctccatatccttcagctctgctctgatcttagttatttcttgccttctgctagcttttcaatgcgtttgctcttgcttctctagttcttttaattgtgatgttagggtgtcaattttagatctttcctgctttcttttgtgggcatttagtgctataaatttctctctacacactgctttaaatgtgtcccagagattctggtacattgagtctttgttcttattggtttcaaagaacatctttatttctgccttaattttgttgtttacccagtagtgaatcaggagcaggttgttcagtttccatgtagttgtgtggttttgagtgagtttcttaatcccgaattctaatttgattgcactgtggtgtgagagacttctttgttgtgatttctgttcttttgcatttgctgaggagtgctttacttccaactatgtggtcaattacagaataagtgcaatgtggtgctgagaagaatgtatactctgttgatttggggtggagagttgtgtagatgtctattaagtcagcttggtccagagctgagttcaagtcctggatagccttgttaacattctgtctcattgatctgtctaatattgacagtggagtgttaaagtctcccattattattgtgtgggagtctaagtctctttgtaggtctctaaggacttgctttatgaatctgggctcctgtattggtgcatatatatttaggatagttagctcttcttgttgaatttattcctttaccattatgtaatggccttctttgtctcttttgatctttgttggtttaaagtctgttttatcagagactaggattgcaacccccacttttatttgctttccatttgcttggtagattttcctccatccctttatttggagtctatgtgcgtcttcgcctgtgagatggctctcttaaacacagcacactgatgggtcttgactctttatccagtttgccagtctgtgtcttttaattggagtatttagcccatttacatttaaggttaatattgttatatttgaatttgrtcctgtcattatgatgttagctggttattttgtccattaattgatgcagtttcttcatagcattgatggtctttgcaatttggcatgtttttgcagtggctagtaccggttgtccctttccatgtttagtactttcttcaggagttcttgtaaggcaggcctggtggtgacaaaatctctcagcatttgcttatctgtaaaggattttatttctccttcacttatgaagcttagtttggctggatatgagattctgggttgaaaattctttcctttaagaatgttgaatattggcccccactctcttctggcttgtagggtttctgctgagagatctgctgttagtctgatggacttccctttgtgggtaaccctacttttctctctggctgccctttacattttttccttcatttcaacgttggtgaatctgatgattatgtgtcttggggttgctcttctcaaggaacatctttgtggtgttctccgtatttcctgaatttgaatgttggcctgccttgctaggttagtgaagttctcctggataatatcctgaagagtgttttctaacttggttccattctccctgtcactttctggtacaccaatcaaacgtagatttagtcttttcacatagtcccatatttcttggaggctttcttcgtttcttttcattcttttttctctaatcttgtcttctcactttatttcatttatttgatcttaaatcactgatatcctttcttccacttgatcaaattggctattgaagcttgtgcatgtgtcacaaagttctcgtgctgtggttttcaactccatcgggtcatttaaggtcttctctacactgtttattctagttagtcattcatctaacctttcttcaaggtttttagcttccttgcgatgggttagaacatgctcctttagcttggagaagtttgttattaccgaccttctgaagtctacttctgtaaactcatcaaagttattctccgtcaagtttygttcccttgctggmaaggagctgcaatcctttggaggagaagaggcgctccggtttttggcattttcagcttttctgctctagtttytccctgtgtttgtggttttatctacttttggtctttgatgttggtgacctacagatggggttttggtgtagatgtcctttttgttgatgttgatgctattcctttctgtttgtgagttttccttctaacagtcaggcccctcagctgcaggtctgttggagtttgctggaggtccactccagacgctgtttgcctgagtatcaccagcagagactgcagaacagcaaatattgctgcctgatccttcctctggaatcttcatcccagaggggcacccacctgtatgacgtgtctgtcggcccctactgggaggtttctcctagtcaggctacacaggggccagggacccgcttgaggaggcagtctgtccaatcttggtgcttgaacgccatgctgggagaaccattgctctcttcagagctgtcagacagggacatttaagtctgcagaaatttctgctgccttttgttctgctatgccctgcccccagaggtggaatctagagagacagtagtccttgctgagctgtggtgggctctgcccagttcaagcttccyggctgctttgtttacactgtgagctattcaagcctcagcaatggcagacacccctccccctgtcaagctgcagcattgcaggttgacctcagactgctgcgctagcagtgagcaagcctccatgtgcatgggacccgccgagccaggcatgggactgtatctcctggtccgccagtcactaagactgtgggaaaagcacagtatttggtcaggagtgtaccatttctccaggtacagtctgtcatggcttcccttggctagaaaagggaaatcccccaaccccttgtgcttcctaggtgaggcaatgccctgccctgcttcagcttgccctccatgggtggcacccactgtccaaccagtcccagtgagatgaaccaggtaccccagttggaaatgcagaaatcactcatcttctgtgtcaatctcactgggagctgaagaccggagctgttcctattcggccaccttataagcgaccccrcataatttattttcaaataatcccttttgcttttgttttggttcaggtcccctaaaaacagtatttatgaatacaattgaatattttggtaatcatcctaacaaccattctacccctcatccatgatatcctaacaaccattctacccctcatccatgatatcctaataaacattctacccctcatccatgatataacawccatgtggttctagaacagctggctttacccccagctccaggaatggagtacataacctcagctaagccaatcattgcatttcgccctttgagcactattcatggctcattggggcacgtgtgatctagtctagtcaaacagaaaatctcaggccttacgctagaaattcctggcacaccaatctctacttttcaaaagtgtgtgatagctagaattgttaccactttattaccataaagagagtcagcagtagaagaagtagacacacagagtagtgtacagccaaaataattgcaggatgacttcatatattgatcaaattatgcctgaagtctacattgctgctgaacttctcagttttgtaaataaatttcctgttcctattatttggccagtctgtgctagtttcttcctgtgatgcaagctaatacttcctaactgatctagtggaacttaaatagaccccagatatcttttgcttttaagttttggttcaggtcccctaaaaaggatatttatgaatacaattgggtattttggcaatcatcctaacaaccattctacccttcatccatgatataatatccatgtggttctagaacagctgggggtaaaccagctgtttactaggctaagccagtcattgcattccaccctctgagcactattaagggcttgctggtgataacaacatagggatacactgtctctacaacaaataaaaaaattagccaggtgttgtggcatattcctgtacccccagctactcaggggagaccgaggtgaaaggattgcttgaccctggaggtcgaggctgcagtgagctatgatcgtaccactgcactccagaccaggcaacagaccaagattctgtcaaaaaaaaaaaaaaaaaaaacttccattacggcattttatctgtcaaatgccttgtatactcatcatgtggtgtttgaaaagatcctgtgctctgtgatcatgccaattcaggactagaaactttgctagcaacagcccattcccgatccatattgtcagtgataccagaaaactaaagaggcatagaaacgtcagcttaactttcaatgttttttgcctcgtgacttcagaattataattcttttaagggcaaatagagttctcctatgaaaaactgtaaggcagcattattacacaatagagcttttgataacttaggaaaaacgggtattgtgaatctctgatgctttgttctcttcaataaagaactactacaatcaataggaaataggtagcaagcaggcattttacttgggttaaagtactcctgctacaatctggtaagaaaagctacagatttgataccattacagagtcagttctttttcccactacaaaatatagttgatatctggaattagctagcccaaatggctcaaaatcatttaatggtgaccatatattttctctcatattctcacaaaaacattcaggagaccaagaagagtgctaaaaattcaaaataatcttgaaaactaaactggaggataacctaatgtcagaatcttataggaacttacaatagttatagagtagaatggaactccagagcgaactatgtacctaaattgcatcttatagcagtatagtatggtggtccagaatatgccttccagattagacaaagttggatttaagttttatcatcatctagctggatgatcttggtaaaataaaatctgtttctcttctgtaaaatgtgaataataagagtaccactgttataaattgaattgtgtcttcccaaaatgcatacgttgaagccctaaagtcccagtatgactgctttaggagatggggcctctacagaggtaattaatgttaaataaggtcataagggcaggaccttaatttaataggactgatgtccttataataagaggagataccaagtattcacatgcacaaggaaaacaccatgtgaggacacagcaagaaggcaggcatctgcaagccaaggagagacgactcaccagataccaacccttggatttccagcctccagaactgtgagaaatacatttctgttgtataagctccccgactctggtattttgctatggcagcctgagcagactgacacaagaaccctcatgargtgttgtcaaaactgaatgcattaatgcgtctagggcctgggatgaggtaaatcctcaatgattgtgttcctgttattgttattagttcataaacacagatcttgtggaaaaggatggaaggatacttcctatatctctcatctgtcccagaattccttttaggggattagccagggaggattaatctcctgctactgatgacaaggactgagttggggcatattttaagaggagcaagacctggtacatgaagctacctcagtgtgcaccttcctcatttgaattgcatccttggctttcctacatatgccacagatgtaggagcccagaagcagcaaaatcttgctccagagggagttccaaaataaattcaccaccagacacattcttcttaagaaataaattccctactgctagaaatatccagccctggaaccaaaaggaagatacatggaacactgggaccatgtgtggaatcattgctttccccccaccatctcaagagcctctctcttaagaacctgctgctggaattgtcacataggtgggttatatgtgggatgaactgtgctacctacactgcccacccactcccctcctcttcaatactctaagagaacacctgcattatctgcttttgttaacatgtacacatataaataagtacataaatacatcaaaatttaaacaatggttacctggtactcatagaattagtaaagcttcttttttcaattttctttctcttttatacatttatatttgttaattttgtacaatgaaagtgtgctatttgcataattttttaagttattttaaaagtggaatttaaaagttctagagatttctattaaaaattcatattccccttaaaaataaagcccaatatcaattatttgaatacctaagtatggctcagtttttttattgatattgtttatttacatttaattgttttttaagttgctttgattctccttggcagtttgtgtgtgtgcatgtaatttttaaaacctatattttttcattgccacaaatatagaccattttccaaatgtattactttcttaattttcctgcctataattcaaaataattatttaacatgttaaaagctatagtccaaggtctagttaattcagcagaattcatttaactacagaaactgcattctaatggagttgcacaagactggtttgaggagttatgtttaatatccacatacagatgatttctgagattacttaaacaaatctagagatcctctgagaacttactcatatttaaacaaatctagagatcctctgagaacctactcacactttacaagatcccactggatttctatcatgctcaaggcagttcctgctgccccacctagagggtcttactgacctttcccaaattcctcttctctcctttgaagactctctcctttaatagctatattgtagccattcaaaaagtagacaggagaattttagaaaaaatacatgaaatagcttttccaaaatttggcctgaaatgtagaaatttttctgttacaaagctatccctttgtttcagacggccttcttagcacctgaactaacccttttctctgaagagactacagcctatgtcagtaaaccatcaggccccaaaaaacacagcagcacctgcgtctgctacaaataaacaaaccactaactccctctagtacagtaatctacacccagtacacactcggtaaatgtcactggagattactagtacgaacattaaaggcacacagtagtcaataaacacttgttgaataacttgatttaacagcatattgagagcatgtacctaagaaaaaacaaatgaggtttttttttaacctggagagttatttcctctatgtgtgtgtttgctatttctaaatcaccatcaaaaatgttgtgtcctctttaaacccatgttttctaaacttgtgtactttttttccagtgccacagaagtgttccatttttatgcatcaactagagagattaaaattaaaagttcattaaagatttatggcaaaatcatttgtacgaaatgcaccaaagcaataacttcagattcatcaagaagatctaataaattataagctaaaattagcaactgcaaactactcaaaccatgttactataaaatgttcctcctccttttgtttttaacagtcttccctaaaggcttgatcaattcagcttacttaatcacaaaactgtaacgacagaatatttgcaagacctattcaagaagtcttcacaaatatgaaaatctctctccttcattacgtgaaaaagacacttgcacatgcatgtttatagcagcacagttcacaattgcaaaaatatggaaccagcctaaatgcccatcagccaacaagtggataaagaaaatgtagtatacattcaccatggaatactactcagccataaaaaggaataaaataatggcatgtgcagcaacctggatggagttggagaccactattctaagtgaagtaactcaggaatggaaacccaaatatcatatgggagctaagctatgaggatgcaaagggataagaacggtataatgaaccttggggacttaaaagggaaggatgggaagggatgagggataaaagactacacattggctacagtgtacactgctcgggtgcaacaaaatctcagaaatcaccactaragaacttattcatgtaaccaaaaaccatctgtcctccaaaaactattgaaataaaataaatgttttttaaaaactctctttactggctttaaagaacagctgtggctataaaaatgtgtcattttctaaatgaaaaaatatttccttatcatatctctacgtgtttttatcaattgtattggttttgctttccttcttcttttgagggtagtaaaataattaaagcattcattttgtaaattaaatgccatatataaaatattaccttgcatacatatctaacaatttatctctatggcatgatgtgtatatacatttatgtacacaaaaattacatacataacaacttatgcagcattatcttacctaattacactgtaggactcaaatcaaatggactatactgagggacttgtactttaaatcagctcatttcaataaaatttaatgtactcataagtagtaaaattaagttgcttcatcacttggtatttagtttttgtatgtacttgacttgaatttcaaattcaccaatatcgatgaatgatttttttaatgaaaatgaaataatgttttataagagaatgttcactgacattagagaaaaatccataaagtttcaaatcacctctcagtgtgccattttctggtctattttctcttatattccctcctaggaatctttcttattcagtggcaccagctaatatccatgacagtaaattagagtataattctccaagtggcatttgaatttttgaagaaaatattgaaaataaaagaagtaagaacgcaaggaagaacttgcaactatatcttagtcatcattgtagctcctgtatctcctaacattttgttctcaaaatagatacattcactcatttgttcaatcgctaaaatcctgaatgtcagtgaatatgtgccaagtgctacaccatccactgagataaatgaaaaataagaccattatttctcctaaagacctgagaggctaccaaaggatacaggtcataaaaggcaattctaataaatatgtgataaatgtttgtcaaggagctgcatatcacttgagaggtagtaagttaggtagatttgaggaacaagttgactgttgtggtcacctgcattactcacatgtaagcccacttctcaaaccctagtctattttcctaagtattggaatacaatgcttaccacattatatcttactcagaaatgaaccaagtgcagatctaaatatttattttgtattattgaggaacaagttcctgttgttagaacttttatattagccataggtacttctattgagggccctgtcagtatctcacaagtccaaggaataacggtaacccaatggactaatgaaaaactaaattcagataattgcctttaaaaactcaatttttggctgggcatggaggctcacacctgtaatcccagcattttgggaggctgaggcgagtgtatcacttgagctcaagagtttgagacaagcctgtgcagtgtggcaagacaccaactctacaaaaaatacaaaatattacccaggcatggtagcatacatctgtagtcccagctactcagggggctgaggtgggaggatctcttgagcctggaaggtcaaggctgcagtgagtcgagatcaygccactgcattccagtctgggtgacaaagtgagaccctgtcaaaaaaagttaagggctaggtacagtggctcacgcctgtaatcccagcactttgggaggccraggctggtggatcatttgaggtcaggagtatgagaccagcctggccaacaaggggaaaccccatctctactaaaaatacaaaaattagctgggcatggtggcaggtacctataatcccaactgcttgggaggctgaggcaggagaatcgcttgaacccgggaggcagaggttgcagtgagccgagagcatgccactgcactccagcctgggtgacatagtgagactccacctcagaaagaaaaaaaaaaaatttacatatacaaagtctacttttgaatgacataatcgtgtgtgtgtgcatgtgtttacttaaaatgaacaataggagtctcaatcttgtgggtcatttccccaagttctatcgttctttttgcttgtttgtttgtttcttggtacactgactgacaacaatacctaccacttgattatattgctttggattagtgggcactgtgcagctattcacatttaatttcttatgcctaataacaataaattataaattctctaaaaaataagtaaataagtaaaagccacttggaagcaaagacagccatatatccctgtttgttgagacggttgattttacacatatttagcagagtttctagcagcgcccccttgcacactcacaagtgtcttagtgaggatgataaactgtagagtcatcctcttcatagaggaggtagcatctgagcttgtatctaaaaaagaaagtaggaatttgccagctcgagaatgggtggctcagggaagaaggaggctgctccaggcacagggaatacaaagcacaaaggcaaggaaatagagtgcggtgcagtaaggaagaacctgggcgctggagcagaatggctgtgggcagatctcagcctaccactaactagctgcaaatatgttctataacacagccagagtgagtttttaaaagcataagtaggatcgtgccgctcctctgatgaaatcccatgggtggcttcccattgctcttaaaataaagcctgaattccttaccatgatttacaaggccctaagaaatctggtttttgttcccatcaggtgccaccactgtcaccaccaccaccaccccatgctcactgtactccagcctcactcctttgccgccagtctcaaggcctttcacgtgatttcccaaataccaattcctcagagaggtacatttctgcctaaagtggcccttctcactagttagccccactgtattatctatggcattacctgtctatttccctcataacttcctcccatcagttaactattttttttacattatttgagtgtttattggtcatctgtctctgacattagaatgtcagcacttaagggcaaggcctcacctgtcaagtttacagctatgttgcccctatcgacaagtaatctacaatatacaggcgttttaactgaatggatggatgaatgaatgaatgaagtgttagggaccagacttaatgtattataccttaagagtacttgcatttttaaggaagataaaaagagaaggcaatgcctaacatgtgggaatgactcattaatgttaaattagcaggcacaggtgacaaagagggatgtgctttggggtggcagtatctttcttgcaccttcattccattatgccaacaaaacaagaagaaatgacaacatactgtatccgcttcctgctgtgcctatgagaataatataggaaatcagaatggcttctttattgtttgtgaataacccacaattttaatccttacatagattaacatcattggcacgcctggtaagccaacaaggacataattatctttagtgtactagaaggtaggatatttaacacactctccaaagtaagtttcaaaacagaccggcaggcatagaaacaaaaaggtgaaaagtattaagggtatatgacacacaggagggtatgtggaactcaactgggagtgctatcgaaatgagaacagcctgttaagataacgaaaagtggaaaatcgtagcaaacaggaattatattwggaagcaaaacacattaaggagagcacaagattttttttaatgaattttaattctttctccagtctttgttgttatttgctaatggactttatgatggttgaaaggtaaagtttattttctcattagctttattattttccactggcagacattaattctctcctttcctgaaccctcacttcatgcaactaaaatgagcatggtagttatattccctttatgatatttacatatacattagcatcacaatgcagtcaaaataccttagggtacaacatatattacctggagaagcaattatggagacaaaaggcattctgagatagcagcattctaagaattttcctcattattatcatataaacatttctatgaaaaaaattcaggtgaaactaggtagaagaaaataatttaaatagccaaattccaatggccttcccattcttaaaatgctggcacatcaatacaaacatcagtaaattatgactctctgttatatgcataataccatgtttaggctctgaggacacaaagaatttagtaataacaaataaggaataaataagacattaaaccagctaatgtatgtaaagtactcagcatttaataaaactaaacaaatggtggcagtggctgttacaaattctgtggttgtccttaatggctatggcagttagctggtaagttacagaagaaagtgtagacaggttttaatgtggcctaggaaatctggaggccttatacttgcaaagaaaactgagggggttattttttgtgaaggggcattaatataggaatagcatgagaatggtgtgagacttcacctattgtgtgttatgagtactaagtagcctggtttccctggaatgagggctgcatataagtaattagtgggatatatataywtatatatatatatatatatatatatgtttaggaggcttccattgccaggcaaatgatttttatctcatggataaaagagagtcaatgtaattttgaacagggaataggcatagataaagaaagtgttttaaggaaagtaacctaaaagttactacaagatatagagtaaaggtaaagatttgagatccaaaaaccaattaggagattattataatattcatatgtagaagaagtgcctgtaagagatcattccatttataaggctgaagatgcattataaaaatatctaaggtgttttagtccatgggctattaaataatatgtatggtgatgttctgacagctcatggaattccaccaactttgcttcccacactccagttcagaccgacttcttcaagtctttttttttcaaatctttttttaatttttattgtttttatttattttgagacagagtctcgctctgttgcccagtggcgcaatctcgaacactgcaacctccacctcccaggttcaagcgattctcctgtctcagcttcccaagtagctgggattacaggcacctgccaccacgctcagataatttttgtatttttagtagagacagggttttaccacgttggccaggctggtcttgaactcctgacctcaagtgatctgctcccctcgcctcccaaagtgttgggagattacggacatgagccaccgtacctggccaacttcttcaagtcttatgtccctgtttccaccaatttgactcaacttaggttctcacactctgcctagtctgtttgtgaaggagtcatagttaggctggctgcctgctctcaatttgggcttcaccctgggaatctccctcttgaatcatgcatggtctccttcacaagcccaccctcccctcatgtctaggaaatcatgaggggtagcatgatcatgagggtagcataatcatgagggaaatcatgagggtagcataggtccagggctttggactcctgctaatctgaaaagatgaatcagaaaagaagaattgtgactaatttgatatgaagacaaacaagagagaaaagctaaagctgactccagtaattcaagcataattgaccataagaaatatgtccagctggcagatagagatagggaaataaatctcagaggaaaatgtcatggccagggtggatttgaggagcatctcagtgaactgcctaaggaaagaccattgtgaagaaacagcagaatgtcaaggaccaaattccgtgttcaaggtcaagaggaagaagtataaccagcaaggagatagaggagtgacagaggcagaaaggcttttagagtcttgaaagtcaagcaaagaaagaatcaacatgtggagggactgacaacagagaaggcattggaagaataaggacttacaaaacctgtttttctcctaacggagtttaatttcacaaaacagttcttgttggtttaacagtatatattacagtggtggtcttaaagcaaaaagaatagtagtamcaacattatttctaatcataaaatgtatctctactagaagctacatgtatttgtttagccattttacaaagtttgaaaacatataaaagatatgacatgtatatattatataaaatgactccaggtaattttctatttttctgtattaaaaaaaaactttaggctttaatattttcactagactactacaaacacacctgttttgttttgtttgtttggagatttcagtttttctaagaccttctttaaaccatccaattgtatgacttaagcagtttgcttagcctatggattctcttctccatttgaactcgtttattccacagcaatgtcacaaatgtcacagagagctatattttaaatatatgtcacaaataaattaagatccttaatttatttaaggatcgggcgcagtgattcacgcctgtaatcccaacactttgggaggccaaggcaggcggatcacatgaggccaggagttcgagagcagcctgggcaaaaaggtgaccctgtctctactaaaaatacaaaaattagctgggcatggtggcacatgcctgtaatcccagctactcaggaggctgaggcaggagaatcattcaaacctgggaggcagaggtcgcagtgagccgagattgagccactgtactccagcctgggcgacagagagagactctgtctcaaaaagaaaagatccttttctgtgattcagtctacactaagctatgctaaggattctctcattcaaatgtttgtttcaaaaagtctctgtatttatttcctttttagtattttggcctctcgctgtttcatctgaagaaactaattaattatggatatttattttgcttacattatttcactttacagtatgctatattactgtgaagtatgcaaatgtaatgtttactgaatacaacgctaaaattttccttttctttaaatgttatttttattataatctttaagatgcttatgttcgagataattggtctgccactatggattggatgcttaaatccttttcagaataaaaatgcaagcagattgtgaactttaccctaacatgcaaattcccaactaagatgctgttttctacttgaagtaaatgaaacattttattactgggtgatcagaaaatctggccttttcaagttttcagccaggggctagagaagtacatctcctctgaaaaaattttagaggaatggtgggagacaaaataaatttgcatttagattccgtcctaaaagttgtgttggttcaacccaccagttccacaagttgggaaaatgttacatactgcagcacccttttagggaactcataaagtacctgaaaaacacatcaggaaagttgcatgctaaatatctttaatcctgtatatcccaaacttattcgagcatggatccctttctgttcctacgtcctggaatcggatagctcttgtgcaagtcattttacctagtttagcctgaatttgcccatctttaaaatagaaataatactagtacctacctcatatttcatttgaaagaataaagtggtttaatgaatgtaaagtatttagcacataaaaagtattctataaatgctagggaaggaaaaatcatctgcagaaagtcagtgcctaattttttatcttttcgactctatcactttttttgaaaaaaaaaattaaagctatggccgggcgcagtgactcacgcctgtaatcccagcactttgagaggctgaggcgggcagatcacgaggtcaagagatcgagaccatcctggttaacgcggtgaaacccgtctctactaaaaatacaaaaaaattagccgggtgtggtggcatgtgcctgtaattccagctactcaggaggctgaggcaggagaatggcgtgaacccgggaggcagagcttgcagtgagccgagatcgcgccactgcactccagcctgggcgacagagcaagattctgtctcaaaaaaaaaaaaaaaaaaaaaattaaagctgcattaattgatcaaatatggtttccaagtcaatgcagattatctatgtcactctctcaacgatgcaacgttcacctttggtagctaaccaaagacgagtctagtggcctcctactctcctctgactaccatagtttccccattgaaaccccactcatatctccctcaatcaaaaggatgcgtttcttgtcttcatcagattcttccttccttctttgtctcatttatctctgaatccataggacctaagttctatcccacatcaggtgcccaatgaatgtttaaggaaagcagaaaggaaaaagaaaaggaaaagatggaagaggaagaggattaaaatgtttcatttcaagacatgacagattacatagcattctctaacttatattgacaggttaaaagagttggactaacttctataaacaaatttctcatttcatctctcttcttcaaatatgttaaaatttttatactttatttctgttctttagtgagtgacctaaaatacaaaatgtatagctatcttaatatcagaagatataatttttccctcctctcaattattataaagacttcaaatactttaattcgggccacaccttctcatcttgaaaactactgttttctggtattttaacttacctggatctttttttagctctgtcaaaagacaaaattacaataaaaatctagctggcttttattttgacttctagtatcagcaacaccttattctgtaaagtagaatgagtgctccattgagctcagcagatgaggttgactttatgggcagaaaaagggctgaagaaagcagaagcagagaacaaaaagcagattggtgttttcaaagttactttttttttttttttgagacaaggtctttttgctctgtcgcccaggctggagcagcaaagtggtacaataacggctcactgcagcctcaacctctcaggctaaaatgatcctcccacctaagcttctccagtagctgggaccacagatgcatgccaccatgcctggctaatttttgtattttttgtttttgtattttttgtggagacaaggtttcaccatgttgcccagactggttttgaacccctgtgctcaaacaatcctcccactttggcctcccaaactgctgggattacatgcatgagccatcatacctggccgtcaaagttactttctttatatagggttaaaacagaggggactttcctgttatgctgactcaggttgactagaatcttctgttttgggaaaactaagatggatagatagatagatagatagacagatagacagatagatagacaacttttctcattttttgactgacaattatgacttgtccctctgccttgagaaaagtgctatgttttttcaaaaatagaaatggtatatttatcagagtccttccacaatgtaaggctaaggaattacattcttattaacatttcacaatttctttttttaacacaaattctcctcacccacaaggcatattcacagtaagcagaatacagcccaatacttgaatttatgtactaaatgataaggaaatagctgtacatcatcattatctccaaatagactgaggatcctttttcatctttcaagatgcaaatttcatcatcctattgaatttattctctgcataaaacattagcatttaccaaggttcttgcggggtttttctgtttttgtttttagcataggaggacttctgaagaatcgctatatgtgaataataatattatcattgaacaaggttttaaaaaccacattactcatttttggtatattatcaatatttttctttctttctttcttttttggaagattatctgggcctgccgcttgcttcctcagcacaattgaacacataattactatgtaaatttaggtttccacatgcttccaggggaacatagaccatttggtatcggagatttcgaagccttaatcatttggaatatggtacattcgacttaatctgtaaaatgaagataattcttatctgccttgcagaattttataaggattaattacttaattttggttaagcaatttgaacatgaaaaacattacataaatgaaggcaagtcctaatattattaaaaaagattactgagcagagaagcacagagatatcttttctgtttattattctgttattatcatatataattagatcattatctaataattgtttagattacaaaatataaaacaggcagggcacaatggctcatgcctgtaatcccaacatttgggaggccaaggtaggaggattccttgaggccaggagttcaaaaccagcctgagcaacataaagaaaccccacctctacaaaaaataaaaaaattacctaggcatggtggtgcatacctgtagtcccagccattgggaaggctgaggcaggaggatcactcaagcacaggagtttctggctgcaatgagctatgataatgccactgcactccatccagcctgggtgacagaactagatcctgtctctgtttaaaaaaaaaaaaaaggtaaaacacataactttttttttcagtacctgatactcacatatgtgttttcctttcttcacaaaaatatcattgagtataccattaccattaaaatctgtgattctctaatactgtaatattaacttatttcataaaatattgtgatatggctcagaccattgaagttatttttggttgggagagtatcgataagaaatggcaagtctcttttaagaattatttgctttaagttaaaaagtcaggtatatatagatatacctttaaaatcaagtcccatgaccaatgatgaaagaatgcactccattttcattaaggatttaaagatgccctactacgtacccatgtagattcctggtcatatgaaagaatactcaagaataattattgattgaaaatccaacattctataagaagagaaggaagaataaaacaaacataaaactggtccatgttattaaatgtatcaatggttttcattttctacagcataaagtatgaattcattggcacggtactaaagtctttgtctaccgcccaactctcaagtctttttctttccttcaaccaatatattttaaacaattatttaccaagtatccattgtgtgtttggccctttggtaggtgctagaaatacaaaaggagagagagagaattcctgacagcgcaaagtttagacattggcaggagataccgatatttaaataaacgagtagttatataccatagagttgggtcaagagctatgaaggctattayaggattgcaagaaaggcatataatctaaggagtacaaaaattgtctctacaaaagcgccatttaagctaagacctaaagaacaaaaaattgtccagtcaaaattataggtgaatgaagaggtgtggcagtacatgtgaaggccctgagaggaaaggggactggcacattagaggaaaagggaaaaaacgtcacgatacagaaagtggctgcaaacgaggctacagaggtagatggggcgccagatcagagaagtcttgtaagtcaatataggaccttaccctgagaacaacggaaaaaccattgaaatatttgaggcagttgtgtgaaatattcgtatgcttttcaaaaattattctggctgtttatatggggaaaaaactgacagaaacaggaataaaagccaggctattattataagaaggctattgcaatggcttaggctagaaaagatggtagaaaagaaggaaaggagcaagaaagagaaggagagagagaggaagagaggaaaggaggaagaaaagagaaagaaaagaaaaaagaaaaggaagataaccttttaacagtttcaagtcaaatgacaattaagaaaaaatattttacactcataccaggcaaagagctaattccaataatatataaagaacttctatacatcaataagactaacaaatcaatttttaaaatgggaacaaataaacagtttaataaaaaggatatataaacgttataaacatgaaaagatattcatgacaagagaattaaacattaaaatgactgatatttttcacttaaaatattgacaacattgagggtccaagtgaatgccagtttggcagtttagacaagtgtcatctgacaaaacagaatttctacaaaatattttatattatattcatggaaattcacattgtattctcccataaaatacatacaaaatcctaaatatagaaatagtatttaatttggcttaacccagtgttgcaggtatcaactaaattagaaagaggagctttactccttgttaaagtttgcagccagcagagtggccattctgacaggctggtcagcgtagcctttggtcagaagctagaaacaagcacttcaagggaggagtaaaggaaacaggaatttatgctgagcaggatggccaaatatacatatttactaagctataggaagagtcgtgttatgaaaagagaaacatgtgcattcgcattgagcttcatgcctctccatgggacccgtgtttaaaaaaatggcaatattagcatgatccgagggtggagttttcagccctatgatgtcaaaaggtgaagcagaggacatgaaaactctctctgtgtatcctccttacactgcccagaaccacttcatggacagcggtcttttattaggaaggaatgctggtcagatgttttgttgaaatccaaaaggagaggcagcatcaggcagtgggttgatgtcaatggcagagtctttttaaaaagctgatttctgtgtagcccctagagaagaaagcctaatggtggttagctagccaggagggtctaatgagatgggtccaacctcccatcccattttcactgggaactcagttttcaaggtttttctggggtcccctgggccaagaagaggcccattcagtcagttgggggcataagaattgttttttgcttgtttgtttgttttgttttgttttgtttggagatggaatcttgccctgtcactgaggctggagtgcagtggtgtaatctccactcactgcaacctccatctcctgggttcaagtgattctggtgcctcagccttcccagtagctgggactacaggtgcacaccaggacgcccagctaattttatttttgtatttttggtagagactgggtttcaccaygttggctacgttggtctcaaacaccagacctcaggtgatctgcctgcctcggcctcccaaagtcctgggattacaggcatgagctaccatgcccagccaggatttcatttttgtttctcacaaattgggtcttcagaaaacagactctaagatggagatttccatgcaggaacttcattagggagtggcctaagggctggatccaatgataggacttgttacagaactgcactcactacttgtagtgggaatgagaggagcccaaaacaacaaagccaggtggtggcaatcaatcctcagtggcaagataggcacagttaccataatgggcaacaagggcagatggcttgactcacagggatcaatggagatggcaaacaaagcataaagttcttctgggaaagagaaataggcagccaacaagaataatccttaatttgcataaccaaaggccatctagccagctcatacctgtgggagggaggaagtagaacaaagggtaaaagctgaagataatgagtactaattatggtctcaggatcaactgtagcaacaggggctgtagtttgtcccactaaccctcctcttgtagatttttccagaaattgtaaccagccagaattctggagaaaccacacttgtacagagggaggttaatatgagaagcaagtggatttcagcagtgcaaggagcaagctgcatcaggcactgttgatgccccctacctacatccctttactccattgatgcccacatttgccccctttcttttggtaattgcccttggacaacaggagctgcctccccaacccccatgctgcaggccccactctgaggttttaggccctccaggacccccagctggagccaacctgcagctaataccaaaatacaaaaggttggactcctttcctgaaggcatgatcaactttttggtgcaattaatactctagaactccctgtggaattatcctgaaactagatttcaactgagatcacattcttgcttaacttttttcctccctcctatgtgtggtccaggatcaaaatattatcacagtctgggccttcttcttttttttttttttttttttttttgkcttatagagatggagtctcaccatgttgcccaggctggtctcaaactcctgggctcaagtgatcctcccacctcagcctcccaagctgctgggaatacaggcatgaactatcgcacccagcctaggccttctttaaaaactgctggaccacgactaggccgagctgtgcccagtccaaggctctagttcaagggagcattgaaggaggaaggttgacccttcaagtcatctaaattagtgtttttcagctgaacctcatgacacatgaatgagccatgaaatcaatttagggagctaccactcccatttcttaaacaaaatgtaacaaattacaatagaatagaaactctccacacgtatcacatggagaaaagcgttttttccattgaaactttatttccactatatatatgcaagttgatgtgtatgtatgtgactcagaatatagagtcatgatgtaaaatatatatttgacattgagttgtagtcaataaactttaacgccatgaatctaaacagaaaagaaatggtgacaaaggtaccaagaacatgcagtggggaaaggacagtcttttcaatagacgatactgggaaaactggagaactatatgcagaaaaatgaaactagaccccctatcatgcaccattggtctgggcaaagagtttttgtataagacctagaaagcatgagcaaccaaagtaaaaatggacaaatgggatcacattaagctaaaaagcttctgcacagcaaaggaaacaatcaagtgaagagacaacccacagaatgggagaaaacatttgcaaactatccatctgacaagggattaataacaagaatatgtacagaactcaaacaactctgtagcataaaaacaaataaccaatttaaacatgtgccaaagatctgaacagacatttctcaaaagaaggtatacaaatggccaacaggtatataaaaaacctgctcaacgtaagtaaccatcaaagaaatacaaatcaaaaccacaatgaaatgtcatctcacaccagttaaaaggcttgtatcaaaaggacaggcaataacagttgctggcaaggatgtggagaaaggggaaacctcgtacgctgttgatgagaatgtaaattagtacagccactatggaggacagtaggaaggttcctcaaaaaacaaaaaatagaactaccatatgatgcagcggtcccattgctgggtatgtagccaaaagaaaggcaatcagtgtattgaagagacatctgtactcctacgattattgcagcactattcacaataaccaaacatgggatcaacctgtgtctgtcaatgaatgagtggataaataaaatatgatctatatacacaatggaatattgctcagacataaagaagaatgatatctgatcatttgcagcaacatggacgaaactggaggtcattacattaagtgaaataagccaaccacagaaagacaaatatcacattcatatgcgggatcttaaaaagtgaatctcatgaagatagagagtagattggtgcttaccagaggccaggaaggggccaggggatgaaagggaaaaaaagaatataaaggtagttataactgctgaactgtccacttaaaaatggcaaagatgaggccaggcgcagtggctcatacctgtaatcccagcactttgggaggctgaggcgggcggattacctgaggtcaggagttcgagaccagcctgaccaatatgatgaaacccagtctctactaaaaatacaaaaatttaccgggcatcgtggcaggcgcctgtgatcccagctactcaggaggctgagacagtataattgcttaaatccaggaggcagaggttgcagtgagccgagatcacaccattgcactccagcctgggcaacaagagcaaaacgccatctcacaaaaaaaaaggcaaagatggtaaattttatatgtatattttaccttaataaaaaagaataatttttttaaaaaagaaaagaaaatatgtgatgccatcagagcacccacaggccatgactagagctcaaatatttaataatgcagccccattagctcctgtcaaccagcaaaggctaccttctgattagtcacttttgctctggctgttaggtcagctatagactcaatgctcactgaattaatcctctaaaacccaatttctggagtgcagttttgataattataggcttacttagttaatagtatttatttggctgtaatcttacttattgagctgagccaaattcagctaatattagaaacaaaaccttccaggactaacaatagccagtgcaactttgtctaaaaatcattgtgtatattaaatcatatcaaagtcaatatctaaccacaaacttactgattaatttataccaaacatttgcccaaaaaaaggtaatcatattttgttaaaaattcctatacagaagctgaaatcaacttctttttttctttacctttcaagatgaaataacttcagagaaaactttgaggaaagtcctattcaagcagggaacttggagagttcataacccctcttccctggagtttatacttctggcaacctcagtcactttgagcaacactagaccctgaatataagtgtaaagggctctgagtaactcctgggtggccaaaatgaaactcacaawgtctgagcactaaaatccttttagttttattacaatcatttttagtcattttatgtttttattgattttccaatcgtagcacatttgaggcagaaaattactaaaataagttacagttagaagcaagcataatgatagcaaaagaaattgtagctaacaacccagtgagttaagagataggaaaactatcaaaactttgacaagacagcaaacacatggcaatcgatggtcatttagtataggcaccaatgtagcctttttttgatgtattttttaattgttttttaaattttcatattctaatagttttgttgctgatgtgtagaaataaaatttacttttatatactgactttgtacccaacaacctagctaaatgtactyaattctaaaatttagttgtgggagctcttggatttcatatgtatccagtcatgtcacttgtgatataaagatataatattgactgttgtatagttaatatatcaagatatatgaagatagaaaaatgattattttatatcttccttcccaatacctatatttttcttgccttatttccctggtagggacctcacataaaaaaattaaatagaagtgatgataaaaggcatctccttgtgtatttgcttacatcagagaaaaagttttcaatatttcaccattaaaaatgatgtttggccaggcctggtggctcatgcctgtaatcccagcactttgggaggccaaggtgggcagatcacgaggtcaggagatcgagaccatcctggctaacacggtgaaaccacatctctactaaaaatgcaaaaaaaataagccaggcgtggtggcaggcacctgtagtcccagctactcgggaggctgaggcaggagaatggcgtgaacctgggaggtggagcttgcagtgagccaagatcacgccactgcactccagcctgggcgacagagtgagactctgtctcaaaaaaaaaaaaaaaaaaaatgatgtttgccccagatgttttatggatattcttcattaaactaaggaagctctcttctcttctgtttgctgagtggttttttaaatcttgatgggatattatagtttatcaaatgctttttttcttctatttagataactaaatgatttttctcttgtattctgttatttgtgcagaattacataaattgatatttcaaatgccaagcccactttgcgttcaaggaaacccacatcatgggttatgatatactatcttttataggctgctagattctatttgctaataacttaagattttatgtctatgagaaagattagcctataattttcctttactgttgtgtctttgtcaattttatatcaagtatgaatgatgaggttgcagaggaaattgaattcttatacacagctgctgaaagtataaccactttgaaaagttgttatcatatctttttatgctgatcatatgcataacctataatctcacaattctactcctagtgatataccaaataggaataaatacatacatgtaccagaagacatgttcaaatatgctcataacagcattaactgtacagcacaaaactgggggaaaagacataattgcccctcaaaagtaaaatgcataaataaactgtactatgctcactcaatggaatattctataacaataaaaaaggaagaaagtgytgctatacacactatcatgatttaatctcataaacatgttgttcaaaagtcaaacaaaaatgaaagtatatgctgaatgatgccacttatataaagttcagaagtaagcaaaacagatctataatgctaggaattcagggcattggttaccttcaagagggaattagtcactgatagagggcataaatgggggaggagggattatgaattactactaatattctaattcttgatctgggtggcaatttcgcttactgaaaatttatacagccatgtgcttacatttagtatgtctttctttattgtatgttatacttaaataaatatgcttataaaagagatcattgggtaaaagtaattaaaaatatgatcatgcattttatctttatgatgatcatattataaagtgtaaaattggaggttgtgttagttcaggtcttgcaagaagcatctgccaagacatgatttaacatgcaagggctgggcacagtggctcatgcctgtaatcccagcactttgggaggccgaggggggtggatcatctgaggtcaggagttctagaccaacctggccaacatggtgagaacttgtctgtactaaaaatacaaaaattagctgggtgtggtggcaggcgcctatgatcccagctactcaggaggtggaggcaggagaattgcttgaacccaggaggtggaggttgcagtgagctgagatcgtgtctttgcactgcagcctgggtgacaagagcaaaactccatctcaaaaaaaaaaaaaaaaacatgcaaggattttttgggaaatgcctgtgtgaaagaaattgagggggccagtaagactgagggaaccatcagactaccatgcaagtctgactcgagcaaaggaagaaaggagggaggggtggaagcataccacattatggtgtagtctaaggaagtttcaatgaggccactggggagccccgtgactcccaggaatgggcctactttagtatcccaactagtcactagcaaatgcagcaaaggatttcaagccagcagctgggccctttggtcaatcatgctgactgtggttcgatggctgcaatgtgcattcttatggtggccaagaggtttcagcatgatattttctttttcctgttaaaaatagatttttatttttattttcatttttaaaaatttttatttgcctttttaatttacctatggtaaaattagcactttttgatgtacaggtctatgagttttgaaaaatgcatatagtcatatagctgcaaccacaattaagatatttatcagttctcttaccctaaaagtttcctcatggtgcacctttaaagtcagcctctcaccccatctccagcctctggcaaacattaatctcttttctattcctataattttcccttttctaaaatataaattaaatcatatattatgtagcctgttcagtattaatgcattagatattcattcatattcttatgtgcatcaataagttcattcctttttattgctgagtagccttccactttatggatgtaccaccacttttttatccattcatcagatgagaacatttgggttgtttccaatttggggcaattgtgaaaaagccactacaaatatttgcatatatgttcttatgtagacagacgttttcctttctcttggataaatacctaaaggtagaattgctgggttatattgtaagtgtatgtttaatgttaaagaaactgtcagacggtttttgaaagtgtctgtagtattttttattcctaccagcaacgtgtgagagttctagttgttacatattcttattattacttggtatagtcaggtttgtttgtttcttgttttttgttttagccaatccaataggtgtctagtactaactcatttcttctttggtaaagtatctgtccaaatataactaagtattatatattttaatccaagaaaaaaaatcagccttctagccccaaaatttctgttcaaacatttcctgagttttaggtgattgtttttatatgagaagaaatataaaaacatttaagggaaatcctctcatctctcctcaaaatgtaaagctgagtgggaatacaaatttttcttctgaaatagttttgcaaaaataaatatttcaagatatttaatcaccaaaacagcacaggcactaaacaaccagagtagacacaagatatagactatatgtgtctctaggatatactagctgaatatttgccctggctgacaaaacatatcaaaattctcaaaaatgggcatgttctttgaactacaaattccatatttaataatgtattataaggaactaattaaggaacatagagctatatatatttatacacatatacatgccaacacacacaagtacattcagtgttgtttgtgatataagaatgctgaacatggccaggtgccctcatgcctgtaatcccagcactttgggaggatgaggcaggaatatcttttgaacctaggagttcaagatcagcctgggcaagtgagatcctgtctctacaaaaaataaaaaaattagccaggcatggtggcacatgcctgtagtctcagctacttaggaggctgaggtgggagattgtttgagcccagaaggttgaggctgtagtgagctgatcacaccactgcactcaagcctgggtgacagagcgagatcctgtctcaaaaaaaaaaaaaaaggaatgtaactgtccaatatgaaattattgaaataaaatataatagaatatgtccatacagtggcatatgtcatttaaaatgatgtttctggtatgagtccactgatattttaaaaagtattcatgataaatcattaagagaaaaaggcagaccacaaaaggtattacatgttcctccttaactacatgtgtgcatatgagtgggtgttcggaaatatttacacagagtaacaaatataataattgatgtttttctctctgtattttctgattttctgaaacaagtattgctttagtaatggggaaggaggaggaatacaagcaaagcattacagagaaataaaagcatcataattaattattaatagtgatggatgaatcatcaagaaaaacttaaaatgtgtttggtgtagattaaagatttcagattcatataaaatattaaactattatatttaattgattaggtttcatttgtatagagaaaacctcattcctcagcattgccagatataggaaatgggatgtattttcatgtgcatgtttgcatgtatataatgtgtgtgtgactgtcttgtttctacaaagtaaacctgggagtagctaggcattttcacttagtcatagagaattttttacctagagggcaatgttctgattcatcccaaagcctgccccagaattgctaaaatacccttattcgtattctgctgcaagcattgagttcacagagtaactcacgcttcaacagtttctctcagtttaggttcaaagagacctacttttgcattgcgtagttacagaaaccatatgaaccttttagccacaaagcacatgttccagggacatgctatttcacaatagaaatttcaggcttcaaactatggctttaaaatagttcatatgactgtgtagaattctttttgcttaaagctagaaacaagcattttcctaaacataaggtattttccaagtcattcaaaagcactgtacttttcaaagcaatttcaagcaaggtcacagcaacctgacatgccaygaagactctagtgatttaaaaaacatggactaggctgtcaatcagagcagaaaccccatccacactagggacagaggagaaacttgatggacaagcatctgtctactccaggggcatccaggctccccctattgtccccatggaagcctctcctgctgcttcctggtattttgttaatgaatagaaacagtagtaaattccactagcattttgaaaagatgtttatttcaatccagggtcacaaaaggggctggggggtatctttttgtgagttattaaagtatgtagacaaagatcaaaaaggcttagcaaaaattcgtacattccctgggaaatcccgatggaaactaaattagcctctgactcctccagaacacatacaactaatgcttcattttttcattttctcttgatcatctgatcaccaaaagcagatgtattcatggcatttttcaaataaaatgacagctagagtaaagaatgcgaatagatttatgtggtctactttgagttgaatatggtagaacttgtgacaataataatccatataatgttatttttcaaagtctttcaaattatttcaatatttcaatcttttttcatagtaattttatttacattcttattacaaaattttcaaaaatatattagttaattttatcctaatggcaactatgagataaatattattgtccctatgtgaaagcaaagaaaactataagcacttggaggttaattagctttcctaaggtcacacatactcaccaggtattagtactttgttgtatctgctttaaatatttgcttctttttagaaataaaatattactcacatagtgggtgtctctgttttattcctcacttatttaattcctccctacatccacagaagaagaaatcactatcctaagatggtatgtacctttctgttagatttttgtacttacacatgtatgtatccataaacaacatatagtattgttgtgtatcattctgtatctgttttttcccactctgtttctgtgatagaacaatcttaaattatttaaatccagtacattcctttacctgtgttaccgtattccatgatatgaatataccataatttgattattcattctccgaatgatatttgggatgtttcagatttttcaatattttaataaaaataacgccactgagccgaactccattttccatccagcatgtaaggagcttagaagtcaaaaacaccattctaacaacaaggcaaagctaaacaagctgaacatcaaacacttttatgatccatcagagaagggaggtcacagagcaaagcactgccctgaagagacagacagggacactgagaaccacaacttccctgagcagaaacctctgagggaaccagtgccccagcaggaaaacctaaattagaattgaggaattgctggcagctctgaatagataagtttttgtgttgaaaactccaaggagactcagtcttagaggggatgcccaaacttttgcaatttttacctccaggagctctatcagcttctcacagtgaaaatggaaaaaaaaaaaaattcccttgtgtttccagctgggagaggtgaaagtaaccattttgaaatacaccaaagcattctgctctacttaacaaggcctgccctcaggagaaactattttaccagcccctaacttactagagttttatcagagcctaaccaccctgcagaagccaaaatatccaactcccgtcccctctagttttccatgtggagaaaagaaaatacccaactccagctccctctagctatcctgtcccacctaagatgggtgcaaggagaacygagaagcacttgtgaagttcacagaccaagggcacagcctcgctgaaagacgagacctaatcacaggactattgagccctttcccaccacacacacacacaaacacacacacacgcacaaaacgcatcttaccaccacatcagtaaaggcttatttttagcagttcctgctacacagtacatcacgtccacctttcagcaaacagtccagggcacactaaaaggcagaaagcacagttggaagagactgaacaagcatcagaacaagactcatggcatgaatgttacaattgccagaccatgaatttaaaacaactatgactaacttgctaagggcacaaacggaaaaagtagacaacatgcaagaatagatgcgtaatataagcagagggaaggaaattataaggaagaatccaaacaaagtgctagagatcaaaaacactgaactagaaatgaagaatgtttttgggaaagaatctgagtttgaggatatgtcaatagaaactgaaaatttaaaaaaaaaaagactgaaaaataaaaaacaaaaaacagaacatccaagaactgcacaacaactacaaaaggtgtaatatatgcataatgaaaataccagaataagaaagcgagaaagcaactgaaggaatatctggaacaataatgcctgaagatttccccaaattaatgtcagacaccaaaccacaaatccaggaagctcagaaaataccaggcagaataaatgccccaaaactacaaaaatcgtattcaaatggcagaaaatcaaagataaagaaaaattttgaaagaagccagagggatttaataaatagtgctggcagaactggataaacatattcaaaaaattgaaactggaccccttccttacacattttacaaaaattaactcaagatggattaaagacttaaatgtaaaacccaaagctagaaaaaacatagaagaaaatgtaggcaatgtcattcaggacataagcaagggcaaagattttatgacaaaatcaccaaaagcaagtgtaacaaaagcaaaaattgataaatgggttctaattaaactaaagagcttctgcacagcaaaagaaactatcatcagatcaaacaggcaacctacagagtgggataaatattttgcaatctatccatttctcaaaggtctatccagaatctacaggggacttaaacaaatttacaagaaaaaaaaaaaacaaccctatcaaaaagtgggcaaaggacatgaacagacacttctcaaaagaagacattcatgcggccaacaaatatataaaaaaagagctcaacatcattgatcattagagaaatgcaaatcaaaaccacaatgagataccatctcatgccagtcagaatggctactattaaaaagtcaagaaacaacacatgctggcaaggctgtggagaaataggaatgcttttacactgttggtgggaatgtaaattagttcaaccattgtggaagacagtgtggcgattcctgaaagatctagaaccagaaatatcatttgacccagcaatctgatttctgggtatatacccaaaggaatataaatcattcagttacaaagatacatgcacacatatgttcattgcagcattattcacaatagcaaagacatggaatcaacccaaatgcccatcaatgataaactggataaaggaaatgtggcacatatacaccatggaatactatgtagccataaaaataaacgagatcatttcctttgcagggacatgaatggagctggaagccattatcctcagcaaactaatgcaggaagagaaaatgaaacaccacatgttctcacttataagtgtgagctaaataatgagaacacatggacacagggaggggaacaacacatactggggcctgtcatggggagggagagtagcaggaaaaatagctaatgcatgctgggcttcatacctagatgatggattgataggtgcagcaaaccaccatggcacacatttacctatgtaacaaacctgcacatcctacacgtgtgccctggaacttaaaataaggttaaaaataaaaatttaaatttacactgaaaaacaaacaaacaaaaacagaaagaagccagagggaaaaaacactttacctatacaggagcaaaaataagaattacatctgacttctcagaagccacacaagcaagaaaagacgagggttaaatatttaaagtatgtatgtagaaggggaaaataaaactactaacagatcctgtgaaatccttcaaaagtgtaagaggctttctcaaacaaaaattgagggaatttgttgccagtagacctgccttgcaacaaatattgaaagaatgtcttcagagagaagaaaaataatataggtcaaaaactcaaatttacataaagaaaggaaagagattagagaaggaataaaggaacaggtaaaggtaaagaaaaaaatcttaatttttcttattcttaattgatctcacagataacagtttgttcaaaataataatagaaataatgtatttgatgatcgattatagcttatgtagaagtgaaatgaatgacagtaaggcgctggagggcataatacaaagggcagaagggaagaattagaaatactcgattattgttacaaggtacttgtattatctgygaagcagtatagctcactttcaaatgtatttgaaagtggatttggattagctgtaaatggacattgcatactctagagtaactactaaataaagtaaaatcgtggtagcaatgtccatttcatagatgccataggtatcagttgccaagcattaaaaattctaagataaaatagttgagaattacattacctaacacattcaagaatttatttatttattttttgagagagtctcaccatgttgctctggctggttgaaaactcctggcctcaagcaatcctcctgccttggcctcccaaagctctagcattacaggcattagctgacacacatagccccagtaaatatttttattttaaaaaaatgccactataaacattcatgtgcttgtctccctgagcacatgtggatggaattatttaatcacaggtcttcaaaggcatctctctctctgctaagcattatatttattccccaaagtggttgcgccaacttgcactcccaccagcagttcttgatatgatatttgctattactctccatccttactgatacttctgtcaaacttttaaatttaggggtgtgaaatgctgtgtctcatttaatttgcctccccctaattactaataaggttgatcatcttttcatgtgcttctcctgaacttcttcttctttgaattacctgttcatatctttatttttcccatgtgtttgtctttttttattgatgtttaagagtccttcatatattctaaataataattatttgttggttctgtgtgttacgaataccttctctcagtctttggaactcatcttttcacttatttatgttgcatgttaaacgtttgtaacataaactgtccttataagcagaagcaaactacttgtaaatatatactgatacggtttgactttgtatcaccacccaaatcttatctcaaattgtaatccccaggtgttgagagagggacctggtgggaggtaattggatcatgggggcagttttccccatgctgttcttgtgatcgtgagagaattctgaagagatctgatggttttttaaggggctcttcccacttcgctttgctttcttctctctcctgttgccttgtgaagaaggttcttgcttccccttcaccttccaccatgattgtaaatttcctgaggcctctggagccatggagaactgtgcgtcagttaaacctctttcctttataaattacccagtcttgggtatttctttacagcagtgtgaaaatggactaatacacatactgtataaaccaggttcttgaaaatactcttccctgagtttactggttttgttattgttatttaacttattttctttaatagagtatatgtacatggcacaaaattcaaaatacacaaaatgataaacataaacagtaaatcttcctccttcctccttccaagcaactcagttcctctcccacgatacaaacactggtgctttttttttcttttttgaatctatgaagataaaccatgtattgtaaacatttatatattttgtttttctacaacaatggtaatatactacactattatattccttgaagttttctcctaaaatgtgtatcttaaaaatacatatatgtgtgtatctctagattatctagattatcagtataatacatatagagttaattctttcttttttacacctacctagaattccacaagcatgggggaatgtgtagcctartgagagaatatgtcagctctggagcatgattaaatgaatttcagtcccagctcctctatttattagaagcaagttagttgtgctctctatgtctcagtttccccttttctaaatgaaaataataatggttcctatctcacacagtttttgtgggagttagattatgttaatatgtaaagagcctagtaaatacttagcacataaacacacatacacaaaaaaaacacattcttattctcacaaaccaatttttatttaaccaacctgtattagagtctatttcacagctttctttccttttcattaatatactagtaccacacttttaattaatatagctttatgtagcatatacatattaatatgtgcctagcaaatcctccctaaattttctctctatttttttgtcagaattttctagtctattgttccttgatgatgtttccatatgaatcttagagtcaactagtctaattaaaaagaattctgggtttttttttttatcttaaatttatggattaactagagaaatgtcagttttgtaatagtaagacttcctatccaagaacataatatgtcttaccatttgtcaaagtattctttgtgttctttagtaatattttaactttttaaatgtagatcttataaatttcttgttaactttattcctaggtatttcatgttttattactattataaaagggcattttgttccattacagcttctaacccagcactccccaacatttttggcaccagggaccggattcatggaagacaatttttccactgaccaagggcagagcagggaggtggcttcaggatgattcaagtgcattacatttaattgtgcacattatttctattattattacattgtaatatataatgaaagaattacacaactcaccataatgtaatatcagtggaagccctgagcttgttttcctgcaactagtcagtcccatctgggggtgataggagacagtgacagatcatcaggcattagattcttataggtagcgtgcaaccaagatcccttgcatgcacagttcacaatagggttcctgctyctgagaatctaatgccgctgctgatctgacaggaagcagagctcaggcggtaatgcaagcaactgtaaatacagaggaggatcgctggctcgccacccccaccgcaccacccccacctcacgaccctgctcacctcctgctgtgcagcctagttcctgtaccagtctgtggccccaggggttggggacccgtgttctaactgactgtggtttgttccttgttttccaagtgtcatttttaaatctccagatctaatcctccgtgaaaatgtcttgctcccataatccatcaaaatcatctgaagctctgagttcaccagcaggtactaaccaaaaaacactacaaatgtctttatggtcatgaaggtaacatttacctcgcatttattttagagacttagaacataaattcaagttaaagcgtgctttatttaagaccaccaatggtttcagtgactcatatgtttcaataatatatttctttactcatatttcaatttaccatagtaccatgacatgaaatgaaaaaacctgaccctagtcaacttcaatgtgatacatgaacagatgatatggttttgggtatactaagtatggtgtacccatcctaacatgacccccaataagtcatgcatgcttttgcaaagtctccttcaatgtggaggaaactaggaaactgtgacttgctttttagccaatagaatgtggcaaacatagtaggatagtcactctctttattaggttatattacgtggcaaaggcgatagcatagtcacttccgtgattgttacattatatgagacttcatcccagaagactggaggacaaaattttcctgctggtcttgagaagtaacctgccatgttgtaggcgcacaaagggcagcctctggaagatgagagttaccctggctaattgccagcaacaaaatgaagacttcagttctataacctcaggagcctgcattttgccaacagtcacaggagcttgaaagaggaccctgagctccagaaggaaatgcagcccagctgatcctttgatgtaatcttgggaaactctaagcagaggaactagctaaattgtgcctgaactcccaatccacagaaacgatgagataataaatgtgtgttgttttaagccaataagttgtgctaatttgtcatagcagcaatagagaactaataaactaagtcaaatactgtgcctgcacattacaactacaaacagtaaatatctcttaccatttagtaaatttatggtggagtttagtcagagtgaagtatcagtattatacagtttaattatctccctaaatttacagtgctgtcagtaggaaattccagaataaccccagacactccaaagcttaatatttcggcacaactttttcataccacatacttcaaaacctgagctaaatattactcatcagcattcaaaatttgactaaactgaaatcttttataaatgtaagagtctatttgaaaacagaaagtattatattaatttataactgaaaaatgggggaaaaacagagatttatttttaaataattgaaatccttcaattatctctgcctctgcctcgtcagttacccctagggtatgaattttagtgcttttctttttttaggtcagasatgcaaccacagtaacctacccatagttataactataacaacatttccatggcaaacccagttttctagaatttcacataatacagctatttgaacacttacaacccagcatatgggttcacgcttgacatttaatgtctcagtcataaagcaaactgttccagcactttcaaaaagaacattaagatgttggcttacaaaataaaatgctggctaaccaaacttttttaatgcatgcagtcctagaattcaaaagtattctttccattaaaagttattttctttttcttctctgatacattgtaaaaagctataaaattagtgtctgacatgccatttggatgtaaatccaaatcctcaattacgcaaagaaagggagcatattcaaagttaagttttagagagattttgtggagtgtaggcaaaggttttctaaagaggatggagatttacaaggtaacaaaggcttaaaggaacttcccccactgaggatctcagagagaagtacaaaccgctaataatggaagcaaggccagattctgtttgtagagtcctctacaaataaatagggttgtcttgactcttcaagtaaattacatttttatcattcggtttttaagtttttatgtcctacactgttatccccaaaccttccagaaacccagtatacgaacagccttatattagcagttctgtgatgaattattaaatagagtaaaatatatattctggtgatgaggtagagaggtaaaggagaccttcaccaaactaccttgttttagactagcatggtaataacatgaagaataacggccaatatttatatgacatattatatgcaaagcattttatatggatactaactcaaacaaactactttaagttgacttccccagaaccagaccctgaggcaaggatttgtgtgaaagtgatttaagaaaaagtgtttccaggaggagtgggagtggtacggtgggaccagaaagtgaaggaggccaagcaaaggtgtgaaccacttcagagggatgataactcaatcccacaggagccccagtgtaaaacaagcctgagttatgtgcaacccatgtgcctgatgcctatggagcaagggaggtggagtatttacattcctaaagtggcagtcattcattaaggctggggaaacaggggagggcacacaaattcccaggtacttttagatctcgagtccaaagcaggatctgagagaggagttgacaaaaaaagacaccagataccagctcgggggatgacagctcatctggggcctgtgtgcacaaagatggaagagaaatcgaacacgatatgaacaggacatctgttacataaccctcacaacaaccctgtaaggtagctatttgttttatgtccattttacaagtgaggagactgaaatgcagaaagattaaacgagatgcccaagatcctatagctgataagtgtcagagtcaggatttgaaaccagactatctggctccagagtctgcacactcctccaccatattattaaatcaagcactagagcagagcatgcagagacccaaggaagaactaaagccatggttaggaaccaaacaacagagaacaggctagagccaggaatgatttaagatgcagcccaaatatactaacgtgacccttggtaggagagagtgtgtaattagatctattaagtggttagtgccaatccaggtattagacatttgggttacacataatattcactttcactctaagcatgcaagagagagaaattattgtaggcatggaagcagctgtagaaaaagggaaagaacaaaacaaaattttctctccctcttccttttctttccctaattcctacttccttctcttccacacacacaaacatacaatgcgcacgcacacacacacacacacacgcaagtctgaaagcttctttcagtttgtttctgataatttattaaaaataattaggaaaattggcagagacattaaactcaacacaccatagcaagggaccgagtcagagattttcctgtaagctaagcttgcctataaaaatagcttggataacagatagctttttaattaattttaaaagctagttgcaaaggagagatcatggcggacgggaggcaggactggactgcagctcccactcggacagacagagcagcgtgtggaggcttgcatcgtgaacttttgctccagaaggactgcaggaatacattaggaatgccgcaagaacccatggaccctctaaagggtcctgcaggacccaggagacaccccaaatactacgagcgcccaaactgtggaagtgggaaagggaggtcgtctgcccccaaacacacagccccactggggaacctgaaggtctagattatccgagaagattctgaccttacctggagctgagtcaatttagagagctgcgtgaaatacaggggtagaggaagcagcggcaaaatccctctgggctcgctgggtcccctgccacgccatttctgcctggcctcacaggggtccttgaggagggctgctggaggcactgggaaagctgcagggagaaggaaaactccagctgaactttgtaacaatttcaactgatggagaagtctcttggccagaactcagggggagggcatgaatccagtgtgcagactcaacagagcagggaagaaggagagccctgtttattttcacagctgggaggcgggtagcctggggaaagtactcggtcctgcttgcccactgcctggagacagccttggtgctgctgctgggggcacaatgggagtgagaccagctgtttgcgttgtgtgggaactgggtgaggcctgtgactgccagcttgcccgcacttccctgtcaagctgcatgacacagcaaaggcagacataatcctcctaggaacataactctattgacctgggaacctcacccccacccccccaccccacccccaccacagcagccacagcaagacccacccaagtagagtctgagctcagacatgcctagccctgcccccacctaatggtccttcccaagccatcctggtaactgaagacaaagggcatatacccttgggagttccaaggccctacccactgcctgttcctccccatactaccacagctgatgctctcttgaaagcaccacctcccggcaggaggccaaccagcacaaaaattgtgcattaatcaatcaaagctaaggaccctcacagagtccttttcaccagtctgccacctccactggaggaagtactggtatccacagctaagagacccacagatggttcacatcacaggactctgtgcagacaacccccagtaccagcccagagcctgttagacttgctgggtggctagattcagaagagagataacaatcactacagctcggctttcaggaagccacatccctaggaaaagagggacagtactacatcaaggaaacacccttttgaacaaaaggaactgaacaacagccttcagctctagaccttccctctgacagagcctacccaaatgagaaggcaccagaaaaccaactctggtaatatgatgaaacaaggttctttaacatccccccaaaatcacactagctctccagcattggatccaaaccaggaagaaatccctgatctacctgaaaaagaattcagaaggatagttattaagctaatcaggaaggcacctgagaaaggcgaagcccagtgtaaggaaatcaaaaatatgatacaaaaagtgaagggagaaatagtcaatgaaatagacagcataaataaaaaacaatcaaaacttcgggaaacaatggacacacttatagaaatgcaaaatgctctggaaagtctcagcaatagacttaaacaagcagaagagcttcagagactcaaacaagcagaaaagcttcagaagacaaggttttcaaattaacccaatccaacaaagacaaaaaagagtaagaaaatatgaacaaagcctccaagaagtctggaagtatgttaaatggccaaacctaagaataatggtgttcctgaggaagaaaagaaatctaaacatttggcaactatatttgggggattaatcaagaaaaatttctctggccttgctagagaactagacatccaaatacaagaagctcaaagaacacctgggaaattcattgcaaaaaggttatcacstaggcacattgtcatcaggttatctgaagtcaagacaaagaaaaaaaatcttaagagatgtaaggcaaaaataccaggtaacctataaaggaaaacctatcaaattaacagcagatttctccacagaaaccctacaggctagaagggattcggaccctatcttcagcctcctcaaacaaaacaattatcagccaagaatttttgtacccagtgaaactaagcttcataagtgaaggaaaaatacagtatttttcatacaaacaaatgctaagggaattcgccactaccaaagcagcactacaagaattgctaaaaggaggtctaaatcttgaaacatatcctagaaacacatcaaaatagaacctctttaatgcatacatctcacaggacctacaacaaaaatacaacaacaacaaaaaaaacaaggtatacaggcaacaaatagcacaatgaatggaacagtacctcacaactcaatactaacattgaatgtaaatagcctaaatgcaccatctaaaagacacggaattgcagaatggataagaattcaccagccaactagagacacaccttcaagagacacaaacttcaagagacacacctaacacataaggactcacataaatttaaggtaaagggaaggaaaaagacattccatgcgaatggacaccaaaagtgagcaggggtagctattcttatatcagacaaaacaaactttaaagcaacagcagtttagaaagacaaagagggtcattatataatgataaaaggccttgtccaacaggaaaatatcacaaccctaaatataaatgcacctaacactagagctcccaaatttataagacaattactaatagacctaagaaatgagatagacagcaacacaataatagtgggggacttcaatactccattgacagcactagacaggacatcaagacagaaaggcaacaaagaaacaatggatttaaactatgcactggaacaaatagacttaacagatatttacaggacattctacccaacaaatgcagaatatacattctattcaacaacacatggaactttctccaagatagactgtatgataggccacaaaatgagcctcaataaattcaagaaaattgaaattgtatcaagcattctctcagaccagagtggaataaaactggaaatcaactccaaaaggaaccttcaaaaccaggcaaatacatggaaattaaataacctgctcctgtatgatcattgggtcaaaactgaaatcaagatggaaatttaaaaattcttcaaactgaatgacaatagtgacacaacctttcaaaacctctgggatacagcaaaggcaacactaagaggaaagttcatagctctaaatgcctacataaaaatgtctgaaaaagcacaaacagacaatctaaggtcacacctcaaggaactagagaaacaagaacaaaccaaactgaaacccggcagaagaaaggaaataaccaagattcagagcagaactaaatgaaattgaaacaacaacaacaaaaaagataagtaaaacaaaaacctggttatttgaaaaggtaaataagattgatagaccattagcaagattaaccaagaaaagaagaaagaaaatccagataagctcaattagaaatgaaatgggagatgctacaactgacaccacagaaatacaaaagatcattcaaggctactatgaacacctttatgcacataaactagaaaacctaaaagagatggataaattcctagaaaaaaacaacccacctagtttaaatcaggaagaattagacactctgaacagaccaataacaaacagcaatattgaaatggtaataaaaaaattaccaacaaaaaaaagtccggaaccagatggattcacagcagaattctaccagacattcaaagaagaattgataccaattcgattgacactattccacaagatagagaaaaagggaatcctccctaaatcattctatgaagccagtatcactctaataccaaaaccaggaaaggacataaccaaaaaagacaactacagaccaatatccctgatgaacatagatgctaaaatccttaacaaaatactagctaactgaatccaacaacacatccaaaagataatctaccatgatcaagtgggtttcataccagggatgcagggatggtttaacatacataagtcaataaatgtgatacaccacataaacagaatcaaaaacaaaaatcacaaaatcatctcaatagatgcagcaaaagcatttgacaaaatctagcatccctttatgattaaaactcttagcaaaattggcatacaaaggacatacttcaatgtaataaaagccatctatgacaaacccacagccaacagatactgaatggggaaaagttgaaagcattctgtctgagaactggagctagacaaggatgcccactctcaccactccttttcaacatagtactggaagtcctagccagagcaaccagacaagagaaagaaataaagggcatcccaattggtaaaaaggaagtcaaactgtcactgtttgctgatgatgtgattgtttacctagaaaaccctaaagactcctccagaaagctcctagaactcataaaagaattctgcaaagtttccagatacaaaaatcaacatacacaaatcaatagctcttctatacaccaatagcaaccaagctgagaatcaaatcaagaattcaacctttttacaatagctgcaaaacaaaataaaataattacgaatatacctaaccaaggaggtaaaagacctctacaaagaaaactacaaaacgttgcygaaagaaatcatagatgacacaaacaaatggaaacacatcccatgctcatggataggtagaatcaatattgtgaaaatgaccatactgccaaaagtaatctacaaattcaatgcaattcacatcaaaataccaccatcattcttcacagaattagaaaaaaaaaatcctaaaatccatacggaaccaaaaaagagcctacatagccaaagcaagactcagcaaaagaacaaatctgggctgggagcggtggctcacacctgtaatcccagcactttgggaggctgagattggaggatcacctgaggtcaggagtttgagaccagcctgaccaacatggagaaaactcatctctactaaaaaatacaaaattaggccaggcacggtggctcatgcctgtaattccagcactttgggaggccaaggcaggcagatcacctgaggtcaggagttcaggaccagcctggccaacatggtgaaactccgtctccactaaaaaaatacaaaaattagccaggcatggtggcatatgcctgtaatcccagctacttaggaagctgaggcaggagaattgcttgaacctgggaggtggaggttgcagtgagccaagattgcaccactgcactccagcctgggtgacagagcaagactctgtctcaaaaaaaaaaaaaactagccgggcgtggtggcacatgcctgtaatccagctacttgggaggccgaggcaggagaatcacttgaacccaggaggcaagggttttggtgagctgagatcatgccattgcactccagcctgggcaacagagcgaaactccatctcaaaaacaaaaaaaaaagaacaaatctggacgcatcacatgacctgatttcaaactgtgctataaggccatagtcatcaaaacagcatggtgctggtataaatataggcatatagaccaatgtaatagaatagaaaacccagaaataaacccaaatacttacagccaactgattttcaataaagcaaacaaaaacataaagaagggaaaggacaccctattcaacaaatggtgctgggataattggcaagccacatgtaagagaatgaaactggatcctcatctctcaccttatacaaaaatcaactcaagatggatcaaggacttaaatccaagacctgaaactagaaattctagaagatggctttggaaaaacycttctagacattggctcaggcaaagatttcatgaccacgaacccagaagtaaatgcaataaaaacaaagataaatagctgggacttaaacaaaagagcttttacacagcagaaggaacagtcagcagagtgaatagacaacccacagaatgggagaaaaatcacaatctatacatctgacaaaggactaatacccagaatctacaatgaactcaaacaaattagcaagaaaaaaaacaaacaaggccataaaaaagtgggctaaggccatgaatagacaattctcaaaagaggatatacaaatggacaacaaacatatgaaaaaatgctcaacatcactagtgatcagggaaattcaagtcaaaaccacaatgcaataccaccttactcttgcaagaatggctataatcaaaaaataatagatgctggcgtggatgcagtgaacagggaacacttctacgctgctggtgggaacataaactagtaaaaccactatgaaaaaaagtgtggagattccttaaagaactaaaagtagaactaccatttgatctaagcaatcccactactgggtatctctccagaggaaaagaagtcactaaaaagatacttgcacacacatgtttatagcagcacaatttgcaattgcaaaaatgtggaaccaacccaaatgcccatcaatcaaagaatggataaagaaactgtgagatatgtatatatagatagatagatgatggaatactactcagccataaaaaggaatgaattaatggcattcgcagtgacctggatgagattggagactattattctaaatgaagtaactcaggaatggaaaaccaaacatcatatgttctcacttatatgtgggagctaagctatgaggatgcaaaggcataagaatgacacaatggactctggggactcaggcagaaagggtgggaagggggtgagggataaaagatcacaaattgggtggagtgtatactgctcgggtgatgggtgcaccaaaatctcacaaatcatcaccgaagaacttactcatgtaaccaaacaccacctgttccccaataacttatggaaataaaaaatttaattaaaaaataaacttctaagaaaaaaatctaaaaaaaaagctagttgtttcaaattcaaaacagaatttgagattccctgggaaagtttatgttccataaaataaatatttttgtcaatcaggttaccactaaatctatcattaaatctttgttcatttgaatatagcagagtttaaatttttaaagagtcttctatgggtttcagcaactgggcagactgagatgttcagactcccctcaattagcaacacatagaagtgatggctaaaatataacccccaaataaacttaactacatagttgggtattgataaaacattagaaatgtacatcttaagtgccagacatgaaacagggactcaaagccagagatgtgcctgaagaagccaatgccttggttctggaaggcagggccaggagagaaggcatagaaaaccaagtccaggaacacactttctcctttacaggagacccagagggaagggtagaatggttcccatatacatgggaactggatatgtgacagagatcacccgtcacatgtaaaaatcagaagaaaaaggatggaaccaccaattaatgccaatagtgtaatgctgggaacaggcccccaaatctggccataaactggccccaaaactggccataaacaaaatatctgcagcactgtgacatgctcatgatggccatgacgcccacgctggaaggctgtcagtttacagaataagggcaagcaacacctggcccacccaaggcagaaaaccacttaaggcattcttaaaccacaaacaatagcatgagtgatgggttccttaaggacatgttcctgctgcagttaactagccagagcccatctctttattttggcccatctctttgtttccggtaaggaatacttttagttaatctataatctatagaaacaatgcttatcactggcttactgtcaataaatatgtgggtaaatctctgttcagggctctcagctctgaaggctgtgagacccctgaattccctctccacatgctatatttctgtgtgtgtgtctttaattcctctagcaccactgggttagggtctccatgaccgagctggtctcagcaaatgatgcccatacgtggggctcaaacccaggtcgaagggtcattggagtgatggttggagaacgtggaactaagctggaggacacctgagtactctttttttttttttgaaatatttaaagaggtttattctgagccaaatatgagtgaccaaggcctgtgacaaagcccaaggagttcctgagaaactgtgcccaaggcggttggtttacagcttggttttatacatttgaggaggacagaagttacaggcagacatcaatccagaaaggcgggacaacttgaagtggatggggaaggcacagggtctggaggggctccaagtcacaggtggagtcaaagattttctgattggcagttagttgaaatcattaagttattatctaaagacctggaatcaaggccgggtgtggtggctcacacctgtaattccagcactttgggaggccaaggtgggtggatcacttcacctgagtatcttaagcaatccccatggtgagtaagaaggggagcttggaagcatcagggtaacaatgggacaactgtgggctctggttcattccatcttggaaccttttcacactgatgatgaggaggaaggagagtataatgaagtaacagaagaagtaacagagcagatttgtttgccagctaaagctaaagcggcaaaggaggaagaggttcatccctacccttctgcatcccctcattattttgaagaaaaagagtggcctgaccctccagatctttcttttctggaggacactgggcaaaaagtagttgccccagtaactgttcgagcagcaccttgagtgaccactctcagttctattcaggcaggaattcagcaagctaaacgaaaggatgatttagaggcttggcagttccctgttagcatacaccccccaaatcaacagggaaatatagctacatttgagccttttccttttaaattcaggaaatgccatgcagggcccatcctgggccccgttccaaactggggcatttccagctcaggccactccctcacccctatacaatatttgtcccccgccacagcgccacagccagtagtactgcagtagattgatrctgcacaaaagctatgagtcttctgcctagggaacccccacaaaaggtcccaacaggagtctgtggacccttgccagcggggatgataggattacttctaggaaggtctagtttaaatttaaaaggggtacaagtacaaagaggagtcattgattcacattacaatggggatattcaaattgttatatctacttccgttccctggaaaacagagccaggagagcctataacacagctcctgattgtgctgtatgtggaaatggggaaaagtgaaattaaatgaacaggaggatttggaagcacaaatcaataaggcaaagcggcttattgggtgaatcaaattcctgataaacatcctacctgtgaaataactattcaaggaaagaaatttgaaggtttggtagatacagaagcagacatttcaatcacttctctacagcaccagccgtccacgtggccaattcaacccgctcaatttaatgtagctggagttggtaaagcccttgaagtatatcaaagtagttatattttgcactgtgaagggcctgatggacaacctgggaatattcaaccaattataacttctgtacctataaatttatggggaagagatttattacaacaatggggagcacaagttctaattctagaacagttatatagccctcaaagtcaacatatgatgcatgaaatggaatatgtccctggtatgggactaggaaaaaatttgcaaggtttgaaggaactgcttcaagcagaaagacaaagttcctgccaaggttgaggatatcatttttgatggcagccattgttaagcctccagaatctatacctttaaaatggttaacagataagccaatttggatagaacaatggccactaagtaaagagaaactggagactttgaaggaattagttaatgaacaattagaaaaaggacacatagctccaatattttccccttggaattctccagttttcgcaattaagaaaaaatcaggtaaatggagaatgttaactgattcaagaggcattaattcagttatacaacctatggggacattacagccagaattgccttctccttctatgattacaaaaaattggcctttaatagtcatggatgtaaaagattgtttctttactatccacttagctgagcaagactgtgaatggtttgcatttacaattcctgcagtaaacaacctgcagcctgctaagtgttatcattggaaagtgttgccataaggcatattaaacagttcaacaatttgccagacttatgtagggcaagcaattgaacctactcgtaaaaaattttcacagtgttacattattcattatatggatgatatactttgtgctgcctccactcaagaaatattactccaatgttatgatcacttgcaaaattcaatttctcgtgctggcttaattatagctcctgacaaaattcagactgctactccttactcctacttggggaccttagtaaatgatattaccattgtgccacacaaagtagccatatgtagggatcaattggaaacattaaatgactttcaaaaattactaggggacattaattggatatgacctgctctaggcattcctacctatgccatgagtaatctattttctatccttagaggagatcctagtctccctagccttggcaattaacaaaagaagctcaggcagagctgcagctaatcaaaaagcaagtccataaagctcaaataaattgaatagatccagagaagactctagatttgctaatttttccaactcagcattcacctactagtattattgttcaagagcaagatcttgtagagtggctttttcttccacatactaattcacagactctaactctttatttggatcaaaccgtgactatgataggaaatgggagaactcagattgttaaattacatggatatgatcctggaaaaattattgtccctcatgaaggcacaaatacagcaagcttttataaatagtcttactcattaaacccatttagctgactttgtgggtattctcgataaccattttcttaaaacgaaactgtttccatttttgaaattaactaattggattttccctaaaataactaatttaaaccaattgaaggtgctaagaatgtttttacagatgggtctagtaatggtaaagcttcttattctggatcaaaaggtaaagttttccaaatgctctatacttcagcttagctgtaattgaggtattcactgcttttgatatgcctattaatgtgatttctgattcttcacacgtggttcattccacacaattaattgaaaatgctcagttatgatttcatacagatgaacaactgatgactttctttactcaattgcaaacagcagttaagagtagaatgcaccctttttgctgggtgcagtggctcatgcctgtaatcccagcactttcggatgctgaggcaggcagatcacgaggtcaggagatcaagaccatcctggctaacacggcgaaaccccgtctctactaaagtacaaaaaattagccaggcatggtggcgggcacctctagtcccagctcctcaggaggctgaggcaggagagtggcgtgaacccaggaggtggcgcttgcagtgagccgagatcataccactgcactccaggctgggcaacagagcgagactctgtctcaaaaaaaaaaaaagaatgcaccctttttacatcactcacattagggctcatacacctcttccgggacttttgactgcagggaatcaaatggctaatcgcctagttgctaatgcaatatctaatgctagacactttcacaatttaacacacgttaatgtctctggtctcaaacacagatacagcattatctggaaagaagctaaagctattatccagcgatgcccaacttgtgaaatggtacattcctcatcttttacaggaggagttaatcctcgaggattggaacctaactctctttggcaaatggatgtcacacatgttcccttgtttgggagactagcttatgtacatgtatgtgtggacaccttttctcactttgtctggactacatgccaatcaggagagtcttctgcctgtgttaaatgtcaccttttgcagtgtttggtggtgatgggcattccagcttctattaaaacagataatgccccagactatactagccaagctctagctacatttttctctgtatagaatattaaacacattcctggtatcacatataattctcaagggcaagccatagtggaaagaatgaatctctccctgaaacagcagttacaaaaacaaaaaagggggagaaatagtgactatgggacatcccaaatgcaactgaatctagcattaataattttaaattttttgagcctgccgaaaggcaagatgctatcagaagctgaacagcatctacagaaaccagctgcaaagacagaggcagaacaactcatttggtggagagatccgataacaaaaagttgggaaataggtaaaataataacttggggtagaggttatgcttgtgtttctccaggaccaaatcaacagccaatttggatatcatcaggacacctgaaaccttatcatgagccagatgccgaggaagagattccgggaggatcctgaggaccccccagttacagccatgttgagactgacactgagaaggaccccagctgtcacgagcagcacctgtcgaacacagccacctacctggggacagatcaagaagctgtcacagatggcggaagaaaacctgaggaaagcgggacaaccagtcacaatgagtaacttaatggtagctatgatagcggtgatcaccattgccatgagtattccttcaacaagggctgacacagagaataattatacttattgggcatatttatcaatcttggctggcaataatgcctggatgtaatcactttatgacagttacacatgctttctggtctcagtatttaccataataaatctactcctataattgaggcataccgccctcaaaaacttatttgtaaacaggattggacccagttagaaataatgaatgtacttgtttgggaagattgaattgcagaacaggcagaggtgctgtgcaacgattcctatggaatcattattgattggtcccctaaggggacatttagcttaaatagcacctctcagtctgcatgccacggccacactatgttcagctggtctgaacaaaatggtcagatggtagaaatggtaggaagtacagcaagagttcctattatctggaaacatagcagtatagtgacacctcaacctcaaatgatatggcccgttgtaggccacatgctatatttctgtgtgtgtgtctttaatttctctagtgccactgggttagggtctccacaaccgagcttgtcttggcagtgtaattgattaactaaaaaaataataaaattagatctctatctcataccatacccaaatatagattccagataggtcaaaaatacaaatgtaaaaatcaagtctttcacagaacatgtaggagaatcttttttatggcatttggttagggaattatttcttaagcacagcatgaaaagcacacagaacaaaagagggtttgggacacctagtgtggytgattgtacccctgtgaaaatatttgctgcccctccctcccaggctaacctgcgggagattatatgccctcagccaaggtcacttgcttcagcaacaaaatgtgactataatgtgatattgaaacagaagctttaaaagccctcctgtgggtctgttgtctctcttttctgtcacaagaccaccatgtccaagatatgtgctgcatcttcagctgcagtccctggagtgaagatgatgtggaacagagcctgtcaacccatgtgaatgtgaacaagaaaatatgtcagttgcagcaaactctgaaatttgggagttttatgaccctggcgtgattcagcttaagttgactgagatgatggctacattcaaattgttaaccaaaaattatagaaggccactgtattgaagcgggcctcacagtaggccccaacagaccaaaccaaatcagaatggagtcatttgtgccaagtgtcgcataatcaaattgaattcttaaattgtccagttttcaccaaaaacaagagattcacagcaaccagttaaaagtggttgactttgcagagaaagataaggaaataaaataggttgaggggtttcactgtgtctacagtgtatatttcttttaaaaatgtttttgaagcaaaaatggccaaagcaatcttgacatttcttaaatcaggtgatgtatagagacaatgttgtatttacctgagccctgttatcctggaaaacagcatttttgtttgtttgtttgtttgtttttgagacggagtttcgctctgtcaccaggctggagtggagtggcgcaatcttggctcactgcaacctccgcctcccgggttcaagcgattctcctgcctcagcctcctgagtagctgggattacaggcatgtgccaccatgcccagctaatttttgtatttttaatagagacagggtttcaccacgttggccaggatggtctcgatctcttgacctcgtgatccgcgcacctcggcctcccaaagtgcgggaatggcaggcgtgagccacggcacccagcctaccattgtttaaagaagtccccaataccaacccttttgtgttccagaaactggcttactgaaaaaaaccaagagtccccatataaattagagaagactcatagatgtgccccttgcttaccttgcaacgaggccagatacagacaytctaaattcccattctttgcctcataaatgattagctgaactgcttgccccgccggtcggccagaacaaaatgcttgctaaccagaaactttgctttagcttctctccttttcccaggtccctgaattttggtcagcctacaactcctccttaaaccctcctgagaataggctggctccaaggtaaaacattctctaacctactatctgatattgctacgctttcatcctgcttccccatacctggttgttgctagccttgctacttctctctgtaaaagaaaatcctttttttgcctacctcttgagatgcttgcatatattatggtcaaaacattctccctattgcaagagtccccctccccctattgcaatagtccctttgaccacttcgcaataatcctttcaaataatggctctccttactaagtctgggttttttatttgacaataggggtataggcatacttttatgcattttgaattattttataatatgaaccagattttgaagagcttattaaatagaaaaatagtcatttctaaaaggtgaaacagaatagttttttcaaaatgtcctgatgatataagtgtgaaaataacaaagcagttgggcatggtggctcacacctgtaatcccagcactttggaaggcccaggcgggtggatcacttgaggtcaggagtttgggatcagcctggtcaacatggtgataccccatctctactaaaaatacaaaaattagccaggcgtggtggcatgcacctgtagtcccagctcctctggaggctgaggcaggagaattgcttgaacccaggaggcagaggttgcagtgagccaagatcatgccactgcactccagcctgggtgacagagtgagactccatctcaaaaaaaaagaaaagaaaaagaaggaaaataacaaagcaacagaactcaactcatagcaactgtgtagtagaggtaggattagaattcccaattgaccaggctggtcaggggattcataagaaatacaaatgaagaaagtgggaatgttaaatctgggaaagcaaagactcagaggggcagagaagctgccttcagatatatgaaggcttgttatgtggcttgttatgaaggcttgttatgtgggaaatggcatagaaggtttccacatgttgccattagaattgtgatcaattctagctacttgggaagctgaggtggttgtccccttgagccttgagccctatgatcgcaccactgcactccagcctgggtgacaaagcaagttttttgtctcaaaaaaacaaaacaaaacagaacaaaaagaattgtgatcaataaatggaagcttcagaaggcttcakcagaatctaatgaagaatatctaagttgtccaaaggtggaatgggctaccttgcaagtctggagttcctccccagtaccagtgcccagacattatctgtatgcacactaagaacaagagtattgggcaggttgttggaccaggaaaccagacagctcctggattctatggttctgtctagtagataatgcagaaaacacttgaatgaactttaagaaccaggcaatcactcactgccaagattttccaattgccaatactttccaatttcatcaagcataagtagcagaaagaggatagtaaatacctcctactatggttatttatatatgcaaacaaatacatgtatgctttaataattttttaaagggggcaaaagctgaaaccatcattaagagaaagaagccattctttcaccaggatgtgcccaaagaaacaaaaagaattgtaattcccaaataccagatatagcttattcttctgtctttgatggggctgcatccatttgagagatttttttaagactaagaggtaaagacaattgtaaaatatgtaaattcaccaaagaagtatttgatgactgagaattgcatagggcaatgaggctttttctaaaagccatagcagaaaactctggatatatcaatcaatccaacataatctagacaatacaaggttctggaatagcaaaagaaaatgatagctgatttaagatttaagcaaatcctttagaccaaaagtaaacactgctttgcagctttgtttgttagctactttcttattccagcctccatgaccatgaaagtcacaaaagggggtataattatatttcacagaagctgttcttattctaaatccacccttaatataaagcagccaacagaggaaattatatttaataaggcatctggcttctaaatgaagatgcatcccatttttattctaaaataattttaatttagtttgtaactgaaacatgaagttgatgtcatttggaatttcctgtcccagagaattatggttatagagaaaataacagtattggaatatttttatcatacaagattgtgtttttatttaaattgggacaagtctgaatagatattttaacatttatgtcttctaggagagttaaacctctttttattcataaaatcatgtttgatttaactaaaataaatatttgctttcctatattgtcttcttattttaatatttacctatttccttatcttcttaattcattaattttctcatacctctttctgttaaatataatttatttgccttgttcccatttcatctcccctattttttcttcctttttgttttttcattctatatcttgctacttctttattctccctttgcagccaaagggattcataactgtttaataccaagggaaagaattgaatgttaggtgaatgtattgctttgcatgtagaagacaagactttcctatatttctttttaaaaaattattatacaagatagttaaaaggtgatgtgaaaaataataaaggaattccaaaataaaccaaaccaaaagtcaggtgactcaaaatcaagaaattaagattagtagccaaaactacttaccaaaacaaatccagttataagttttattcttatttaaatatttactggcattgtattgctaacgaagaattaggctgggcatggtggctcacacctgtaatcccagcactttgggaggctgacgtgggtggatcacaaggtcaggagttcaagaccagcctgaccaatatggtgaaaccccatctctactaaaaacacaaaaattagctgggtgtggtggcacgtgcctgtaatcccaattactcaggaggctgaggcaggagaattgcttgaacccaggaggtggaggttgcagtgagctgagatcatgccattgcactccagcctgagcgacacagcaagactctgtgcccccctgcaaaaaaaaaaaaaaaaaaaagaattaaactagtacatatagtacaattgcaataaaaatgtgatcatatggagaaattatcattaaggaaaaaagtcttatttcgtaagtgttaaactgatgtattcttacaaaataagagataaacccatgaaaactgaatctaatggatgctgaacacaaagccatcatttctcaaaataattggcctctcatgttttccttaaattaaatacaattgcctggatttatatttgaaaaacagaaatacattttacagtttaaagtaattatataaaaatggttgtttcctgaaaatataaaacatttaccatgttatcactgttgttatgtataccatacttcagattttgtgaagatcaaatgaagtacatttgcaagcatgctgaaacatagttggcttaattaaaatgcctgaaagatattttttgcctgcagcaaaaattgttacttaattactataatgcatctgctatgttttccttttttttcaacaaagagaaacccaggtgatttctgtgtacctctttaatatgaaatcagagatgatgactgtagaaactgaatgtataagtaaaatactgaaactcagcgtaacccaaaaatgttgtcttttaataaaattacagtcatttgctttttaagagtttaggggttttgttgtagttattgaaaaaatttcataccaacattcatcaggaataaaccaattgccataataaactgattacatgtaccaaattgagttatagttcagaagactaaaattcatcatatatcaaattctaatattatttcagctgatttaatctttaaattgatgaacatttcaagttaaagagttttctgtttgaaaaataaaacattgagaagcacacaaacatttgataataaaattttattttagttcatttaaatgcttttattcagtagattgatattatgtattctacaattttactttcctacaaagtttttaaactagtaagagcaattctaagtggtatttatggatcttgttaagagatcttcaaataccgatgtgaataattatccatttgtgaacatctaagaaaagtagtttgacactggattcacacaataaggtttaaaaaaaaattacagactacagaaaaaagacaaagctgtgaccagcctgggcaacatggcaaaaccccatctctacaagaaatacaacaaaattagcagagcatgatggtgcacacctgtagtcccactacttgggagggtggtgggaggatcacttgagccaggcaggttgagcctgcagtgagctgtgatcacaccactgcacttcagcctgtgcaacagagtgagaagcaagatcctgtctccaaaaaaaaaaagttgcagagtagaaagacaagataagattctgaaatgtgtaaactcatcatacaataaactgtataggggtgaggcaggaaaatagggtctggaggcaggggaacataaggtcaattcacactacagctgtaacaggaaatattctctccacagggtgtatactgtaaatgactttgtaactctacttcatcctcttcatttacacagggcgtaccccagggagagggtatttaaactcacaaaaactctgtaacaggccttttgagcccctatgctcaggcctgctcccacagtgtggagtgtactttcattttcaatagaacctttcattccttccttgctttgtttgtgcattttgtccaatactttgttcaagactccaagaacctggacactctccactgttaacagggggagaaaatattacctgttatttttcagatgaaataatgtcatttctgattcacttatatttgaaaataaaaatgtttctttagttctatttaggacctgcaaaaatgaaatttttctaaaaatttttgcttagaaattgtggtcttaaaatatgttgaagccacaaatactgtatttctagttggaggtcaaagcagggtttatttgaacagatatcacatatcgaccttagggaaagttactttagagcagcaggattgaattttcaaaaagaggaaatgaatgacctactgtgaaggttctctgaattaccaaaaatttcattcaaaatagattgagtatagaaaggttttttatttaaaaagaaaaaattctgggaactaaaggcagaaagtacagtaagatttacatagctgagtccaagaattggaaagagattaggaaatagtctctctcttcctccagccccagcctaattttctctgctactcacatagaggcccaaacactgtgactccctattccagcaaattcaccaactcatgtgcctttctgtatcccaattttaaaaccgcattagagaaaatctaaactggttcaacccagacaacactttggctctccttggttctaatgtccactagtccactagctgaggtcagggaggggtagaaatttgtaatatgtctgtgactacagaaaatcattcttctttgagaaaggaaagttcccagagaagtgaggtgattccagcagccagcaatgctatatcctccaggcatgagagtctagctggacgctgtggttcatgcctgtaatctcagcactttggaagtctgagatggaaggatagcttaaggccaggagttcaagaccagccctggcaacatagtgagactttgtctctaccaaaaaaaaaagaattattaacaacttcgtcccacatacatttccacgcatatatatgtactttgttattcacaaatgggatcatgcaccacatgtaacttagcaacttgctttttaaagaaaactttacagtgtgtcatgtatatatttccaacagggtttcagttttattcatctttggatacttttggcatatcattggtgcacaatttttatttgttagaaatgaataaagtagctataaacttacatttgattatttttatggttaatatggaaagttctaaaagttattgggagcaatctccagagatgaatcagtattaatatagcttgtatatacattaattgagacatcctaaggttgaatccatagtgttgaaattaatacatggctttaaaaaaaattacctatgtttatatcataaaatgaaactcaaatgaaatatttaaattggagttactattaacacagacttatccattgtcctccaaaagcatagagaggtccgaaagttattcagcactttcaattataaattgtctttggcaaaatacactgagaaaattttcacacaccaaacattattctaccagtctctgaaaatgttaatttttttcttcatcatcatacttaaccacttcaacccactgcaccccagtttagtttacaaagctagaaaatgagctgaaggaaaagtactgactagcagctaatataaagtgagcattccagagaagcttgactggccatataaatgaaggaattaataaatgagtgaactgtcaggcctctgagcccaagctaagccatcatatcccctgtgacctgcacatatacatccagatggcctgaaataactgaagaatcacaaaagaagtgatatttaaatggcctgttcctgccttaactgatgacattccaccacaaaagaagtgaaaatggccggtccttgccttaaatgatgacattaccttgtgaaattccttctcctggctcatcctggctcaaaaagctccccgactgagcaccttgtgacccccactcctgcctgccagagaacaaccccctttgactgtaattttcctttagctacccaaatcttataaaacggccccactccatctctcttcactgactctcttttcagactcagcccacctgcacccaggtgattaaaaagctttattgctcacacaaagtctgtttggtggggtctcttcacacagacacaagtgaaattttggtgccatgactcggatcaggggaccttccttgggagatcaatcccctgtcctcctgctctttgctccatgagaaagatctacctacgacctcgggtcctcagaccgaccagcccaaggaacatcacaccaattttaaatccggtaagtggcttctttttactctcttctccaacctctctcactatccctcaacctctttctcctttcaatcttggcgccacacttcaatctctcccttctcttaatttcagttcctttcctttcctcgtagagacaggagacacgttttatccgtggacccaaaactctggcgccggtcacggactcgggaagacagtcttcccttggtgtttaatcatgcggggatgcctgcctgattattcacccacatttcagaggtgtctgaccacatggggacgcctgccttggtccttcacccttaacggcaagtactgcttttctggggggcaagaacctcccaaccccttcttcacccttagcggcaagtaccgcttttctagggggcaagaaccccccaccccttctctccatgtctctactctctcttttctctgggcttgcctccttcactatgggcagccttcacccctccattcctccttctcccttagcctgtgttctcaagaacctcttcaactcacacctgacctaaacctaaacgccttattttcttctacaataccgtttggccccaatacaaactcgacagtggttccaaatagccagaaaacggcacttttgatttttccatcctacaagatctagataattcttatcataaaatgggcaaacggtccgagatgcctgacgtccaggcattcttttacacattgttccctccctagtctgttaccaatgtgacttatcccagatcctccttctttccttcccacctgtcccctcagtcccaaccccaagcattgctgagtctttctaatcttccttttctacagacccatctgacctctctgctcctcaccaggccgagccaggtcccaattcttcctcagcttctgctcccccaccctataatccttttatcacctccactccttccacccagtccagcttacagtttcgttctgtgactagccttcccccaccagcccagcaatttcctcttaaaaaggtggctggagctaaaggcatagtcaaggttaatgctcctttttctttatctgacatctcccaaaatcagttagtgtttaggctctttttcatcaaatatgaaaaacccagcccagttcatggctcatttggcagcaaccctgagacgctttaaagccctagaccctgaaaggtcagaaggccgtcttattctcaatatgcattttattttattacccaatctgttcctgacatgaaataaagctccaaaaattaaattctggccctcaaaccccacaacaggacttaattaacctcacctttaaggtgtacaataatagagtagaggcagccaagtagcaatgtatttctgagttgcaattccttgcctccactgtgagacaagccccagccacatcaccagcatacaagaactccaaacgcctgaaccacagctgccaggggttcctctagaatctcctcccccaggagcttgctacaagtgccagaaatctggccactggaccaaggaatgcccacagcccaggattcctcctaagccatgtctcatctgtgcgggaccccactgaaaatcagactgttcaacttacctggcagccactcccagagcccctggaactctgacccaaggctctctgactgactccttcccagatcctctcggcttagcagctgaagactgacactgcccgattgcctcagaagcctacaggaccatcacagatgctctagataactctcacagtggagggtaagtccatccccttcttaatcaatacagaggctactcactccacattaccttattttcaagggcctgtttcccttgcctccataactgtcgtgggtattgacagccaggcttctaaatctcttaaaactccccaactctggtgccaatttagacaatacycttttaagcactcctttttagttatccccacytgcccagttcccttatcaggccaagacactttaactaaattatctgcttccctgactattcctgggctacagccacacctcattgccaccttttctcccagttcaaagcctccttcacatcctccccttgtatctccccaccttaacccacaagtataagatacctctactctctccttggtgaccgatcatgtacccctaccatctcattacaacctaatcacccttaccctgctcaacgccaatatcccatcccacagcacgctttaaaaggattaaagcctgttatcacttgcctgttacagcatggccttttaaagcctataaactctccttacagttcccccattttacctgtccaaaaacctgacaagccttacaggttagttcaggatctgcaccttatcaaccaaattgttttgcctatccaccccatggtgccaaacccgtatactctcctatcctcaatacctccctccacaacccattattctgttctggatctcaaacatgttttctctactattcctttgcacccttcgtcccagcctctctttgctttcacttggactgaccctgacacccatcaggctcagcaaattacctgggctgtactgccgcaaggcttcayggacagcctccattacttcagtcaagcccaaatttcttcctcatctgttacctatctcggcataattatcataaaaacacacgtgctttccccaccgattgtgtccaactgatctctcaaaccccacaccttctacaaaacaacaactcctttccttcctaggcatggttggatactttcgactttggatacctggttttgccataacaaaaccattatataaactcataaaaggaaacctagctgaccccgtagatcctaaatcctttccccactcctctttccattccttgaagagagctttagagactgcccccaccctagctttccctgactcatcccaacccttttcattacccacagccaaagtgcagggttgtgcagtcggaattcttacacaagaaccgggactacgccctgtaacctttttatccaaacaacttgaccttactgttttgcctagccctcaagtctgtgtgcagtggccaccactgccctaatacttttagaggcccttaaaattacaaactatgctcaactcactctctacagttctcataacttccaaactctattttcttcctcacacctgacacatatactttctgctccccggctccttcagctgtactcactctttgttgagtctcccacaattaccattgttcctggcctggacttcaatccggcctcccacattattcctgataccacacctgagccccatgactatatctctctgatccacctgacattcaccscatttccccatacttccttctttcctgttcctcacccagatcacacttggtttattgatggcagttccaccaggcctaatcgcaacacaccagcaaaggcaggccatgctatagttcaagccactagcctgcctcttagaacctctgatttcctttccatcgtggaaatctattctcaaagaaataacttctcagtcttccatctgctattctactactcctcagagattattcaggccccctcccttccctacacatgaagctcagggatttgcccctgcccaggaccggcaaattagctttactcaacatgccctgagtcaggaaactaaaatacctcttggtcttggtagacactttcactggataggtagaggcctttcccacaggatctgagaaatgacccaccacggtcatttctttccttctgtcagacagaattcctcggtttggccttcccacctctatacagtcctgtaagggaccggcctttattagtcaaatcacccaagcagtttctcaggctcttagtattcagtgaactaatggtcttttaaaaccacaccttaccaagctcagccaccaacttaaaaaggactggacaatacttttaccacttgcccttctcagaattcgggcctgtccttggaatgctacaaggtacagcccatttgagctcctgtatagacgctcctttttattaggccccagtctcattccagacactagaccaacttggactgcaccccccaccaaaaaaaaaaaaaaacttgtcgtccctactatcttctgtctagtcatactcctattcaccattctcaactactcatamatgccctgctcttatttacactgccgatttacactgtttctccaagccaccacagctgatgtctcctggtgctatccccaaaccgccactcttaactccctcttaaagtaaataaatmatctttgccggcagggctatgctgaacttccttaggcactctctagttagatgtcctaggtcctcccaattcttactcctttaatacctgtttttctccttgtcttattccattattttttcaattcccacaaaattgtatccaggccatcaccaataattctataagacaaatgtttcttctaacaaccccacaatatccccccttaccacaaaatcttccttcagcttaatctctcccactctaggttcccacgccacccctaatcctgctcgaagcakccctgagaaacatcgcccattatctctccataccacccccaaaaattttcgccaccccaacacttcaacactattatgttttatttttcttactaatataagaagacaggaatgtcaggcctctgagcccaagctaagccatcatatcccctgtgacctgcacgtatacacctagatggcctgaagtaactgaagaatcacaaaagaagtgatatttaaatggcctgttcctgccttaactgatgacattccaccacaaaagaagtgaaaatggccggtccttgccttaactgatgacattaccttgtgaaattccttctcctggctcatcctggctcaaaaatctcccccactgagcaccctgtgacccccccactcctgcccgccagagaacaactgcctttgactgtaattttcctttacctacccaaatcttataaaatgaccccacccctatctctcttcactgactctcttttcagactcagcccacctgcacccaggtgattaaaaagctttattgctcacacaaagcctgtttggtggtctcttcacacggatgcgagtgaaatgaacaccttttgacagttcttcaggaatctttgtaaatactccctcccaccctgacacaaaatgaagaaaagaacatttggaattaaagatgataaaatttgtagccaaggactttaacattcaatttccataacccctgctggagttcaatttattagagacagttttgaggctgtaggagtggaaaaggtgatatctttcctcatccatcataagggttacagctgtcattcttgcaacaaaagacaggttaagagaaaagcataacaaatttatttaatcaaagtgttatgtgacacaggagacttcagaaatgaagatcgaaagacccagggaaaactgtcaattgttatgcttagatttgataaagaatggccagcgatgtagaaatatgattagacaaaaagggaatgatctaacagtaacacaatgaggcaggaaaaccaacaaggctgtccattcagattcttcttggcctttctgtgtaggattccttcaacccaggtataggacaagacctctatagaatgaggatcttatgacctacaatcagacaaagcaagtcagagaatttctatattgcaaattccttcctaaacaggaaaccagtggaaggttagaatgatatttctaggttttgtagctgtctttggaggaaagaagttctggtttctatggcttaccgtggggaagaagaattctagcttctatgacttgcttgggggagaaagtgaagtgagagacaggagggcaggagaaaatcagagagaccttgcttcagaggccttctaatctccttgagtttaargcaccaatcagcatactaaagcaccttactttggggtattgttttttgaaccccaacatggccacagatttttaactgaaagttgtgaaagtggaggaaaaaaaaaaaaaaaaccattgccactattattcccatcctctaaaattctgtttctacaccatgtagccatgcaatccctcttgcttacctcttaattagtctccactaaaaatatttggtattgttctcatccattatttgagtgttgaccctagctgtgacacataatgaactgttccagaaatgtttccccagtagtgagttaagtgcttacagagatttacttgttctctaggctgagcaaccacttagtccattacaatgaaaagagatttaaaggcaagtacgtactgctagaaacaggtgcctaagaatgtagttgtcttacaattttaagaaggcaagaaattcaaattaaccccatgaaatcatctaatggaaactgccaatctgacaagcaaaacaatgcatactttctatttaactctggactgcttgatttctctaagttctcagcactttgagttatttttcttaactgttttaaagtcaagtaggagtaaatcatgggattttagtaattctaaaggaaaagccactggaaagaataaccgtaatacaagaccagggaaaacagtgcagtttattagaaatcaaacttttcaagaaatttataattgattttataatacaatgaagtacaacatttcaaaaagaggatacattttaagtgatttcatgttggccttgtttatccatgaaaactcttacaagtttcataaattttaaaataagcattttaattcctgaattctacactcctgcctagctcatttgtaggggaacaggacatgcagacattgttttatatttcttaaattcttccctgcacctaatagagcagtaggtgattatgaattgtgaggtgagatttttttaatgttgccaaaaacttagtgttactggatttcatttcaaacaatagtcagtccaccaacataaatcttgcttgtagaatgaaatgctgtgttaagtcagtgccccaaataccacactcctcttttccttttcatcttgctctttttctagttaygtgccatgatttgaaggatggtggggggatgcagagggaggaagaaagggacatagaaacagagacaaagacagagagctcctgccgttgtgaaaaatatgccttgttccaacaatgagaaattgttgattgacttgcctcttcccataagcactgttttgacaaaaatgagcagaagcatctatgaattatgaaggactagctcagtaaagtttggaactaaattgaagcatatcataatcatattcctcaccattaaaactgttcatcctgccagaatgtgttgttgcatgaggcccaagagaatcaggcacagaattckagcactctaggttatggctaatgaaaaatgaaagtaagaaaattaagataaatcactgccacctaacagagatttgagtatattccattctggctcacctaatttttttccctcttttctcatttattttttgtgttaggcatacaacatttagctttccaaagagctgattgtaggatttagacagagagagaaagaattgcagctgtcacagcaggggttaaatgtgcaaatgcctgcagcaattcacttctttgactaagctgtcaaaacatttaaattgtgtccctgtagttcctctcttcctcttctaccgtctccccagcaggggctgccagcactgaatctttgtcaaaagagaagatgtcgtcacattggtaaaccgtacccctctaaaaggatttccaactttctttgtgttgattgtcatgtttatttctttatgtcttttctgcagaatcctcaccgattcttctcagcttgaattagttgaaatgcccatattttaggtcagttaacaacttaacaaaagacactgcatttgattatgagtgtgcttaaaaaaaaatccaaaaactggaaactttcacttaggaaaataatgaaagcaagcagaatgcagaatcactttataattacttctactgataagtaagaatatagaacaaactagagagacttcatgaaacgtgcaaattctgaaatatgttcaaagaaacaaagggcagaaagaccgctaagccgcaaacatcacgctataattaataaataataaatattattaaaatggaatatataatatttatacaaaaattattaaaacattggacaatatttatcgaacacctgctaagaaccagattctatacctccaattattgcatttagtcctcacacatcaagcattcattgcctgactaccctgctaagtcttggaatatcaaaactaaagtctctaccctctaacagctcacagtctagcagggaaaaaagatgagtaaacaatcatgaaatgagattagatggatgtatgcacacttacaacagcatctgagaaaggacaacctttctatgattgagggctttataaaagaagagggggaggggaagatccaaagattaaagaataagaggtagccagaagacaaatgttggaataggagcaagagaaggaaggacagttttccaggccaagagagcaggcttccaaaggcagagatttatgggagagcaatgcacttcaggggagccacagcagttgtattattaaagctcaagctggaagatgaggggaggaagcaagtaatggaggcttggtattccatgataaggagtgtgggctttatccttgaagccgagagaatttaacaggatgtttaaacggagtggctaaaggattatatttttaacctagaaataacaagaataaatatcctttattgagtgctaatgggcgccattcactttatataattcattcttatttaactcccattatcacattacaagcaagtgttattatcctcattttgcagataactgatgctcaaaactttaaataacttgtccaagttcatctagcagctaagaacggaggcaagctttcgtaatgttctcactttctcatcctgtctctcctagtagttgtggttgtgtggttaacagcaggtgttatggaggccaactgactaggcttgaattccttgatactttacttgctttgtgactctgtgcaagttgtaatcattttatcatctggaaaatggggataataaaatccacccaaagataaatgaggtagtacacattaagcagttagcacaacacccagcacataatttaatgctacccattatgatgctagaccaggcattatgcttgagcacatttttgacatctatctaatctttatgtgaaccagacaaaatgtgggtattattatgtttattttacagatttaaaaaaaaactgaaacttaaagaaattaagttacttgcagaaagacatataactaagtgacagagctgcttctgctccaaagcccacactgtttcttataacacagaatatactgcaccggtctcttgtgtactacagagaataaatttaaaggcagtaagacagaaagcagggggagtgtatttaagaggcttctgtaaaagtctaagagagagcagtcaggagtctgaattaaataagtggttatgtgtagtaagatatgtcagataagagatatttacaaggtcggatgaataggactaggtggcagattagatgctgggaagcaaggaagagagctcaagaggactttctggtttttggtttgggtcaccataatttccctgttacccccacctcccttttacttttttcttcttcccccacttaacctttagccttccattagatcccagcatgaagatcatcttactggagatgccttccccaaccacactaaattgatcagttccctcctcttacactttcttatatgtatattcttgggagcacaattgtagtgtaatttttacatgtttaaaattttttaaatataatatttgactttttgattaatgtcagactccctcagttgactctaagccctaggaacatatcctttttcagttttcctcctcaccactgtatctcctatgtctagcaaagtgcattatccttaataggtgtttaataaataatatttggataagtaaattaatgaatgatcagatgaattgtgaaagaatgaatatgcaaatagttaaacaaggaaggaaataaaccaaaaggaatcaggagtcttaatgagtttcaaaagaagttccaagagcttcatcagagaaagaatgagaaagctggaaagacagtagatggtatagactgaactgtgccattgcaaaattcatttgttgaacccctcaactccattgactgtatttggagataaggtctgtaaagagataattacagttacacaggcctcaagggaagggccttaattcaataggactattgtccttataagctgagaaaaagacaacagagttcacgcatagagaaaaggccatgtgaggacatagtgaaaggcagccatttgcaagccaggaaaagaggcctaaccagaaaccaaccctcctggcacctttattgtgaacttccagccgcctgagaagtgaaaaataaaattctgctatttaagccctccagtctgtggtattctgtcatggcagcccaggccaactaatatggtaggccataaattttagatttggggagatgatgtaggagaggggaaaaccctaaaactgaatagacacagtcacaaattaactgtattttattaaataatcacatggaaagttgggtgtggtggtgcccacctgtagtcccagctactcgggaggctgaggcaggaggatcacttgaagcaagaagtttggattgtactgggccattatcacacttgtgaatagccactgcactccagccagggcaacacagcaagactcaatctctaaaacatacatacatacatacacacatgcataaccacactggggagtagagaaggataactaccayacagaagaaaaagaaaaagagaagcaatgcaagtaacttttgatcacatgattttgacaatatacccacaatctagggaacaaaagaactgcaaacaaatcttgaattttttctagtaagtttatttttcattgagatatgggtatagcaattgtgaaactactttatgggtatcataatattgagaaaatgaataatgtgattatgttcttgggtgccaggttctaaatgactgtggaaaaagaaagataaaaatatggcatgaggttaggcaaagaaaactctgcaactatcataataaagattgattcagaaaagaattatctttggatgcaaagtccagggggaaaagttagatgaggaacaggatatgtacgcagtcccaaagtgtctccccacagattgtttagtggttgaaagagggaaatagtaactatatggtggagaaaccaaacaacatcttgatgaggtgattgaattaacatcaccagtgaggggcagacagacactatgtgcctgaaacacagtactctgagaaggacaaatcactgatgtcttatgcagcaagaaaggcacgatctgagcctaatcatcaagaaacatcagacaaacccaaagtgatgaacattctgtcacatagccgtcttatatttgaaaatatcagtgtcatgaaagatacggaaaagctaaggaaatcttccagatttgggtactgaagacatgagacagtcgattgcaatgcaggatcctatgctggattctgtactggaaggggaaaatgccataacagacatgattagggcaatttgcaaattagattatggagtatggagtggaaaaagtattgtttcaatgttaaattttataaatttgacaactgtattatggtaatgtaagaggatacctttttttcttaggaaatacacaataaaggactaagaggtaagagggaatgattgcaagctatctaaaatagttcataaaagagagagagagagtgtgtgtgtgtgtgtgtgtgtgtgtagagagagaaagaaggagtataataaagcaaaggtaacaaagtgtcaaaaattgttaaatctgggccgggtgcggtggctcacacctgtaatcccagcactttgggaggccgaggtgagtggatcacgaagtcaggagatcaagaccatcctggctaacacagtgaaaccccgtctctactaaaaatacaaaaaaaattagccaggcatggtggcaggtgcctgtagtcccagctacttgggaggctgaggcaggagaatggtgtgaacctgggaggcagagcttgcagtgagctgagatagtgccactgcactccagcctgggcaacagcacgagactctgtctcaaaaaaaaaaaaaaaaaaattgttaaatctgaataaagagtaaatgggactccctatctttcaacctttctataagtttaaaattatttcaaaatacaacttaaaataaaatcaaaagaacaaataaaaaagataagaggtgaaggagttctgagtggtgtaaagttttaggccttgatgttaaggtagattgcacaatagtctgagagagagagattattgtcctcattttactgaggagaaattgggactcagaggyctcaaggtctgatgctacctagaggacagcagaggagaagagaggagaggaggcccagatggggagagaatgaggcaagtttttccctcagctccacttgccgtcttaattcaatcccttgacagattagctcactgaaggaaaagcagctccctcacaccattcccccacctcctcccatatctgaaatgatgctctgctcagatcattaatcatctcattaaggctctagcaagcacaattcagtaatattggccacagacattatccttttattctctcgacacagctgatgaaaaagaacctattgtaagatgtccccggtttttcacaacagtaagggaaatgataccttttcatcaatgtatagttccagcttcaataagcattgttcctggtttcctcaagccccttgtgcaaagttttatgagttggataatatccccttacccaattttcccatccagatattgggagggtaatatcagaactagattactggattgagttgaaataatatttaaggctgtcttgggcaacattttaaaattttcttatgatatgtatcctctaatcacccacactcctttcttctattagtttttccctttcccagtgatttttgatgctaactgtggtttctgaatctgcctgtagatacctccagagttctttgcactacacaatggcacagagaccatgttaggacagtcccagaaaggctccgaagtagacaaagatgatcggtactgcccacccttccccatttctgcacctctctcttccatcatcttcaaactgcagtcctcacctcagcctagaatcctagagtaagtggtaaaaataacctcagattctttccttccctgtggcagtgtagctcctcccatcaagagataccttttgaatctgggtttggccacaggaccggccaaatgtgacattagcaaagatgcagcagaggcttgaaaagtgtttgcgcattcgggcttgttctcttgctgcacctggaaacttgaaaccagcacttttcagtccagtgttaatgtggaggccactggaggagaaccaagatactctagccaacagccacctgacatctgagggaagccatacaggaccagccaacccctagctgacccaataacttatccagaagcagcagatgactacagactcatgagtaaacccagctaagccgggacaaccaccacactgatcccataccttaattgtgagctaaataatgactgccattttaagccagtaagtcttgggataattatttatgcagtaatagataactaattatagactcaagtatctcaaagtaggcgctgctctcctcctacctcctggctgtccgtcttcatcccagtgtcacccactccccaccgaaaggctgatcttttctccaccatcaaaactcatttgtttcatatgttttgggacctcaaaatccttgactaaactgataaactaatatgaattagtgatgtaattgaagtgtaataaataagatagcacactcagtctccaaaaacaggccccaaaataagcctcctcacctccttattctttcacttgtgcagcattctaaccgataccaaaaaggaaaaggatttctcctaaagtagtattttgagaattcatgggtttgtcccttttttttctcctctcaaggaacaaaagcacccatcattatatcccctagagctagagtcttctcaaatgtacccaggctaagaagtcactgctctaactccgtctcatctcctctcctctagtcaatcctgaatggtttctgaacaagttgattaatctttctccatcaaaattaatctttctccaccaaaatccacacatcctgagtctcttccaactcattctctgaacacttaagctcttcaaagggcccttttttctgttccactctcagtagtcagtccccccatctccagcatcatggtctaaccaagccctccaaataacaagccaagtatggttcacatactcccaatacattagcaaaacacaaaatattcgttttgcccacaaaactttcctcctggctattctactgttgttttttcctagttaaattcatacaataaatagtgtatctgcttgttcttaaattgatccactcattcaggaaatattaattgagtagttatgccactgagaagctcctttctcctattcctatgattccaagagtaagaactactgcaacagtagtatctttggtctccctccccacattccttcattcctcctaagggaaaggaattaagtctattattgtagacttgaggagaaagaattgagcaagcttgacagaggcttttctgggcctcacttcttcacaactgttggtccagggagggcatcctggttgactctgtactatgtggtaagcgtatgggccaagttctagccctataaggagaatcctactactttgaaaagtaaattcaattaatgcgagatcagatggcccatccatgcaatatactctaattcaacttttacaaaatttaaagaaacaaaaacaaaaactcccttctattttgatctctagagtcaccccacaaaaaggcactggcctgagagacaagtagggactaaagtccagcccagcttctgcacaccaagccagttccctggtaccttccttctaattcacccacgcagagacagttctttacaatcatcttccaggagtgggtgttttcttctaattcatatgctcaaatgaaaagaaaggaggtggcttttctaatctaaacaaaggtaacttatgtgctaacagcagcctgttgattgccagctatctgattcccgtgtctatctaccagtcagctccaacttaagaaggaaagcaaggatgatttatttagctcctaaaccttacatactactatgtaccagatactgtgttaggtactggggaaaaaaggatgagtaatacagagtcgctgactttaaaaacgtgctatctagctaaattccctcagtcctcaaaactagctagttagcttgtttgttttgtataaagatgtgatctactgtgggcaaaagtctggattcttggctatcccatgcatgggagacatgagttgagctgtgtggatcagaggccggagcaaagtatggcagtcagagtagcagtgctgtgatggatgaaagcatcccacagacacaggcaaaggatacaagttcctcaaatgtaggtgcaacaaaattgactttgcacacagacagctccacagggcaggaaggacagtggcactcccagagtgaggggcaagcacacctgtccaacaagtgcatcacatggttgatggtaccagagtacctgctcaggattagatcctgccaggaccctcaagccgctccctttgccattgcagtggagctttgttataccctcatgaccccaaccccagttctgaagattgtgactatgaacctacatgctcaccagagttaaaaactccagacactcctctttactgcaaggctgggtgaatcaaaatatctggtttcgcaggatattatctcctagcagctctggctccagcactttgatatagggattattttccccttaggtctcatcacctggtaagaaagactctaaatcgaagcatataggtccattcgggatatcagttaataatccatttttatttcccagtaggaaaatgtgtcactttaatgcctaaactttaaaacaagtgtttgttagttgttgtttttgctgatttcttattattttattctatagtttttcaagcatatacaagtatttttatttttcctaacagcaaaagaaaactggtgtgtgtgtgtgattattttattttatttttttagcttacataaaggctagagactgtgcctaggtatgaatttcctctccagtttctaactcaggtctcttcctttccagcaagtattcttaacaacaaaaagaaaaaaatgatatagtcccaatgaataggttacttcattcaatttttctgcagacagcggtttgttaataactagcacctctgctttttcttaataacagtagagaagtttgatttagacattcagatatgaaatgactaaatttgttctcaaaattggagtatgtgagttttttctaagggtaagagaagtaagaatactgtcttcagattcaaggtgcaatgctaaaatagcagttacccagaaggtaggtctcgagaaggaatgataagagttaggatcctgtaacaccagcagacarttcagtacaggaaaagcagggttttatgaagcatttaactcaggagctgtggacaattctttctgttctccttttcccttccctaagtaaatatctgatgcttgggcatcctgtatgaatagaatacacattccctattcttcttgccaaataaaaatattcctctatccttgttagttctgcagcaaaatggtttcagtgtctaggctttggagctagactccgtgagttcaaattcttgcaccatcatacatgtgagctctatgaccttggcaagtcacttgatttcagtaggccttagttttcgtatttgtaaagtgagaataatttttgcttatttcccagggtggagattaaatgagataattaatgtaaaatatttaacaaagttctgggagcatagcaggtgctcaataacggtatatgttctcctgatctaaaattaccatggtggatgaaatttcccaaggtgaccttgatttttaaaaaatttggactcactgtaggactgtatgttttgcttttgggtttgggaaatatgctgacaatacctattacttctggaaatgaaggcacccaaaaactgtaatttaaaaatgaatggtatgtatgaggggtgttaaagcaaactaaatatggcctgagaaggactccgtaattctatatttgagtccttgtggatgaactgtaacctagcttaatagtcagacaaaattgaaaacctaacttagtagtatgcacctgtgacaagagctgagtgttagccaatcccagtggccatacttcaaccattcatagactgctgaatgttcaaactgcgttcaaataaggcaaacgctgagttgtaaccaatctcactgtttctgtacctcacttccgattcctgtacgtcactttttttgtctataaatttgttctcaccagaaggcacccctggagtctctgtgaatctgctgtgattctgaggactgcctgatttgcgaatcgttcattgctcaattaaactcctttaaatttaatttggctgaagtttttcttttatcaggggtgtcctagtaagttattatttgttcagtcgatcttaactccttatgctagattaatttatctgcacacagaaaagcaaattttaaaaggtctctcgtatattctaggtagttattctagatccttttctttattgcatttccctttctccatttgtttttagatttaatttgggctgtctttactttgtcctggattctagaatctactccactttgaaattggcttctggctgcttcagatgtgataaccttcaggacagcctttctgtcattttgggccttagcacatttagctcaccctcccccttcactcctaccctgcctggaaggaagccctatggttaggaaaccccacttcctcatgcttttctctttagttctaagaatctccctgtgaatggttgctatggttgatgaagacacagatagttttatcagcatccctgcttgcctggaggtttttaaattgttaatgttttaaaaaaagagcatgtatatgtgtttgtggtcccttctacctttctttttccaatacccaagagaaggtaaagtcttaagcctttctttcctgagagacagcccagccatctcctaccccacatgatttccactgggaatattaaaggcactgtaatatctaggaaggagagaaatttcagggcagggaggttttccctatgctcctataccttcagcttctatgtaagatgaaagtagaccttaaaagtttaggcattgggatatcatctgtcagtagatggaacttgcaacttctctttccaagttctctggcttctttctccatgcagcttagtaatggacatgtagcctataccagctattcactagatttaaaatccttatttcagatcaacaagaggatgcagcgaggtacaatcttccatgtttgtgagtagggagaaggagtatttcaccagaaaggggcagtggaagtctggcaggacagcagtactctgggtccacatggacagcatgttcagagcaagaatccagggaaactctaggtaaacaatgcaacactcagcctccttggaacaggaggggactggcgttccacatgggctgagataaggcagaaggccatggtcaggagaagggaaaagagctggaggggatatctgtatgagaagacttaaaacctggagctaagggagtgtgaatactgggatccatgactggcttgttctttgtcaccattactctaacttcaaaaatgcttcacggctgggcgtggtggctcacacccgtaatcccagcactttgggaggctgaggcgggcggatcacgaggtcaagagattgagaccatcctggccaacatggaaaccccgtctctactgaaaatacaaaaaactagctggccgtggtggcgggtgcctgcagtcccagctactcaggaggctgaggcaggagaatggcgtgaacctgggaggcggagcttgcagtgagctgagatcgtgccactgcactccagcctgggcgacagagagagactccgtctcaaaaaaaaaaaaaaaaaaaaaaaaaaaaaaaaaaaaaagcttcacatattttatgtatcaataactaaatatttgctcacttttccttaagttgatcttgattcaatcttaaggagttggataacccgagcttatttcatggtgtcttccctaagaaaccttggccttttggtttatattagaattaaggtccagaaaaaactaacacaatttcttagaagtccaacaaatcacttcagacagagccagacttttcagggctgctccaacaagtttagggtatacctccaacatgaggcctaaagcgagtttggcttgggttgaggatgtagtccataaaacaatgatgtttaatgatatggtaagatgggaggcatttatttacatagctgttattaaaggtactataaccaatttattggtattttaaatgttttattatggagaattttaaacatactcaaaagtagataaaatagtatcatgaattcccagataaccatccagtaccaagcccatggccaatctggcctatccacacctccatctatcccttcccttgagactattttgaaggaaatcctagatatcatataatttcccttataaatatttcaggatgaatctctaaaatgcaatagcttgtctttataacaaaactaacacaactgaaatatcattatcacatctaaaaataattccttaataatatcaaacatttagtgtcgacattttaattgtctcataaatattacaaataggggttttccatggtgcttatttaatcagcatccaaacaaagatgagatatggtaaattattattgtattttaaatatcttttaattttcatgttccattttcctctccctttttccccctcttgcaatgtatttgttgaaaaaatgtgcttttatgtcctatgaactttctcagtctgagtttgactgactgattacatctccttggtattttaacatgtttgtccatcctttgggttttctgaaaattgctagctaaatctagagtcatcatcggatccaggctgaatttttttgcatatattaatttttacccaaaaaaactataagaataatctcaagttttaccaaaaacttattaacacattttttctataattcatgccagaagatattacataaacatcaaaaatttgaaatttaaaagtgaacaaagggcttcatttttgtggaaaacaacatacacactccattaaccaaaaataaacacaagaaaagttcaaaaaagcccaaatgctatagggacaacaacttcaaattaacccaaggatctaaataatgcaaaacctgatattagctacatgctttccagccattaaaatagagacttagatgttgaaaactctatttttgattcagagacgagctttgtgccccgggttttggttcagtttgcctcagctaccactagagggaggccaatatgcatttgaaaaacccaaacataaaaaattggcctgaacctggaagatttccatttttaagttctttttaaaatatcaaacatagttcttattcaatattacatatcatttattttgtgttttactaggaagcttcacactaaattaattttgtatttggaatctgcctataatgcaaaggaaaaatacagcccttttgtggcctatacaaagtacatgatacaacaggtacccctgaagtcctccttcaccccagatcttttcaaggcattgaaaggtacaagaatacaaggggactatgtcatggtgactaggttaagtttttttagagattctaagtgctttttaagaatgcagtaccccaactcccttacaaattacaattttaaagcaataaactataaaacaagcataaagaaatccaacaaatttctattttccgatgacaattaattttttctggtgagttagaggagaaatatttaattccccccccacccaacaaaaaacattactcaatactcctttgctggagggctaagcacacgcttagtcagctttatagataatccagataatccagttctgcctcccatcctgcaaataattagctaaaatgtcggcactaactaatctctcttttgccacaaaatatgcacattccttataatgcttatgctttacattaacctagctctttaagatttataactcattttcacatgctatttcattctatcctcaaaactttatttttatgggagagtatttttcctgctttataagaaaccaacactccaaacaataaaaatttgtttacaaagtttagttatatttcacataaacaggactcaaattcagtgcttctaacttctaaaactcaggtactttatggttctactgatgaggctattgtcaggaatttcacttcccctatgaacaatcctgtttctcattgtcaatgcctggaagattctaaaagcatcaaagtcacacttatgctttccatttccgtagacttggcaaggaactatgcgggcatgcactgaatggccagtctcagtgccaaatggaaaacctatcctcaggctccttggctctgccaggtcagaagactcagagcacacactacactgcagctgttgaggccatgggaagtaggaccaatggagtgcagccctatgaggcatatagaaggtgctgaggttggagtttttcatggcaataacaaatgtacctatgatcactgatcacagacatctttcccagctggtgggggcagtggcaagtctaagccataaaacccagcagaaataaaatctgtccagggctaagtggtgtgctgatgattttttaacaaccagctcttctggaaaggaggaaagaaagccctggtttgtagtttgccaaaactcccaccatggccaatttcgagtgtaccaagcaagcatcatatcattaaatatgaagttgagaagatacgctaacaatcagcacttgcactccactcctcagtccctatgcctagagcaccccactctggctgtgcaaatattaggagcagggttgattagaaaaccctccattccataccactatggaatctatggatggattttccatgagcacaactggcttcttggaccatcccttacttctcttcaagggtaaagaatttatttatctaattggtgtgttagggagaagcaactgagcatgctgagctaagctcctttctgccctttctctcagggatctgtctgcctgaagacaatgtgctttctgttttggctgctgtcatgagataaaagtcagtggccttatgccacagttttcaggacagtcctggcatttcatcccttcgactctcaaaagtgtcttggtttgcacaacaaattatgtgtcactttatgtaaaagggactaaccctgcagagcaaggcctggcaggcaaccagaaaaatggctatttctggtgcagtcctaggaaacctactgttaccacacaactgagccacattcttcaatatcacttttattgataataaacctgacattttgatcttcatcggtttgattattttatctaactctagttatatgccaaacacaaggagtaacaacagagccatcattttggagactcttaaaacttcatcaaactgagtgccctgaaaagtgactggttgtggcttttagataagaagaaagtggaagtccacacacacagaaacaaaggagactaggatcattaagacaattatccacaagctcccaaatctacattaagaaaacaaaatactaaaaatttttagtgagagttgactcataacagcactgctataataagaatttagaattaaattgaggtggctttataaaccgtgggtcaccaccacaaatatgtagggtacaccactctgttgctgcctaagcgtatttaagctagctaccactagagggaccctaatcgccaaacatcatttatagctaaccttaacagcccttttcctttccttcagacccttgtttatctgtatagatgtagttgtggaacaccaaagtggcactcaaagaaagtaaaataacaaagttcttaatatttgtgaagtactgaaacatgcactgtttcagactgtgtctccaaattaacctctcttcttaaagctcacctgaccataggtttagttcaaatgtggaatggatcatttgctttttaaaagccacatccaattatagagaatcataagttaatattcacatccttttgcgattacaattgtgttaaatgaaatacttctttcaagcaagtaagccattactatgctttcaaactcctcccaaaatcagtgtctggggagtaaggagtatgcaaacctcaggataacacacacagagacacacactcatatagagcacaggataaaaagttatacaaaaggaaaagtagctttatattccagattatcacaatcaaacagttcagaggagatttacactgccctggacctgcctaactttaactaccagcagctaagttgcaagcacaccaggaaccttgacttcagtgcatgaccaaaaacagggtggggagtaacacagcaagaacatttccagacaattctgctgatgcacttgttggttcggttattttcttgccagggccacacatacacacccataggcagtgcctccaggtcacgaaacacactggaaatgtgtatattgttcagtcaatatcaattagacaaaaagacaaaccatataatgcactatccaaagaggatttgttttttgctttaatcgttgattttgcttgcttgctatagctaagacaactagtcacctacacaacatctattctcttctttttccttaatgatagaactttaagaactttaattttattccaagtagtgatgtatccagctaaaggactgcatttgccaatctctcctgcagatagggatggttggtaaacagtaagtgggcctttagagaaagctccttaagacaaacagctgaagtatgtctttttgtcctttctgcttcctccctgattagaagacatatatgatgtctgtctgggatcccagcaaccatcttggaccacgtgaaaaccttggggatggaaatcacatgctatggatggcgaagaaaactaaaagcgcctgagtcactgataccactttagagctrccatataagcctctcttaagccttccttttatgaaagaaatataaaattccatcttgctgaattcctatctgtgttactagcaattgaacaaytgatttgccagccatctgaattacccarattgtctgataattggtcaatacccacttcattttaggatatagaaataaagcttcaaaactggccataatagctatggtgatttgatcctcaaaactaaaaattaggtcacacaataagaatagtctgaatccacttatgggagaagcagatcagcttatttgaaatcgggttgtgctagaatacccagatcatatgattctattttcagttattaagttcaagcacgttgcastaatcctgacctgattttccacttcatcaggaaaaagataagtttgcgtactgtgtggtacacactcttctaactagaaacttcagtttaatacacaatctctgaaatttatttcacaaagtgttctgagtttcctgaaactcaggttccccataaactttgggggttttgttgtaattacacctatgctcctttctctgtgctcaggaagaagcattattggcacctgtatcctgtagaactcagttctatatatttaatatttgccttacctaagccctctatatatgtttccccataaaaggataataatactaacctttcctccagtgtgtgttgtgatgtttaattaatgtttacaaagcatttagtgagctgcagatgaaagactctaaggaagcataaagcaatatcattagactgactcatcagctacttttattagctatgcaaaatgaaagccatgttgctacagccaaaatagttatggatacacattaggtaaaaaatataaattccagcacaatttaaatctatataccacatctacaaagcaaacacctgaagctccttaataggacaatttttttctctgataagtatttgaaatctgttaacatttaaaaatataaacagattagaaggttagggtaatggtaaaaacatgatactttggtaaacatatgaaactctttacactttcttatgtgaatgaagatttcatttgcaatgatgtgaaactctctacgatctgaaaaaaaaaaaaaaaaaaaaaaaacttttaattgattctttttcatttgaaattagcaataatgacctgaattccacaggagataaaaacaataaattgaaaaccttgaaaattagttcaggtaatagttcttgagtttctctgtgccctatgttcaggtgcaggctattttatatatagtcttcaacagctttcaaccaagtggtatacaactgtatttatttaataagcatatattaatattgtatattttttctgaaccaaggaatcatttacactatacattctagtctacaatgtaaaactaaaatatcattttattgtgtgacatggagctctttttcaagttaaaacagctctgtatcctagtgtttccttgctgtgtagcagaatgagaattaggaactaggaagagcccagctggtaaggagggttcgcttttttataattagttgggttaaacccataatatccatctataacttatccagggtattctgtttcaaagagaagtaatagtcttaaaacagaaaacatgcatttgtatgcaygtgtgtgtgcatgcacacacacacacacacacacactactgtgcagtcaaagaacagactccatgtcagttttgaaagacataccaactgggttcaacattacattgtgtcagagaatgaagtgatgactatccttcactcaaaaaatgcatagttgaatttttcctccaacttccaatttggttaatttgagaacttgtggtttagtaggttacatggaagattaaggagactcacatccataattgtcccaaaaaagcacaaagttaacattctcctgagttgaaagtaaagactattatggaaattaattaatcccttaacaacaaccacaacaaaatggcagggcactgcatggcagcactgcagggtcttttaaaggtaaatggatttcatgccattttaaccagttcaagtataaagtcatccaagttttagaaatattctgaaaccattttcttctgcctctttaacggctactttttgatctccattttttttcctcctctaaatgtgttgtgactcatacatttacaacttggatgtccccaaaatagtaaccacccccattctattgccatatatttttgtgttataaattaaaatgggaagaatacccattcagaatataatggaaaacagcatcccccaactcgctcctgaagtatcttcatgaattctaaagaagcttaacattattctgagtcatttcttgcttggatttcttgcttctactgaattctccaaagtaaagctaaattctccttagctttactttgcattgacttaataatatgaagtacatttctcttgaccattcctttgaaactcacaaaacttcttgtttctctttatatcactcctatacctcagcatgctctgagttttattttccactgtaatatggcccatcaaggtgattgaccaaacaaaaagtttttgaggcatattcttgatagcttttaaatgtacattgcctctcctccatatgtcaaattaactttcccactacagagaattcttctggcacctataattaatattctctttggtacattctttcctttagagttcttatttagtttgatagaaaatgactcccacatttcagtcaacgtttatctctcttctttattctggacttacattttcattctaaaagacatttttgccaaaatttaccaccaacacctcaaactcagcacataaacaaaaataacagacttttttgtgaggcttattctgtgtggatcatcaatatagactacagagtcaagtaacaaagatttattctaggaagaagggtgggatccttcagttcagaagattacagtttccaatgcctctggaatctcaaaagagggactgctgaaagaggatggaagaataataatttaaaggtgagttatgaggtcaacctagatgtctagcatttcaaagccatgtcatccaaagttaagggtatcatctttcccaaacaaactcattctgttcctgatgttctgaattctgttaatgsaaccacaatttttctcatcatgcaatttcaaaattttaacttagactcttttgtctctggctctatattccttcagttgcctagttcttccagttcagactctgaaatgtcagttccattctcacctttgctactttacttccagctcccatacttttccaattagattgttgaaatgggtacctaaaatatctctctatcctcagactttttcatctaatcgaattcttcccatctgtgggtaccaactgataaattttcataaagtaccacactgatggtatcactttcctataaaactttcaaaggctcattattacctaacaaattgagtgcacactccttagtaacctctccattgcaattccaagggtcagttctccatcctcatcttattcaaccaataagaagcatttgagaattaatctgtagcctggatttctacagttggtcccttgcttcaacgcttacctaataatctatttcacaaacagccatggtaattattttaaaacatttcagattatgtcactgttctgatttaaatcctccaatggctttttaaaaaatctcatttggggtaaaattcaaagtgcttataatggcctgcaagatcctatataatatggctggctatgcactaccagaccccatcatctaccacaattaattattcatctccctaatcctactctagccacaccagtctttttgctcttacccaaggacagcaaacatgctcccacctcttgggctttgtacgcattccactcttcttcctgagacctacagggccctccctaattcattcaaatgtctatacaaatgtcaccatagtagagagttctctctccaatctatcaaagtaacattccccccagcctacccagataatccctattatctgtaacacttaacatcattagaaatatcatagttatttgtgtaatattttttattgtctgtctcttctcactaaaatataagcaccctgagggagggtcttagtttcttttacaactattttcccagagcctaaaagagcatactgcacttaattcaataaatatttcttgagtgaatgaataaatgagtctcacagaatgaacctctctacagaaatcctatgctagcccagtgaaatccaacctgtgggccaaagatctgggaagtagtaaagtaacgtaaaggggtctgtgaatccacatccttccgattattgtctgtaaactaaattaactaccatattatactattactttaaaatgtattaatttatagtaatcttaccaacatgtatttttccaaaggatagtagcagtacagtttactattatgtaggaacctaccaattttttcttattaacaaggggtgttcttactcaaaaacattaggaagctcactgctctagccaaacgaaaccactgccttttcatcaagttgtctataaacattcacacctgttcctttgctaatatgtgtatcttaactagcaaaactttttcctgccctccactttccaccccatcctccaattgatttactgtttcaaattctaaatcatcattatctacacctgagtgagcatatgcctaagagctggcaataagacacatgatgactggctggggtgaggaatggaaaggaagagccagaagaggaaaagaagtgctacaagattcatgtgctagaactctcaagtccaatttcacctgcctcccagtttgcctacagtccctcttttgggggtattaagcacatccagcaaagtctttccaccagcaaagcccatccactctgcatcctccataaatacaacacactaattctagaccctgcactattttttcatactagtcaaagtgctctgctcactgctttctaccaaatagcaaccatcacataattgttttggttcaaccttcacctgtttctggaacttttccctggctagccaacagcacattcttattattcctctatagtgcttcagcaatttaatacacattttttcaaacaaattttctactctttgataatttatttttaagtttcctttcagcatcatgcaatatgcccatataacctgcccatgtaccccctgaatctaaaataaaagtttaaattattttttaaaaatgggccaggcaaggtggctcacacctataatctcaacattttgggaggccaaggcaggaggattgcttgagcccaggagctcaagaccaacctgggcaacatagagagacctcatctctactaaaaatttgtggtggcatgcatctgtaatcccagcttatcaggaggctgaggtggtgtttgagcctagttcaaggctgtaatgagctatgatcacaccaccacacttcagcctgggcaacagagtgagaccctgtttttaaaaaaaaaagtttccttttttcatttattctcttaaaatgtgaactcctgcgaagacatgagagcctcagatatttcttttcttttataggtgtctttccattatacaataatgcctagtactagactaggaacagaagagataaagaaagatatcctatgaaggcactgaattagcctttagctggattcacaaacctataggccaatttaaattgtactcattttcaaatttctttaggtcatgaactagcctacttattgcgtcaatatctataaattacttccccaattctgtcctttctaaagtgtatatgctctgtcctctagcagatgatcttgttcctgaacttcaatccaatgagctctcattgaactccttaatgtaaaacatgagctaggcaatatagagacatactccttgccctaaaggaattcataataattccttaaagaaaacatttttaaagcacctggtatgtgttaggcacccaagaactattctatacagcacagaaaatgagatattcacacctataaacaaaagacagcgtattacattccaaaagaaaggcagtcggtcatatgaaaatccaggaagggaaaaattaattctgaacataataccaaggaatcttttattgaggaactgtcctctgaataggaccattaaggagaagaattttcatgagaaaatgagtgagggataygctagaaaggcagttgtttctgaatctaatggtcaaaaatatgggttttgaaagtcagagggtcttggttcaaattgtatttttgtcacttacttgatgaacatccccaagtagcttatttaacttcaactgtggtttcttcatttacaaaatggagataatgtgattacacactgcataaaaacagactcttagctgctgcctggcacagagtaagtgctgactaaaagatagcacttagtttgtgttcccccagaagaagaccatgactcaaagatccaactacaaatagtttatttgaaagggggccacaggaatcactgataggaaggggaggaagggagtcaaggaagggaaggcagcacacaaagtgtgtattattaagtaaattaccactactggagcctaatctagctggaaactccaggagccagtgtcgactcaaaggtcaagaggagcagagaattaaaaaccaaccacaacaatcaaggtcagaactgctcccagactgaggagcagaaattcctcttctccagcagaggagaaagctgtcagggaaaracacacagatacagttaaggcagctgtgctaagtggtaagcctcaaggggatttgggtaaggctctgcccacactaatacaatatacataaaaatatgagtatatatatgcttgaggctataaggaatatgtatcagaaatttatctaattgatgtattagttaaaaataaaacatatatgataaacaatattccaggcaaagtttttagaagatgcaataatccagaaaaaattttacacatgtataacaaattatcatactgaatataaaaaagaattactacatatccaacataagaacaacccaataaaaatagattaaaagtatatgaaagatgnnnnnnnnnnnnnnnnnnnnnnnnnnnnnnnnnnnnnnnnnnnnnnnnnnnnnnnnnnnnnnnnnnnnnnnnnnnnnnnnnnnnnnnnnnnnnnnnnnnnnnnnnnnnnnnnnnnnnnnnnnnnnnnnnnnnnnnnnnnnnnnnnnnnnnnnnnnnnnnnnnnnnnnnnnnnnnnnnnnnnnnnnnnnnnnnnnnnnnnnnnnnnnnnnnnnnnnnnnnnnnnnnnnnnnnnnnnnnnnnnnnnnnnnnnnnnnnnnnnnnnnnnnnnnnnnnnnnnnnnnnnnnnnnnnnnnnnnnnnnnnnnnnnnnnnnnnnnnnnnnnnnnnnnnnnnnnnnnnnnnnnnnnnnnnnnnnnnnnnnnnnnnnnnnnnnnnnnnnnnnnnnnnnnnnnnnnnnnnnnnnnnnnnnnnnnnnnnnnnnnnnnnnnnnnnnnnnnnnnnnnnnnnnnnnntatatatatatatatatataaaatcatgtgtaaattcccagatatattgctaagggtaaagagcaatggcatacagtggtatagaattatactgtgaaagttgtcagaatcaaaatggagccacttgtgttaaaaatcctaaaagacagagcctcagaaggccatgaagagagggttctcatgcaccaatgcctgataacaagaactatcaccaaagactctgaaaaaactacaaacttgcacaaaggccattgcaactgtataccaaaaagaaaaaaaaaatactcctgtagacatctacccagcaattgtctgtcagccttggactgtcatcacccttggtattgatctctgtaaccaaaaataattatctcaaaccaattatgtaattcttctcatttaaaaagaaaacattgtcttcttttaccctcctgaacacacacatagtttactatggcatgtgtattcccattgtattcctattcgcaaaaaaatatcattttcttttagagaatcttcctctctgttatttagtttcgcattaatggtgtcagcagtgaggccaaagttagctcacctttgatggattggtggcctgtggaattgagtgcagtactgacttcaatgttgccttttcttccatagtgaatcttctctaggactcttggactccctccctttggtgagttcttttttactttatttgggatctgatttggttataaggccaccttaaataaaggaccttgcatccctcctgggactataaaagttatttctggcgagccctttctggtaaaagacaagtgtccttctggtttgagttatctggtttctacggagtttacattctgtctgtgaggcattcttttctggtgaattcacttttgatttggtgcatccggcttaatattttgtttgatctgcatggctgggttaaaaattctgtgagcactctgattttggtttcattttggttaggttatgtgtgtctgtaaatgatttggctctttttcccttacttgtttctgaacatcttccaagagcaaaaataaacattctaaatagtaggcatgatatggccaattaaaagccactgggatggtcaccatgatctaaaccaccagtgtaaacttcctgacaggatttatagaattttctttgctctggagaaattagtcagaaacagaatgggattctcaaacattcaggcatgtcaagctttctgggactccagctggctacatggcttttcctcgtgcatgtttttaaattaatggccatcatgaatatcatttgaagtccccaaccttgtttttttcttagaattcaattagaaactgcaatcaactatagagttaacatgtagagtctttttagttatctttttttttctggatactctaaatctgttaactttttcatttgtgttaagataacacactgttgctaatttcaaaagctgcttagatctttttttagagcattttaaccaggataaggataaaaatcttaaagggctttcaaattaatggctttacaaattacaaccgcttcatggcagccaacaacctagacaccttttggaaatgtaaattgaggtttccctaactattaattgcttagggtgatgaaacagttaattgaaggattgatattctayacggacataaagagatatgtgtttatacaaattaaggtctcagatcaaataggtcaaaatcttgaacttagcgcaataatacaaggtatctctggcataaaaattgctttgtctgtctgttacacgggggccagaaacgctgaccaaaaaaaaaaaacaaacaaaaaaaaacctgccaaaatgcttccctgtccgcattgtctagtcaagaaaaccagatcagcaaacaaaagaaagatttgttactaaaaaatttaaggcaacttggagattttgactttcttacagaatttagccagtcccagctaaaatgtaaacaattgaaaatttaaccctaaactcatttaaaactggaaaaaaagatgtgagatttatttaaaaccaagatgctttacctaaaaattttggtccacagcttttcttagattatctattagggaaaataacacttatccacctgaacaggtcccattttgtcaaaaatacaatttgggtccaactatttttttataaacttgtgagtttgtattactatgctttactatctagtgactgaaattctaaaattaaagctataagatctttattgtgtgcatgtatatgtgtttatgtgtgttgacatgtgttgtatgctgtgtctaaattgtaaaatctggtgtacttggctagaaattccttaagaaatcctattcggattagctcagataaataagcaatcataaaatatatagtaattaatccaaatgccttttagttcatacaacttaagtaaatctttgataaataagctgttggtgttttattggtagggggtggtttgttttgaggtggggtcttgctttgttcctaggctggagtgcagtggtgctcattgtagcctcaaacacctgtgctcaatcaatcctcccacctcggcctcccaagtagctgggactacaggtatgtacccccatgcctggctaatttttgtattttttgtagaggcagagttttaccatgttgctcaggctggtctgaaactcctggcctcaagcgattatcccacctcagcctcccaaaatgctgaaattatagggatgagccaccacccctggcccaataaactggccttgaatttgttgataaaataaaaacagaaattttttcaaattgtcaatcaatagatgaatgaaaatgtcatgtatataaatacacatgaatatatctatatacatgtatataaatacacatgaatatatctatatgcatgtatataaatacacatgaatatatctatatgcatgtatataaatatacatgaatatatctatatacatgtatacagatatacatgaatgaaagaaaatgtcatgtatatagatatactcaatggaatctaattcagccattaataaagagtaaaatcctgtaatttgcagcaacataggtggaactgcaggtcattatgctaagtgaaataagccaggcacagaaaaacaaatatagcacgttctcattcatatacgaaagcaaaaaaattggctctcatggaggtagagagtaaaatggttaccagaggctaggaagaaaagtggggagggaggcatgaagagaggttggttaagggtacaaaatacagttagatagaaggaataagttctagtattcagtagtacagaagggaaattatagttaacaataatttattctgtatttcaaaatagctagaaaagaaaatttgtactatttccaacacaaacaaaagatgaatgtttgaggtgatggatatcccaggtaccctgatttgatcattacacattgtatacaggtatcaaaataccacatgtaccccaaaaatgtgacaactattatacatcaatttttttttattttaaaaacaggtttcggctgggtgtggtggctcatgcctgtaatcccaacattttgggaggccaaggtgagtggattacatgagctcaggagttcgagaccagcctgggcaatgtaaggagacattttgggaggccaaggtgagtggattgcatgagctcaggagttcgagaccagcctgtgcaatgtagggagaccttgtctctactaaaaataaaataaaataaaaaatcagctgggtgtggtggcacattcctgtaatcccagctactcaggaggcagaggtgggaggatggcttgagcacaggaggtgaggttgcagtgagccatgatcgcaccactctgctctccagcctgggcgatagaaccagatcttgtcttcaaaaaagaaaaaacaaggaggaaagaagaaggaagaagaatacagaaggaggaagaggaaagaagaaggaagaagaatacagaaggaggaggaggaggaagaggaagaagaagaagaacaggaagaagaagaaggaggaggaggaggaggagcgggagcaggagggggagcgagagggaaagggggaggggagagaggaagagaaagaaggagaaggagaagaagaaaaggaaggaaggaaggaaacaaggaaggaaggaaagaaggaaggaaggagcaggaatgaaggaaaggagggagggaacaaggaaggaaagaaggaagaaaggagaagaatgaggaggaaggaaaaagaagaagaattaaaatacagattttaataactaaagttgattaattaatttttttagaattctaatgaagaaactgctgaattcatgaaactactcatcaagatcaagcagaacaaaaattacatgacattaagtaactgctgaagataatgtttttatgactttaatttgaaagatttttgactcctaagtgttttgttttccaaatttaaggtaacttttttcttaagctatctatagtttaaagcaatacggtaaagcatacttttgagaacaaaggtggaaatatttactttttcttcttacttgatccctccaaaatttggaaactcttcatgagtattcttatggctgtatggttatttggataagttcagtaaaaatctactttctctttataacagaatacaattggaagcattggctatattaccaaggcattgactggaatatcatatttgagaacgtgcatagaatgcctggtttcaagggtttccagccttatagtgagtgagtaaatattgtcacttcctggcaggccccaaaaaccttaagatggtaggtaaaacctaaaatctaccttggtttgacttcctagcctcaaaaggttttaaatctgagattttcatgtgatcaatatagagataaaaacttatgtttctaaagaaaagctataatatatgtgttattagactgtagccttgtgcattgtttttgagtccttgctatctacctacagactagactatatcctgaattcttctagagtcctccaattcaactttctcccatggaattactaaaaatgagacctcttttgttctgaagccctgaaaactaaaactagatgaattttaagggataagtttcatgactgatggatgtgtcacacagaaagttaaacaaaccacctgatgccatagccagggacattgaaactgcaaaccaggataagaagttaatgtcttcattcctcagacagcttttcccaagacctcagaacaaccctccatatcataatgagactcttacctctcttaatgcccacctttttcacttggcaagataatggtgacattaaaagttaacaatcagaaccttctgctggtaacttgacagaacctatcctagaacatcctttttttcttttcttttctttttttttagagatgggtcctaatctgtgatgcaatcatagctcccttcagcctcaaattcctgtgcttaagcagtcctcccatctcagcctcccaagtagctagaactacaggcacataccactatgctcaatttatttttttactttttgtagagacaggatctcactatattgcccaggctggtcttgaactcctgacctcaagtgatcctcctgccttgggatcccaaagagttaggaatataggcatgaaccaccacacccaagcaaggagatcctttagtccacctagtaggtgactttggcatcatccccagtacaatgattgatcactctctgctttcattaaatccagtcataagatattagatgacaaaattgctcaatattaactattggctaataaggagatgtctgtagctattgctaatactacatgctgtacctgggtatatycctctgggaaagttgagatccataaacacaaaakgagaaaacaggccacatggttacaagtcttacttaatttcccacagtaggatttcccacaatcctactacttgatttattcaagtagtagcctttaagcctagtccatgactcaaaacttttatacaaactaagcttattaatttactttgcattttccctttttaaaaccttatacctattgcttgttaagtttttggagaagtatgactcctgatagaataatactggccacgcactttgagatgataacaaagacctatggaactgacaaaattaacttaacaatggattccaggtagccttagcctgaaagccactccctcctaagctcccttgttgctcaaatgtggctaaaaatgttctgatactgactcctacttgccaaccacttccctcaaacatgggaagaccagaccaaaccaggactggtctatcccaggactgaaggacaatcaaaccctaactacaggatgattcatcagtgacgctttggagaaagatcctgatccaaagggggaaatgtgaaagttgtcagaatcaaaatggagtcactagtgttaaaaactaaaaaaatagacttggggaaagccatgaagacagaattctcacgcactaagccctcataacaagaactatcacaaaaggctctgaaaaaaacccacaaatttgcagaaaggttatcacaaccctacacacaaaaaatacttttgtaagaacatctgcccagcaactgcccttccaacctcagattggcaccaccctttgtattgatccttgtagccaaaactaattatcacaaaacaattatacaattgtcatttttcctttaaaaatctttgtcttcctttacctctctgaatatatacatagtttactatggtatgtatatttccattgcaaagccccattcctaaataaatgttttcttttagagagtcccctctattggttttttaagtagacaatagtgtacttaaaacactctcatacataatacacctctactcaagtttacaagaagtaacaatcaattttctatgtgtacatttacatgtatattacagcttaaataatattcagaagcatccacaaacctacaactatgattactgctaggaggaagtaagagattatggctgtggtgctagtcaaagaaaagtttcatcatttctgtgaagtttcaatctggggaaagaagcattgttcatgtattatttgtgtaattcatactaagtgtaaaataatcaatgtgtgtggggtttacttctatttttgaaagtgattattatttcaatagttttgggggaacaggtagtgcttggttacttggataagttctttaggtgtgatttctgagattttggtgcacccatcacctgagcagtgtacactgtgcccaatgtgtagtcttttattcctcacccccacctcacacacttttcctagggcccccagagttcattatatcatacttatgccattgcatcctcatagcttatttctcacttataagtgagaacattcgttgtttgggtttccattcttgagttacttcacttataataatggtctccaattccaaccatgttgctgcaaatagcattatttcattcctttgtaaaatagctgagtagtattccacagtttctgtatccactctttggttgataggcatttaggctgcttccataattttgcattgtgaattgtgctgttataaacatgcgtgtgcaagtgactttttcatatagtgacttgttttcctctggttagatacccagtagtgagattgctggatcaaattgtagttctacttttagttccttaagtaatctccacactgttttttatagtggttgtactagtttacattcccaccatcagtgtaaaactgttcccttttcaccatatccatgccaatatctattattttttgattttttaattatggccattcttgtgggaataaagtggtatcacactgtggttttgatttgcatttccctgattattagtgatattgagcattttttcatatgtttgttggacatttgaatatcttcttttgagaattgtctattcatgttctttgcccactttttgatgggattatttgttttttttcttgctgatttgtttgagttccttgtagattctgggtattagtcctttgtcggatgcatagtttgcaaatattttctcctactctgcgggttgtctgtttactctgctgaatatttcttttgttgtgcagaagctttttagtttaattaagacacatctatttatctttgggttttgttttttgttgttgtttttttttgttttgtttttgtttttgttttgcatttgcttttgggttcttggtcatgaactctttgcctaagccaatgtctagaagaatttttccaatgttgtcttctagaatttttatggtttcaggtcttagatttaagtttttgatccatcttaagtttatttttgtataaggtgagagatgaggatccagtttcattcttctacatgtggcttgccaattatcccagcactgtttcttgaataatgtgtcctctgcccattttatgtttttgtttactttgccaaagatcagttggctgcaagtatttggctttatttctgggttctctattctgttccattggtctacatgcctgtttttataacagtaccatgctattttggtgactataaacttgtagcatagtttgaagtcgggtaatgtgatgtctccagatttgttctttttatttagtcttgctttggatatgtgggctcttttttggttccatatgaattttaggattatttttttctggttctttaaagaatgatgatggtatttgatggcaattgcattgaatttatacattgcttttggcagtatggtcattttcacaatattgattctacccgtcagtgagcatggaatgtgtttccatttgtttgtgtcgtctgtgaattctttcagcagtgttttatggttttcttcgtaaagatctttcacctcttttgttaggtatattcctaagggtttttttgttgttgttgtttgtttgttttttgtttgtttgtttgtttgcagctactgtaaaaggggttgcattcttgatttttcagattggtcactgttggtgtatagcagtactactgatttgtgtacatgatatttttatcctgaaattttactgaattcatttaccagatccaggagctttttggatgggtctttagggttttctagctatgcaatcatatcactggcaaacagtgacagtttgactttctctttaccagttaggatgcttttatttctttcttttgtctgattgctctggctaggacttccagtactatgctaaatagaagtggtgaaagtgagcatccatgttttgttccagttctcaggggaaatactgtcaacttttccccatttgttataaagttgtctgtgagtatgtcatagatggcttttattaccttaaggtatgtcccttctttgctgattttgctgagagttttaatcataaagggatgctggattttgtcaaatgctttttctgcatctattaagataatcatatttttgtttttacttctatttatgtggtgtatcatatttattgacttgaatacctgaatacccggtatgaaacccacttgaacatggtgtattatcctttttttttttttttttttttttttgagacggagtcttgctctgtcgcccaggctggagtgcagtggtgcaatctcggctcactgcaagctccgcctcccgggttcacgccattctcctgcctcagcttcgcgagtagctgggactacaggggccggccaccgcgcccggctaactttttgtatttttagtagagacagggtttcaccgtgttagccaggatggtctcaatctcctgacctcgtgatctgcccttctcggcctcccaaagtgctgggattacaggcatgagctaccgcacccggcctattatctttttgatatgctgttggattcggttagctagtattttgttgaggatttttgcatctctgtccatcaaggatattggtctatagttttcttatttacttaggtcctttcttagttttaatattagggtaatactgggttcatagaatgatttggggaggattgcctctatctgtatctatttacgctttaaggaagttccattttggtgtattttgaggttttatttcaagatttagaactttatcttttggaatagtttcagtaggattggtaccagttcttctttgaatgtctgacagaattcagctgtgaatccatctggtcctgaacattttttttgttggctttttaaaattactgtttcaatcttgttacttgttattgctctgttcagagttcctatttcttcctgttttttgtttgttttttggttttgggttttgttttgttttgttttttgaacagagtcttgctctgtcacccagactggagtacagtggtgcagtcttggctcactgcaaccttcacctcccaggttaaagcgattttcctgcctcagccagccgaacagctgggattacaggcatgctccactatacccggctaacctttgtatttttaggagagacagggttttgccatgttggccaggcttgcctcgaaatcctggcctcaagtgatctgcccgccttggcctctcaaagtgctgagattacaggcatgagccaccacacctggcctctttctggcttaatnnnnnnnnnnnnnnnnnnnnnnnnnnnnnnnnnnnnnnnnnnnnnnnnnnnnnnnnnnnnnnnnnnnnnnnnnnnnnnnnnnnnnnnnnnnnnnnnnnnnnnnnnnnnnnnnnnnnnnnnnnnnnnnnnnnnnnnnnnnnnnnnnnnnnnnnnnnnnnnnnnnnnnnnnnnnnnnnnnnnnnnnatcttctctcttcttttcttggttaatctcactaacggtctattgattttgtatatcttttcaaaaaccagctttttgtttcatttatcttttgtatttttttggtttcaatttcatttagttctgctctgatctttgtttttttttttttcttctgctgggcttgggtttggtttgttcttgtttctctagttctttgagatgtgagcttagattgtctatttgtgctcttttagactttttaacgtaggcatttaatgttatgaactttcctcttagcatcactttttctgtatctcagaggttttgataggctgtgtcactattattgttcagttcaaataattttttaatttacatcttgatttcattgttgacccaaacatcattcaggagcagattatttcatttccatgtatttgtatagttttgagggttccttttggagttagtttccaattttattccactgtggtctgagagtgtacttgatataatttcgatttttttaatttactgagacttgttttgcagcctatcatatggcatctcttggagaatgttccatgtgctgaagagaagaatgtatattctgcagctgttgggtagaatgttctataaatatctgttaagtccatttattctagggtatagtttaagtccactgtttctttgttgactttctgtcttgattatttgtctagtgctttcagtggagtatcgaagtcctccactattattgtgttggcatctatcttatttcttacrtctagtagtaattgttttataaacttgaaagccccaatgttatgtgcatatatattaaggaatgtgatattttcctgttggactaatccttttatcattatataatgtccctctgcgtctttttaaactgttgttgtttttaacagactttaagtctgttttgtctaataatagctactcctgatgacttgtggtttccatttgcacggaatatatttttccacccctttaccttaagtttatgtgagtccttatgtattaggtgagtctcttgaagacagcagatatttggttggtgaattcttatccattctgccattcagcatcttttaagtggagcatttaggccatcgttagtattgaaatgtgaggtaatgttctattcatcatgctagttgttgcctgaatacctcattttgtgtgtgtgtgtgttattgttttgtacgtcttgtgagatttatgctttaaagaagttccattttggggtattttgaggttttatttcaagatttagtactccctttagcatttcttgtagtactggcttgatagaggcaaattctctcaggatttgtttgactgaaaaagactgtatctttccttcatttatgaagcttagtttagctggatacaaaattcctrgctaataattattttgtttaaggaggctaaagataggaccccaatctcttctagtttgcagggtttctgatgagaaatctgctgttaatctgacaggttttcctttataagttacctgatgcttttgcctcacagctcttaagattcttttctttattctgactttaggtaacctgatgactatgtgcctaggttataatctttctgcaatgaatttcctgggtgttctttaagcttcttatatttggatgtctagatctctagcaaaaccagggaagttttcctcgattattccctcaaataagctttccaaacttttagatttatcttcttccgtggaacaccaattattcttatgtttggttgtttaacataatcccaaattttttggaggctttgttcaatttttttgctttttctttgtcattgttgaattgaattaacttgaaagccttgtcttcaagttctgaagttctttcttctacttgtttgattctattgttgaaattttccagtgtattttgcatttctctaagggtgtctttcatttccgtaagttgtgattgtctgttctttatgatatctgtttcactggaggctttttcatccatatcctgtatttttttttaatttctttaagttggttttcatctctctctagtgcctccttgagtagcttaataatcaatcttctgaactttttatctggcaattcagagatttcttcttggtttgaagccatagctggagagctaatgcgatcttttgggggtgtgatagaatctcgttttgtcatatgaacagttactttttggctccttcttatttggatagactttttcagtggaagattctggaactcaagggctgctgttcagattctttcatcccacatggtgatcccttgatgtggtgctctcccccttcccctagggatggggtttcctgacagccagactgcagtgattgttattgcccttcggggtctagtcacccaatggggctactggattcctggctcatgctggaaaatgtctgcaaagagtcatgtgatgtgatccatcttcagctctcccagccatacataccagcacccggtctggtggaggtggcaagggaatgaagtggactctgtgaaagtcctttgttgtaattttgtttagtgtacttgttttctcaaatgctggttatgctagcagtgaagctttcatgtggacaggctcaggacctctggttagccaggttgttgcaggcagtggaattagctgttgttttctccttctttggagcagggttgttctgacttgctgtaatgtattgagttggttggcctccagccaggagatggtgctttcaagacagcatctagtagaagggggatataatcttaccctatgttggccagaatgagtacttgggtttctcaggcaatgggtagggccatagagcatagagctcccaagagtttttgtcttttgtcttcagctaccagggcaggtagagaaaagccatcaggtcagggcagggttaggtgggtctgagctcagattctttctgggtgaggcttgttgtggccactgtcggggatgggggtggttctcaggccaatggggttatgttcccagggggattatggctgcctctgctgcatcatacaggccaccagggaggtaggggaaagctagcagtgacagacatcacccagctcctatgcagccactaaggccagtctcactcccactatgccccccaaccacactgagtttatatataggcagctggtgggcagggctgagatcttgccccaggctacaatcctccccactgagaaagcacacagggctctcaggctttgctgcttcctgcctgcccacgccatcagctgtggcttgtatacttgtatcggcacttcccattcaccatccccctaccaccaccaattgtggtcaggaaaatttgtgctcagttgaaattattacaaagttcagctgggagcttccttcaccctgtggtccctccccagttctgctggctgccttcccttccccaaggacctctgtgagattaggccaggaatggcttccctgggttgagctggggactgggagtgcctacagggctcttcacactgcttcttctacttttatatttcacctgggtccctaaatccatttcagctctaggtaaggttaactccttttcccatgatctagattttcaggttccccagtggggtgtgtgttcagagtctgacttatccctctatcacactttggaaactcagttttttggctgtcttgtggcatttttctcattatgtgttttgatggcaattaaagagtcactccttgaaagtaggtgtcaagaatgatgggtttgtacttcccagaaagcccagacatgtaaaacataatactgtttgcctattaggctctagtataagcttgttaaatgaatgatgaaacgaggttggagctagaatatgaactaccttaattttcatgttcaagagttggtagtttatttggcagggcagataaattaaatgagatgatacgtttaacacagttcctattgatacattttagcttttatgattaatagtgcatttcaattctatcccgcttcataaccagaagatggagctccaaacatttaaacttaaaaaaaaaaattctcctgttttgttgtattcttggtagaggctgtgctcttatttcgttggttctggttctttttgttccccacctaaatccttccattctaattttgttctcaggttatcaaaatccatttgctgactacagataggaggagtgatctgtgtgagaagctacacatagatcctctttttctacctctggggacttatttgattcatgcacctgttcatacatatttttatccaactctccccactttgttcctccctcttcacatggaaaagccattgtgacttacagttgttacagcaactgtaaacaggtgctgacattctatgcatcctcatgggaggaaaaatgccagcactaccacacacagaatttgttgctatatgcaggaaaaagcatgtgacagggctagaaatacatttttttggactgttctccagtttgtgtccttttgcaacataagttccttagacatctaaagactcatgggaaataattaatttctaatttttcatatcattcattctactacacttatattgatattattaatacctttattattattacctttatgtttattaataggtatatctctagctatttattcaatattcactctttcattcactttttttcaataaatatttattgagcagcacagcagcattacaggagggttatggatttgtggaacacactgacccccatccccaatccctgccatacacatatcctcctactataagtctttaatagagctatccaagaatacatctggctacaaatacctggctaagagttccaggagtgctttaagcaggagcaacagcactgcctattcaaatttatctcttgccctttattccccataccaaaggcaaaaccatcagagattctggtaagtttccactgtggtaaagttctgcaagagttaaggggaaattttcttgcttcatcacttctctgttatactcggatttacatcaccattgtgaaattacactaatatatacaccactgttcaagggaacatttatatacatttggctcttccgtttcttgatccaaattcagcttcaggagatacatgtcttcaccctggatcaaccacctggcattccagcaaaatctacccctactttccagagtcctttaaaggcaatcatatgtctgtatttaccaaatctctcaaaggctctaaatctatatctctaaatatccgatggttatttcatctggcaaattcaaaaatgtttacattgaactcattttctttctctatctacgcttggcttagatgtttgtcccctccaaacctcatgttggaatctgatcaccaatgttggaggtggggcctaatgggaggtgtttgggtcatgggagtggatcctacatgaacagattaatatcctccttcaagggtgagtgagttcccattccattagttcccaagagagctggttgttaaaaagagcctgccgcttttcccaccctttctcttgcttcctcttttgcaatgtgatcgttgcacgtacaagctccccttcaccttccaccatgaagtagaaggagactgaggctctcatcatgcagatgcccaatcttgaactttacagccatcagaatcataagaaaaataaacctttttctctataaattacctagtgtcagatattctgttatggtaacacaaaattgaccaagataatccctttactctctaactctcctcctagctttctggatatcatttttatgcaatcacctacttagtaatctaaattaaaaatcttgaagtaatcacttgatttcacttctaccttaccttccacatccagtcagcaagtcctgtacattctacctccacagtgtgccctcaattcagttcttgcacatgtatttgtcagaaagtttcttctcccacaataatttcagtagtctcctagttatctccattgtcttccttctcaagtcttctaaagagtctacattaacaccatactagggttgccaggtaagatacagggtttcccgtatatttgtttgttaaatctggcagctttgcacatattcatcttcctaaacatgtttctggtcatgtaacactgccatttacactctctctcccctttctattactgaattagttttttttaagttgttgttgttgttcttgcttctgctgctgttgttttagtttcctatccattagataattaaccctacattagcctatcactcaacaaatatttaaattaggttggtgcaaaaaaaaaaaaaagcccgcaatgacttttgcaccaacctaatatctggtacctgccatatatgaaacactcaggtttgtgttgtggagtatgcaaaaataatttatagtctctattcttcaggcgttagcaagctgaataattatcattgacataaagaaacacaagcagtccaggcatgatggctcatgcctgtaaacccagcactttgggaggctgacacgggcagatcgcttgagctcgagttcgagaccagcctgggcaacatggcgaaaccccgtctccaccaaaaatacaaaaaattagccaggagtggtggtgccctcctgttgtcccaactacttgggaggctgaggtgggagggtggctggagccctggaggcagaggctgcagtgagccaagatcatgccactgactccagcctgggtgacagagtgagaccccatctcaattaaaaaataaaataagaaaaagaaaacgaaacacaagcaaatacagagtgctaaaattcaatttagactagagggatgagagtgaggaggttcccaggtttgtattcacgttacctagattttaatttgacctaaggccagcgaaaactttttttaaccccacccacaccctagtcttaaaaaccagtcactgaaacaagtgaacttctccacctctacccttgacctggaacaaagttattcctggctaacaaagcttttccctcactgtacaaagtagaagacagcaagttgtctttattcagtttcataacggagaaaagtgagtataaaggttgtacaatataaacacagaatcttaaatcactagaggagccaggaatggagctcaacacttacgagtattctttctgaagtaagttagtctctgaacaagcacctaatcttcaatgaataaaccaattttatgtgaataaacaaaatatagggaataagcaaaacgtaagacaatataggaatagctgtttcaaagtttcaaaattacaaagcaaaaatctgaagannnnnnnnnnnnnnnnnnnnnnnnnnnnnnnnnnnnnnnnnnnnnnnnnnnnnnnnnnnnnnnnnnnnnnnnnnnnnnnnnnnnnnnnnnnnnnnnnnnnnnnnnnnnnnnnnnnnnnnnnnnnnnnnnnnnnnnnnnnnnnnnnnnnnnnnnnnnnnnnnnnnnnnnnnnnnnnnnnnnnnnnnnnnnnnnnnnnnnnnnnnnnnnnnnnnnnnnnnnnnnnnnnnnnnnnnnnnnnnnnnnnnnnnnnnnnnnnnnnnnnnnnnnnnnnnnnnnnnnnnnnnnnnnnnnnnnnnnnnnnnnnnnnnnnnnnnnnnnnnnnnnnnnnnnnnnnnnnnnnnnnnnnnnnnnnnnnnnnnnnnnnnnnnnnnnnnnnnnnnnnnnnnnnnnnnnnnnnnnnnnnnnnnnnnnnnnnnnnnnnnnnnnnnnnnnnnnnnnnnnnnnnnnnnnnnnnnnnnnnnnnnnnnnnnnnnnnnnnnnnnnnnnnnnnnnnnnnnnnnnnnnnnnnnnnnnnnnnnnnnnnnnnnnnnnnnnnnnnnnnnnnnnnnnnnnnnnnnnnnnnnnnnnnnnnnnnnnnnnnnnnnnnnnnnnnnnnnnnnnnnnnnnnnnnnnnnnnnnnnnnnnnnnnnnnnnnnnnnnnnnnnnnnnnnnnnnnnnnnnnnnnnnnnnnnnnnnnnnnnnnnnnnnnnnnnnnnnnnnnnnnnnnnnnnnnnnnnnnnnnnnnnnnnnnnnnnnnnnnnnnnnnnnnnnnnnnnnnnnnnnnnnnnnnnnnnnnnnnnnnnnnnnnnnnnnnnnnnnnnnnnnnnnnnnnnnnnnnnnnnnnnnnnnnnnnnnnnnnnnnnnnnnnnnnnnnnnnnnnnnnnnnnnnnnnnnnnnnnnnnnnnnnnnnnnnnnnnnnnnnnnnnnnnnnnnnnnnnnnnnnnnnnnnnnnnnnnnnnnnnnnnnnnnnnnnnnnnnnnnnnnnnnnnnnnnnnnnnnnnnnnnnnnnnnnnnnnnnnnnnnnnnnnnnnnnnnnnnnnnnnnnnnnnnnnnnnnnnnnnnnnnnnnnnnnnnnnnnnnnnnnnnnnnnnnnnnnnnnnnnnnnnnnnnnnnnnnnnnnnnnnnnnnnnnnnnnnnnnnnnnnnnnnnnnnnnnnnnnnnnnnnnnnnnnnnnnnnnnnnnnnnnnnnnnnnnnnnnnnnnnnnnnnnnnnnnnnnnnnnnnnnnnnnnnnnnnnnnnnnnnnnnnnnnnnnnnnnnnnnnnnnnnnnnnnnnnnnnnnnnnnnnnnnnnnnnnnnnnnnnnnnnnnnnnnnnnnnnnnnnnnnnnnatgaacagatacttttcaaaagaagacatataaatggccaagaaacatgaaaaacatgctccacaccattaatcatcagagaaatgcaaatcaaaactacaatgagataccatctcacaccagtcagcatgccaattattaaaaagtaaaaaaacaacagatgctggtgaggctgtggaraaaagggaatgcttatacactgttggtgggaatgcaaattagttcagccactatggaaagcagtttggagatttctcaaagcacttaaaacagaactactattcgacctggcaatcccattactgggtatatagccagaggaaaataaatcattctaccaaaaagacacatgcacttgtgtgttcatcacagcactattcacaataacaaagacatggaattaacctaggtgcccatcaacagtggactggataaagaaaatatacaccatgaaatactatgcagcataaaaaagaatgaaatcatgtcctttgtagcaacatggatgcagctggaggccattatcctaagtgaattaacacaggaacagaaaatcaaataccatatgttttcacttataaatgggtgctaaacctctggtacccaaggacataaagatgggaacaatagactcgggtctattagaagggggagcgagggaggggacaaggactgaaatactacctattaggtattatgctcactacctcggtgatgggatcattcgtaccccaaaccttagcaccacacaatatgctcatgtaacaaacctgtgcttgtgccctctgaatctataataaaacaaaagttgatactattttaaaaacacacagagagaaaaggaaactttggaaaagaaatgtaaccatagaatgtggaaatatatctaacccatatatttcttgcatatgttcatcaatgctatagaactgatatagaactagatgactattggaagttttaatataaagcaattccatgatattttcagaaaaaaaaaacaacataaaaattgcatagttgagggagaggaccagaaaagaaaacttatcttttacttttatccttctatatattttgaattccgtgatatggcacatataattatttttaaacctttaaataaaatattttaagtctactaaggcatctcaactcattatgaacatacaatattttgagggggttctttgtttgtttattggcctcactatgttgcccaggctcaagtgctacagctattcacaggagtgatcatagcacactgagacctcaaactcctggcctcaggtgatccttctgcttcagcctcccaagtagctgggcctagaggcatgtaccaccacacccaacttagacacacagtggttttatttttccagtaaatgccccaaactttcctggtgaacggtaaccccccaaatatatcttgcctaattttgtgcttttcagtctaatttggttattagaacactctcattcagatatttcagacttagtcctattcatttaaacacttcgattttatattcaatcataactctacatgtcccattacccagaagaggttagaccttcagttttagattgaaagttttgggaatttggtggggtgggggaagtagggttgggtgaagggaagagttctaactctctgtcaccaccaccaacctcttccttcttctgggtgtgacctcctttgggattgggaaagggagaaaggagaaaacaaaaaggaagcatgagcatctctgcatacaactgttgctatgctctctgcagttgatggtaaccactagtttagcctattgtctccgggctcgatgaggaccagaggtggctctaagttttcccttagatgaaagatctgtttaccttctttggcagatgcaggcttggtggcattctccacaggtgagcccctcattgccccccacactgcatcaatcctgggacatttgtggtttccaatctcatattctctgcaccaactctcaagtctgcaggcatgtgaggactttacccctattttgaaggaggaggccattgtcaccggcccccacctccacctagaaaggccccactcatgccttctccactgcattctattttctcacatttcagtagcaaataaagcacatcaggaagtctactacttcagaaggtcatacagccaggaaacaaaatgtctgtttatttttcttttcaagttatttgcttcttttcaagttatttgctcgagctcccctctctcacatacttgacttgagagaatgaatagtctgtacacatactccccaagaggttggcttcctctctcccaacctcccctgggagatgggaacagcgatgggtggttgggccaattccctaactaggggcatctcagaaagccctgcagaaggatggctsattccaatttctgatgactctataaatttagaatatggaacacattgtattttttgtcctcagtttgggtcttagcagtagttacatggcataaggaaaattcctccttgacaccctataatgtttgtctatgtgcttagttcccatcatccatatatgattcagacacatccacaagtttagttttaaataattagaatttttttttaatattggctctcaaacctagctgcatattaatctactcaaggggcttttggctgtatattaatctactcaaggggcttttggttttgtttttcctttttttttttttttttaagtacagacttcctggctctatctgagatccacttgatcagaatcttcagggctgtgtccaggcaatctacaatagattcaaatacaagcagtctgacatttaagaaccttgggtgagaactcaataaaagagaaagatttaaatgaaaggtcaggattttctgatttgggttaatatataagccccatggacagaaaccatgcctatctgattcatttttgtagttccaacacttagaatagtgcctagctcatagcagactttcaataaatatctattgcatgaatgaatggatgagtgaaacatttccatttcataggtaaagcaattacccatgtcaccaatatgtaccacagcacacagtgggaaaacaagagtctactgtcctagtctgttcaggctgctataacaatttaccataaactgggtggcttaaaaacaaccgaaatttatttctgacagatctggaggctggaaagtccaagatcaaggcactggcagatttggtgtctcgtgagggcccatttcttgattcacaaaaaataccttcttgccacatcctcacatggtgaaagctctctggagcctctgtttataaggatactaatcccattcctgaaggctctgcccttatgaactaatcatctcttaaaggcccaacctcccaactccactacattggtgactgggtttcaataaatgaatttgggggaaatacaaacattcagatcatagcatctaccaagagaaaatgcatctttttcctgtggtcatcttcayataaacagaaatgtcttttttgaacttgggtgtaaatgagacaagaagactacttagagaggctgactggccacttcagtaggacttctcagggctgcctagcaaccatgatgagatctggaccatgcagaatctggaactgaccaacacagaagaaatcatagcaaaagtggggagctggatgatctccatggtcaccaagctatcacttggcacatcccttttcatcataacaatacctgtcaacatgaccagaccatttaaattgaagagcactggggatttactaaaaaattttccttcactggctacttttcctccagattccactctgtttatcaaaccctaaggttaatcagtctttgcctaagcaagtcataaagtaattgattctatctgagcctattacattacaatcatgtttaaggtccctcacgctgaggatacattcacatcccctcgatgagggtacatggtctacaatcagatgaattagtaaggaaaaagatgatgccttggagttgttttgaggtggtggtggtcattgttatgggttattttgctattattgttgatactactattattgctataaacttgtcagtgaagaataaagaatctcttcctcgacccactgcaggaaagaggaagcactggtttctgaagggtgaactccctgattccctcaccaagagggcagcaactaaacagcttttaaacttgaggtagattggaggggattaatctaatcctctgggagacgtagtatagaaagggatggtgaaagttaccaccaggggaagcatctccaatgtgaaatggggacaggatttggagttatcacagatggcaagccatggtttctcctgacacaaagcatccaggattgggggaggggagagctgaatggcaagagaaggctggacattaggccaggaagcctcagccaaagatcccacttaccagtaggaaatggtgacaggagccactcatctccaaactgggtcccattgtcttagacaagaagctccagggcaggcactgggcacgatggtttgcacctgtaatcccagctattcagggagctgaggtagaaggattgcttgagaccaggagttcaaagacagcctggacaacatagtgagacctctgtctctaaatttttttaattacatatatatattattttttatatatattatttttatatatatacatatatatatwcatacatatatatataattttaaaagctccagggcaaagaagctcccatcaaaatccttaatctaattaccattcaattcaaataatatttaatgaggaataaagaatttaagactttgtgcttcacactacaagggacactatctttaaagtggtgctaccttcaggtagtttatattctcctaggagatggagacatttcccaagctactataaggcaagaagtgctaactattctaatcaagctcaatgacagttgaggcaaaggaaaagataaacattttctactgatgtctgttgctttccaaataatctgaataacttatttgccaataactggcttctacccctatctccttctgcattccataaagccccaaccaaactggtctacttaggtccaaaagcatgttgtggtttccagctatcggtcctaacgccacctcctctggagtaaatcattgttccagtcctctcttcctatccaaatgctactcatttatataccaccttttccttaaaaactttcttggatccactgaactcttatcttttccctccttggcacctgagccaagtggcctctccctcctaggtatctgagtcactcactggagagtctttccctccacttttctgaatctccaatgacctccataagcactactactcttgggcccacaggtttaccaggttcttcctgcctgacatctccatcccagtccagtatcccagcctcacaccagtggcctctgccttgtggcttggtccttccttgcctggtccacaatctccagctctacctctagcagttaagggattggggcctttgtgttggctaccacagtatcctacctctactaatgactttgcatattcttcccctccaatgtgtgttttgtgtgtcctgctatttatcttagcctatgaactgcctcaggaaaaaaaaaacaaactcagcataatttgactgtgactactttaaggaatataagtagagcaccacaatatagatgaaccttaaaaacattatgctaagtgaaataggtcatacacaaaaagaaagatactgtatgatttcatttacacaatgtgcctagagtaaccagatacatagagagagaaagtaaaacactggttacgaggggtaaaagggggggaaaatgaagagttattgtttaatgggtacagagtttcagcatgggatgaagaaaaagttctggagatggatagcagtgataattacacaacaatgtgaatgtactaagtgccaatgaattgtgtacttaaaaaagattaaaatggtaaattttgctatgtatataccataataaaataaagaaataaaaattttaaatgaattgttcaaaaaagtacagtactgagggttcagtagaaaaccaaaatggagatctccaccagtacccatccttttgagattcctaactagtgggctaaatatctcccctactgtgatatcctaagacaatatttgctctgcaagtacctttggtctttctcactacagtcttcacctcccaggatcaagtgatcctccaaccttagtcttccaagtatctgggaccacaggtgtgtaccactttgtagcctgattctgaatggtattaccttaaaatcaagtgtattagtggtttggagccaacagttactgagcaaacatatttcattaaaatattgcttcctattcactatcccactgttggacttcccacctctgtggacttcatgccccatggactcaaccttatttgcttcctgaattgtgagcatgtttctctcacaagagaggaaccaatcccctccaatgtccccattttcctgtttatctcacagaagcaccattactctcctagaatcatgagcccctggtgcctctaaagacacagccctcttctacctccccagggatcctgttgccataaccactaaatttatttcccttacagctctcaaggctcttcattaatacttgtcttccccaccacataatgtttccttatattatttacctctctaaaaggcagaggccctgtcttatatgtctttatactctttgcagtatctttgactatgcatgccacattttttgaaatataactagtatgtcacttagacattttcaggaatcatcacaacaccaatacagaaaagacttagttataaaattaaccacagaatttctttaagaataaatttattttttaatatttttcttctgcttgcctaagttcccaacatttcacgcaagctgttacataacaactagatgcaatgtgttatcacaggttggattttggaagacaaaagaaacattagagaaaaatgagtgaagtctgaaaaaagtctgaagtttaattaatagtgatgtaccaatgttgccttttagttttaacaaatgcacaatggtattgtgagatattatcattaagaaaaacggagtgagtggtatatggaaactatgtcctatcattacaatctttctgtaaatctaaaattattcaaaaatcaggccatgagtcactactcacacctgtaatcccagcaccttgggatactgaggcaggcccatcacctgaggtcaggagttcgagaccagcctggccaacatggtgaaaatccatctctactaaaaatacaaaaattagccaagcgtagtggcacacacctgtaatcccagctattcaggaggctgagacaggagaattgcttgaacccaggaggcggaggttgcagtgaaccgagatcgcgccaatgcactccagcctgggtggcagagcragactctgtctcaaaaacaaaaacaaaaacaagaagaagaaaataaataaataaaaagctgatttttaaaagatcagttcataccttctccagtcatctttaggagcaaaggataaaacgtctgaccctgctgatggaagaggtcacttttctaccctgggacttagaaaaccaatgccacagattcatgtccatctatatacatggcttaatactcttttcctatcctgatttttaggtccttgtttccattttgagttttgttggtaagagaacggaaatggccccttgaaatttgtttctgagaagtgatcacctgagactctcctaccaaagccagaaagttccagaaagagtttacaaaatttgaaaatttacagaaaaaaatacaagctaattactgcctggacagttttaacaattcattcaaaatgggcaacccaagcatcacatgaagatacagcctaagttaactgtcttgtatcacattaacaatacacttaattaatccaagaatatatatattttttgagacaaactatcactctgtcatcccagctggactgcggtgtcgctattgtagctcactgcagccctaaactcttgggctcaagtaatcatctcgctaattttttgtttgttttttttagaaacagtgtcttgctatgctgccccagcctccccaagtgctgggattacaggcataaacaccacaccctgcccaagactacactgaaatgagtgtacttttttttgttttttcttcctttatatatagactcacagcccagtgtacattttatgctatgagatatctatgtctccaaatactctttaatttactttggtagtaaaacaatcctcaaagggaaaaatgaaaaacaagctgagccaaaagaatgtgatctaccaaattcccagggctgaaatttcaaaatgttttgcttgtctattataatctggtacaagacacgtcaaaacatcttatcaaatatgatagataaacccagaagattcctatcaagtctatggccactgtgctcttagggaataaagtagactcaagagaatcataagatgtaacccagaagaagttcatagtgaggctatagtaatgcaataaggaagaaatataataggacattttatttccccttgtccccagagattgacaactatgaggttttctactcaattgatgtaggaaaaatggggagacagtctggctcaaggcaacaactatctaataaataatttagtgttgcatagaaaagcatagtctacaccaaaaaacctcttgaacactcagcaggcagtttcttacataatacttataacagtaaatatgctcatataaattcatgctttctttggacacttttgcctttcaatgtttaattttacttgacataattcaaagaagtggagccaagggtaagaaagggcttttttgtttatttttctagatgaaaacagatgtgtataacagaacaatcctccacatgcaactaatgtattcagtcacagaacccagacacgattacgtttattcatcctaaggcttcactttttaatgaatagctttcactatttaattttaaaactttccaaatgggacattatattactgtcttcttaaaagaaaaatttggtcttgggaaaattcagctttatttttcttcctttagttgtagatacataatctcaaacaatttgcttcctttttcctcaggttgtctttctactactatcttcaaaaataaaaatagtcattttttcaacattgtgcattatactaatcaaaaagctatttacatggaaatataaagaattatttagtaaatgatgatttgatataagtaaaattatctttaaatcataccgcattcccatagattaaaaagacaatagtaaaaatgaaaccataaagatctataggtagctcttgcctttcttctttctctttccttcttttccagaagaatttggttataaagcctttcagcagagacaagtaggataggataggcatttgcagcaggatagggaaagccatggtggtaagatgagggtaagatgagcatctgcataggagaaggcctagcatagatgttggaagctgggcagggtgaggagggtacgcaggcatgagggtagcctgactcaggttgtcggaacctcagtaggatgaagagggaatacacacaatggcgtccaacaacagtagccctgcagggaatgttggagcccaagtgatataaagaagtctttgttgtgagaggtgatgatggtggcaaaggcagagtggtgcatatgagagaactgatcaaataagtaaaagtactaacaataatgagatccaggaataaaatgagactgaactttgtggtgatagatggcaactataggcatcagtgcaaatgcagtgatttccagtgttatttatataaagggaaataaacatagatataagtgtgtgtatgcaaatatcccctagctctattcacagagaaagaacggtgatatcccaatagtaataattgcacccagcatgcaaatcatggtttctaaataccattcttccccaaaggaaccagggttccttggagaaatggctgattcaagagctggagcagaaagtgtgccaaatgagcatgaaaaatctgattgtgacacgtcaaaaggacagagaagccagtttataggtattcaagtctcaaggtacctccctgagaaatatttttggttctatctcttgtctattattctgtcaggttgtttgtgtttgtgttatattgctttttgagattctttacctattttgccaaccactcctttctaggttatatgtgtggaaaatgtcatctcctactttgtggcttatctgggcactattttataatatcttttgataaatggccattattaattttaatatggttgaatttattaatctttttctttatggtttgtgctttctgagccttgttttataaatcttttcccacccctcttttgtaaagatagtgtcctgtgttctaaaagttccaaagttttatctttcacagtttagtctttaattcacacagaatctatgttcatgtatggattggtgtagtaagataattcctcctttttgcttatgggtaatcaattaacccagcaccatgtactgaatagtcactcctttcccacctgagtattttatcccaacacaaatcccacattgtgttaattactatagccttataataaatctttttttttttttagacggagtttcactcttgttgcccaggctggagtgcattgtcacaatcttggctcaccgcaacctctgcctcccaggttcaagcgattctcctgcctcagcctctcgagtagctgggattacaggcatgtaccaccatgcctagctaattttgtgtttttagtagagatggagtttctccatgttggtcaggctggtcttgagctcctgacctcaggtgatccgcccaccttggcctcccaaagtgctgggattacaggtgtgagccaccgcacccggccctgagccactgcgcccggtccaataaatcttaatttctgggagacaaacctccctgttttgctctttttcgttaagtgtattttggatgcttttagccttttcctcttccatataaattttagagtaaacctgtaaggttttacatagaacctttttagactttgattagaattgcattgcatctataaaccaattggagagtagagctgtccttaaaatattcactcttcctatccatgaacaaggtactccataggatgttaaacttttgtacatatagtaataaaaatgaaaagaccaaaaaaggggaactacttctaactaatatgatagctcaagggcttatatatctaatattcttaaatctcatactaaaacaccttgagataatgagaaaggacttaaccagacaattcataagaaagaaacagaaattagaaataaatatacagaaaaatgcctggcctccttaatagtaaaggaatgcaaatttaaaaacctacaagatattattttcacttatcaaattaaaaatctttttttaaaaatgctgtaataggcacatcagcttgagtctaagtgaaaatcaatccccatcagtgttgtagttatgaggtgggcttgcaaaaaaccgatttgtatgcaaactgaagagcctcttggaaaagaatatattctaaggaagaaattagaaataatgagctcagcccaggaaaacaggatctgtcattcagatttgtcttctagccgagttccctcactgaactcctacagaggaaggaagagagggcatccagaaaaaaaagataaagaaaaaaatctgaaagagcaatttcatcaacatctttaaagcactggaacatactagcacagcttcgggtctattacagtgacacactgagggaaaagacatcgtcctacactttgcacaaaaccctctgaagctccaaacctcagctactagatgaggcaaagccaatcagagggaggttggaatataagcacaagcatgaaagccctggtgcttttagaaacccttggtcgcagggattagtgagaatttccaaaagcattagaggtcttacatcagctagcaagaggggaaaagggcaatactgaagttagtttttaatatatgccctttctgttcctataaactaatgagggctgcaagaggctaagattaaatcattattcaatgtcagcaagtgtgtaagaagtctcaagccctcctatactgttggctggggcacatgtgagaacaagctttttgggaaccattttgcaacatatatgaagaatattttcaaattttaactttctgatccaataactgtcccactaaaatgcttgtcaaatagaataagaggcatatagaaatgtgtgtccaaggatgttagttacaatcttaattataataacaaaatcttctaaatattcaatcataggaggaaggttaaatgagttgtagaatgactaagcaaatccgatgcagccctggattaaaaaattatcttggtagtagaaaacatagggtatcaaattgaatgtggagctgtcattggaaaattttaaccaaagggttttttccttttcacaaattatttctattgccctataacaattagattaatactgaatccatccattgggtcaatcagagccattgtctttgggagaggagaaatccattgcatgcttaaatgtgttttaactcatagcaggcttatcaccctgaagcaaagcacctttgatatgtaagaactgggccatgcacagtgtgttagctcacacctataatcctagcactttggaaggccaagctgggcagatcccttgagctcaggagtgagaccagcctgggcaacatagcgaaactctgtctgtacgaaaaatacaacaaattagccgggtatggtgtcgcacacctgtggtcccaactactcagggggctgaggtggaaggatcgcttgagcccaggaggcggaggttgcagtgagccgggatcacatcacttcactccagcctaggcaacagagtgagaccctgtctcaaacaaacaaaaaaactgggcaattgaaagagaaggattttcttttgaattaataaaaacgaacatgattggaaaactgatgcagaatctagaagacgagagcacagagattacaaaagttaatcacagaataaaaataatgcagtacttaatatattcttgcctgatagcaaggaagaagaataattcccttcctgggctgcagggaagagcatggagaaagagggaaaaaagagaagaaagtcagatgtaggaaaagtccctgaggggactggcctctttccaaataggtttcttgacatgagaaaagaaggtactttggggtaggcgtggtggctcattcctgaaatcccagcactttgcgaggctgaggtgggaggatcacttgagcccagaagtttgagaccagcctgggcaacatggcaagaccctatcttgaacaacaaaagcagaggtacttttgttagatttcctacatgaaatcagggaggagccactttcagaatgcccactgataacgcagggtggctgcaaagagtatgaatggcaccaagtcaggattggggtggggtgggggctgagagaggctcctaccctaccagcccctacaatccccatggggcattcttgaaatcttgaaaggggcatgggagagatctgggaacaatgcgacagctggcttatggggaaagtggggagtgggggcaggggagacatagcagagaattgggaggtcccacactaaagccaggggtagttggttctcagcagcagcaggagaagataaccaaactcctgggagtaattgctctgcactgcactgcccagtgtccagaacaaacccataggcaaaatccatgtaaacaagacttcacagccaggaaggaatggagggtcacacaaagaccagatatgccttccttgcagcagggtggtagcgtgagctttttctattcccaaagaccgccaccaggaaggggagaagaagtggtagaaaggaaaaatcttgagagggaaaaatagccctgagagggaggctgaacttcaaatgtgataataacctcgaagagacagacagagttgcactgaactagtgacaaaataaattcagttacagagaaatttaaagaaactctgtactcatccaagatatgattgtgaatttcaaagctgggacatctatctacagtgctattttggtctacccagtaattattctctattctgagaaaaaagcagctctgagtttctgctgcagagctccctgaaccttcctgggtcctaatcttccaaagcctgggtgttttttattctgtggactgccaagaaattcctttccttccttaagtttgtaactgggtcagtttctgttatttgcactaaagaaagaagcccagctgatacaaaatatataatcccaattttgtaaatgcacatgaatacaccggcacacacacacacacacacacacacacacacacacacacacmggtggggaaaaagaaagaaataaaatattaatagtgatcctatctggataatcaagttataaaatattattttcttctatgtttccaagtttcctattctccataatgagtatgcattatatttttattcagaatattgagagatagaagtattatccataatgtccagaaaaataacattaagaagcccaattacattaaaaaggtatgtcacgtcattggcctttgtctcttggcaccctgggccagccagcagatgcaagcacaagcactgttgggcagtgtgttataatgcaaagaatactaggccaggagttcagagaccagagttttagctctggctctgccactgacaagttgtgtgatgtttaataagtctttcaacctcctttagccccaaatttctttatctgtaacatgaaggcttcaactccctagctggacacagtggtgtgtacctgtagtcccagctattcaggaggctgggacagggatcacttaaggccaagaattcaaggctgtgcacactacagccttgcactcttggcctcaagtgatccatgatcgcacctgtgaatagccactgcactctagcctgggcaacgtgagactctctctaaaaaaaagaaactccctatgataatacagagttcactgacctgtcaaccgtaccctagctcaggttccaactgtcaacatttctcagatatatgtatgagaagacaaaatttcccagtatgctagccaaagtcttagagaaaactttcaagggaacactacagacactgcttgctttgcttttgagactgaaacatagcaatagcactgatgttttccatcttgttttcatgcaatctctgtctgaagggacacttcacaacctagcattgcctgtcaccagcatgaaagtgcagctagtgcttgtcgctggcatcagccccagatccagcataagaacccaaataccatcatgctggggggcaccttgagcacactgcctcaccatgcagctggtcatcagagcctcagagggcaaggaaggttcacgtatagagggaaccagtgaaaggcaaatttactactgctgcttcaatctgtgaaatcgcaaagccaaggaagttaaagggatgtggtgcaatatttcacactagatacctgatccgtccaggtggggggacttagatggattcccaaagaagtaggtgcattgagaagagtacaccaggaattgagctataggaataacagagaccaaactagcaattttacatctgttcaaaactatgacctcatcaaactaatttctcagctagcttttttcttcttccattcttgtatccatgtcttgcagcttcctctgggaatcttcttcctctccctgtagtatatgatgtctaaaaatcctccctggcttgttgggaacaaacttcccatacaccagagtgacatatgccctgagactctacacgatggctgaagagacacctaactcacaggactaaggaaaatgtaagccctaaaccacttagctctgtgtcataaaaatctactgtcctttattctgtttatctttatttctaacctaagagaaaaagtagaatggaacagactgggtaatctattctaagaaaaacttgaatgttttaaacacaaaaaagagaagaactaaaatttgaatgcagaaaagatacaattaagcacatttgcaaccttggcaagtacatgaagaggagtgtaaagggaattagattgtgtgggagtcaagctgggtccaaaaaaaacaggaacgggaatgtttcaagaagggatctgaagagatacaatgagttactaagtgaagaagggaaaggagaacagaaaacactggaagaaaaagtcatttcactaaacaaacaaacaaaaataccaacaacaaaacctcactgtaactagcagtaaggaagtttaatgactctgcatactgggtatattctggatcccttcagtagaaatgtcatttaaactaagactgaagaaaagcaaagaaggagaaacagtggtttgtctctttgtccaatatagtgttgctcatgtggagggagagaatggggaatgtgggaagggttgaggaattccaataagaagattatcacccacaaagaatgccggagacaggtttttttccacaagagattaagtcattattcttaacccaagaggtgatggattgtctttctggtgcttactagtataatagctaagcagaaaataattgtctaatgtgaagtaggggagctggagataacatagaaaggataaaagtccctcaaattaaaaacaaaaaggcatcgacatgatttgtggtttcaaaaaaacttttttgggggaataaaacaatgctgactttgcagatgaagctgacatcacagatatattgtagttactgcctacatactattcttactggaaatggagcagtgtaggaagccacaaacatctaaatagtcatttctctctctttcttgtcagttgcttcaagtcacaaatgcagtttcaattcaacaaatcaaagtgtcacctgtttacaaactccactttcaaatctttcaccaaaatcggtgagcaatacatgctaataaacagagaaaataaaaaaactagagtcactttgagagaagtatagtttagtgattacagaaaatatcatttatattttgttgccaatgtggatttctgttagtttgtctatctgataagcttcagggacaatagttgtattgaatattgaaaggaagttgttatgatcagattgcttcctgtggtgaacaaaaggcttttgctgacatagcagcttcatggttgcacacacagcccataatatccttgtctttcaaactgaaaggtttttttctttttttttttttcactatttcaacaggaaacaaaatcttcagacttgcttccaaaggagaagtttgaaatggaagggagaaagagaggaagggagggacggcaagaaggaaagaagagaggaaggaagaaagcaatggcatggccatgtttctgtgttgttttttcctactacaaaatattaagatattggataataaaggagccaaatagtgtcacatggctcacgtgtgtatcaacaaggcccatgtgtgtatcaacataaggctaagaacacatgacaaggcatggatggccaaggagtcaggattttgaaatgagtgcaaggacttgtttacatgaaaatgttcaaaggtaaaatcaatgtatcaggttaaagggttgagtctgaagaatgagcgcatgaaaaaatgtgatactttctcttttttgtcattgctttctttcccctcatccgtggcggggagaggatctttggtaagacagaataaagacggcattttagtgaggatgggggaagcctgaggcaggtgtgctctcttctgagaactttctcaaaaatccacaccatttccatggtggtgaaggccgtgacgaaaagacctcagaagaattactaaaatagcttctgaggttgctttccaatggcacaatgcaggaaatggaaaaggggcatgtattgatagcattgtgtgtaaatgaacaatatacatgtgtattgtatttttcatggtgggcaaatggtgggacatcggggagaggggctgagagaagtccaggaagcagcataaagatcttaatggacaggaaggagaagagaggtgttaatggaaagaaggaatacattttagcacttcaaatactggtgtagcttcaactctgaccagggacattttgtcttagtgcctaaatatatccaagtggaataagcacgaatctcacattttaaaaaattagccatgcattacacatacgtatcattcttcctgatattgttaaagcaaaccactgcaacaacattggctacagaattttgagggctcagtccaaaataaaaatgcagggctccttgttcaaaaattactaagggccaggtgcggtggctcacgcctgtaatcccagcactttgggaggccgaggcgggcggactgcctgagctcaggagttcaagaccagcctgggcaacaaaaaatttagccgggtgtggtgttgggtgcctatagtcccagctacttgggaggctgaggcagaagaatctattgaacctgggaggcagaggctgcagtaagccgagatggcgccattgcactccagtctggacaacagagcgagactcttgtctccaaaaataaaaaataaaaaattactaagaatttcaagatggcggctgggtgcggtggctcacgcctgtaatcccagcaatttaggaggctgagacgggcagatcacctgaggttaggagttcgagacaagcctggccaacatggcaaaaccctgtctctactaaaaatacaaaaaaaaaaaaaattagccggacatggtggcgtgagcctgtaatcccaactactcaggaggctgaggcaggagaattgcttgaacctgggaagcggaggttgcagtgagacgagatcgcgctactgcactccagcctgggggacaagagcgaaactccttctaaaaaaaaaaaaaaaaagaagaaagaatttcaaggtggcaaaaatggcattaaaccaagcaaggggcccttctgagtataggtcctatgtgactgcacaagtcatatgcccatgaggccagccctactccaaaattaagaccagatttgaatgggttccatgcagtgcttggaggggaaaatcccagatgtaaactctcactgtaaaagttcaaaaggggctgggcggggtggctcatgcctgttaatcccagcactttgggaggccgaggcgggtggatcacgaggtcaggagatctagaccatcctggctaacacagtgaaaccccatctctactaaatatacaaaaaattagctgggcgtggtggcgggcacctgtagtcccagttactcgggaggctgaggcaggagaaccgtgtgaacccggaaggtggagcttgcagccgagattgcgccactgcactccagcctgggcgacagagcgagactcygtctaaaaacaaacaaaaaaaaagtgctaaagggaaaggctgattattggagtcagaagactagttatcctctgcttttctatgagtgatagtgagaggtgacagcttgctggcagttctcacagccctcgcttcctctcggcgcctcccctgcctgggttcccactttggcggcacctgaggagcccttcagcccgccctgcactgtgggatcccctttctgggctggccaaggccggagccggctccctcagcttgccaggaggtgtggagggagargcgctggggggaaccaggactgcgcgagttccgggtgggcgtgggctctgcggacccgcactcccagcagtcggccggccccaccgcccggggcagtgaggggtttagcacctgggccagcaactgctgtgctcaaaattactcgccgggcttagttgcttacccgcagggcaggnnnnnnnnnnnnnnnnnnnnnnnnnnnnnnnnnnnnnnnnnnnnnnnnnnnnnnnnnnnnnnnnnnnnnnnnnnnnnnnnnnnnnnnnnnnnnnnnnnnnnnnnnnnnnnnnnnnnnnnnnnnnnnnnnnnnnnnnnnnnnnnnnnnnnnnnnnnnnnnnnnnnnnnnnnnnnnnnnnnactgggtgaagccagctgggctcctgagtctagtggggatgtggagaacctttatatctagctaagggattgtaaatacaccaatcagcactctgtatctagctcaaggtttgtaaacacaccaatcagcaccctgtgtctagctcagggtttgtgaatgcaccaatcgacastctgtatttagctactctggtggggccttagagaacctttatgtctagctcagggattgtaaacgcaccaatcagcgccctgtcaaaacagaccactcggctctaccaatcagcaggatgtgggtggagccagacaagagaataaaagcaggctgcctgatccagcagtggcaacccgctcaggtccccttccacactgtggaatcttggttctttcactctttgcaataaatcttgctgctgctcactgcttgggtccacactgcttttatgagctgtaacactcaccgcgaaggtctgcagcttcactcctgaagccagcgagaccacgaacccaccgggaggaacaaacaactccagacgcgctgccttaagagctgtaacactcaccacaaaggtccgcagtttcactcctgagccagcgagaccgcgaaccccaccagaaggaagaaactccaaacacatccgaacatcagaacgaacaaactccggacatgccacctttaagaactgtaacactcaccacgagggtccacagcttcattcctgaagtcagtgagaccaagaacccaccaattccggacacaatagtagataactgctatggtttggatctctgtccccactaaatttcatgttgaattataatctccagggctggaggtggggtctggtgggaggtgactggatcattgggttggtttctaatggtttatcaccatcctcctagtgataggttcccctttgccttccaccatgattgaaagttagtaaaggccatcatgcttcctgtatagcccatggaaccatgagccaattaaacctcttttctttatatactttggctcaggtgtttcttcatagcagtgtgagaacagactaatgcaggtactctcagtgccactctgaccctggtgattttgagattccactagaccacaacttgcacactatgaacaataagacagcttagaaggacatctcgtatagctctgtgatatggaaagactaaacacattctgaatagattttggttcctttaaaatgactttatatttttgtaacactgtaaggcccgactaaatatacgttttcactgttatgatttagtgattcccattctagagcaaaatgaaaatattactgataattcactgtttatttcatggaatactaaaataccaatattaatgcagtattttaattttaaaaagccagtaaaaatatttaatatatgtaaaatataaaagcttatatattattaaacatcaagtaaaaataaaaactgtaattttaaccatatcttatcatcgtgatagaaattatccaaagtttcaattattaaaaataaagtattcaaaatacagtccggcatcacttaaggacagggatatatccttccaaatgcattgttaagacaattttgtccttgtctgaacatcatagagagtacttacacaaatctaaatggtataacccactatacaactaggctgtatggtatagtccattgctcctacactacaaacctgcacagtatgttattgtactgaatatggtagggaattgtaacacaatggtatttgtgtatctaaacatagaaaagatacagtaaaaacaccatataaaaagataagaaagggtatacctatattgggcacttaccatgaatggagcttacaggactggaagttgctctgagtgagtcagtgagtgagtggtgactaaatgtgaaggcttagggcattactgtacactactgtagactttataaacaggctgtttattgaaacaaaataatttccctagatatactttcctattaatgaagagcatgttagaccaggcacggtggctcatgcctttaatcccaacactttaaggaggccgaggtgtgaggatcccttgagtccaggagtttgaggttatagtgagctatgattgtgccattgtactccagcctgggtgacagcacaaggccctgtttctaagaataaacaaacaaacaaacaaaacaataagggaagaaaggagaggagaggagaaagacaacataagtcacattataccttaaaagtcaggtttctaggaatttttcaggccagaaaataaatcttacaagtgatctgtaagttgttatgtatcaatacctttcaaggatagctttcaagtaaccatgacttccaggtgtatagatttaccatctgcttcaaagacaagaaacttctccatgcaaatttatactaagagacatctttatctcaaaccttcagggcttatacccaagagtgaactacttcattcaggacatggaagcacatacatatagaactactagccatactccccgaggaatctggatctcacagggagattcaacgcccttaaagtatgacaatgaaccgttgtatatttttggtgtgctagatccacagggctaatttggcattcagtttrcaacaattaaaaagctgcagcagcattatattaatcagaagggctaagcagagcttcagttwaaaaaaaaaaaaaaaaaaaaaaaaaactccaggccaggcacagtggcttacgcctgtaatcccagcactttgtggggctgaggaaggcagatcacttgaggttaagagctggagaccagcctgggaaacatgttgaaatgccgtctctactaaaaatacaaaaattagccaggtgtggtggtgcatacctgaaatcccagctactcgggagggaggctgaggcaggagaatcacttgaacctgggaggcagaggttgcagtgagccaagatcatgccattgcaccccagcctgggcaacacagcaagactctgtctcaaaacaaataaataagtaaatacaaaatacacacacacaaaaacctccaaatgtcatgggcttaaccaaaatttaattcttgttcacataaagtcccttgaggctcatattcctccgtgtgttggtccaccttctaggctattttggtattatggcacctcctcatcagcacatgcttccacaagtaccctggcaggggaagaataggctgggcaattgaacattggtaataaatgcattcttctgaaagtgacgtacatcacttgggcacacatttcatgagctaaagctagtctaacttcaaggagacagataagtaaaatcatcctgtttgcctgaaattaaagaagaactctgtgaacacaataatgccacccatagtgcattacagacatcaagatttgtggcaatttgtagagtctgacctcactcttctaatatttatagtaaaaaggatgggtagttaaccaaactgcatatgtatatgtgttagcccctcaaatgaaaccacttcatttacattactttaaagaaatgtgtgttttccactatttaatgatcacatcatatgctgaatgcagtaatgtcaagttttaaaattttgttttgctttttgccaatgaaactaggcaaaatgagatgaaagaattttggctgtgattttaggaactgcctttactcaatgcttaattttaactaagcataaccagtgagtaaaattttgtcaagatcattcctaatttacaattttcattaaagctgataaagtatactcttcaaagaataacatgagtttacttccttccttgttttcttccttccatctttccttccttccttccttccttctttccttccttcttctctctttctttctctctctctctctctctgtctctctttctctctttctttctttttgagatggagtctcactctatcacccaggctggagtgcagtgctgcgatcttggctcatgcaacctccacctcccaggttcaagtgattctcctgccgcagcctctccagtagctggaatcacaggagggcaccaccacacctggctaatttttgtatttttagtagagacaaggtttccccatgctggccaggctggtctcgaatacctgacctcaagtgatccacctgcctcagcctcccaaagtgctgggattacaggcgtaagccactgcacccagccatgagttttctttttcctaaatattttcttgcaactatttgttgccataacagtttgaacctgaattttattttcataggattaaaggtagatatttatttctgctgatttttttcattagagaatgcctattattaaaaataatttgaatggattaaattatattttaaaaagaaacaaagatgagaaaataaaaaatataaaaggggggccagttaagacagggagaaagaggtcaggcatggtaactcatgcctgtaatcccagcactttgggaggccgaggcgggaggatctcttgagctcaggaattcaagaacagcctgggcaacatagaaagacctcgtctttacaaaaaataaacaaaattagccaggcgtggaggtgcatccctgtagtctgagctactcaggaggctaaggtgggaggactgcttgagcccaggaggtgcaggctgcagtgagccaagactgcaccactgtagtccagcccaggcaacagagtgagaccctgtctcaaagagaggaaggaaggaaggaaggaaggaaggaaggaaaggagggagggagggagggagggnnnnnnnnnnnnnnnnnnnnnnnnnnnnnnnngaaggaaggaaggaaggaaggaatagaataaaataaaaaggaaagaatatgcagaacctacttgtggggagacaatcctctgtggatctcttgcatttctgcacattgtgtgagaagtactagctttttttctggattattttttcaaggatatttttatagagaacaattttggaaaaagagagtgtctctttttagagcagagggcaggtttgtttgctgcccagtataattaagataatgtttccctccaaggcaaagtttagataggtttgcttgcagctccccgataatttattaaggtttcctatgctcagggtccctcagcagtgatactaacccactgcacgtgcagctttcacccgggcttccacacatcacatccatgagacttgtaggggcatgaacggtatgaacacgaagttcatgctgcctgttgtcctatgagtaattaagtctttttactctgacccaggagtcttcatgtcttctgccggcatccataaaaccgtggcagcttacttgaaaacttttttcaacaaaaataggatgctgacagacatggctttttgaaagagaaagaataagggatcctaagaactgagttagaatttatgagaagactccccagggaagtatttacctagtagtaaatacctagtagtggtaggcaagggcatttaggaagtgtgagggtctcccactgctctacctgttcatgaatgtctagagtctgagcagcaagagataagattgaaataaataatctaaatggtgttttagttgttgttcactctcctctggaagggaggagaaaggataaaagagcccacaaagctgagagagggcttggatcatctgaaaactttgaaaattagttttggttgtaccatgaacagcctctgggtcactcaaactggaaagaaaatatgctttgcttactgacatgaagccactctctccttacatagccccagattcctcccaccattgcttttgcccttatcccagctgcttaaaagaggaaggtggggtcagggtctccctgtccccaagggggaacaaaagctacgtgtgcactttcaggtatgctgggggaacttaagggaggtgaaggactcaaacttggatgctctgttgagtacagacatccaagtcacccattctacccagttctgtgaggaggggaagtgcctacattcaatttgtaggatttggtcagggtttggggtagtgatgtgatgttaacatgaccttgttttccaggatgtcatctaccccttattttccttctacttctctaagtgccccacagttttctttaatagttccttctcttcagaccacttcttaatttttttttttttagaatttttttttattattaagagacagagtcttattatgttgcccaggctggcttcaaactcctaggctcaagagattctcttacctcagcctcccaagtacctaggattacaggcacattccaccatgtccagtgacagaaattcttaaaagacagaaaggggaggagaaggcaggacgagggggtagtcatgggcctttaacgggaaagatttgaactgacatgattataggtgggctgagatttttatattttcaaaatgaggcatgggttgaaaataaataagggacactcttaaatgctgattcttccagggtttcatccttggtggtatgttcgttttacatttttagatatattatttcattcatattctaaaagctactgcttatagttcccaagactgtatctccaattctaacctatcttcaagttccagaccagcttttwcaaatgctagttaatttggctatcacaagggcacttgaacctaatamattttttaaaaaagaagactggagtaattatactcctaaatattcccaactttcccatcaaggttaatggaatcaacatcctcaagtttcccaagtaaaaaattcatctggagtgtccctcttaccacccacacccaaattgtgtcaattttatttcagaaatatataaaaaatctgaccattcttccctatttcctcagccactaattcaattcaggctcttacgatttctgtcctagattattgccacattgtcctatctggtccctcccccatcaatctctcctataatccatcttttacattcctaacatcattattttcttaccaaacaaatatgattacaccctcccctttatttaacaatttcccctgattttccactagctgccctataaaagccaagctcttttgtatgggcacaatgcccttcatgatgtaaccccaatttagtgttccaatttcatttccttccactccccaccacagccctaagctccaaaccacaatgaacttctcatatatcttttcaaaactctatgcctttgcaaattttgtcttcttttcttcagatgccctttcttcctcttctgtatataacaaattctcattctgtcttctagactatccaaagttcatcttctctgtcaagccatccctaattttcctagactggacaatagtgcttatttctgtgtattcaatttgtttattcatgtgtttgccttttccattaaactaagttccttaaaagtagggatctgccgggcacggtggctcatgcctgtaatcctagcactttgggaggccgaggtgggtggatcacgaggtcaggagttcaagaccaggctgaccaatatggtgaaaccctgtctctactaaaaactcaaaaattagccgggcgcggtggccggtgcctgtagtcccagctactctggaggctgaggcaggagaattgcttgaacctaggaggcggaggttgcagtaagccaagatcgcaccactgcactctagcctgggtgacagagttgagactccatctcaaaaaaaaggaaagtagggattataggtttttttatttggggtgcctagcagaatgtcttgaatatggttgaataaatgcttattggctgaataacttactttcttatatcaagtcaagattcactggatgctttagcctgaaataaattcttgagcaaccaaatgctggtattctgcatgttttgtatattgtatagtatacacattttattatttgaatctttctttccttgactatctttattttggttatttaaataaatataatgagctatagcataggaaagaaaacaactttaaatttgttccttattaaaagtgtaagaagttgggtaaaggagaatattgaaacaattagataaattaaggttgaggagcacctatgatttgttcttgcatccctcagagtcaggaaaataaagaatgtgaccatttgactagatataaatatattaccatccacaccattccttataatatcaggaagctcattaataaagtggtttaatttgaagatcctcatgaatgacttttagctagtaagattataatctgtttagagtatgaatttcaatggtttgagccataacattttacagtccattgcattttatctggtcatttaatcaaactgaccaaacacctcctgtgccgtttcagaaataggtgggaaatgaggggctataaacaattcctgaagaaggatgggaacaattcatgctagcaatgtaatatatgtttttaatttaatggaacctgttctgtatccataggttgatgaaatttgagaaaatatgagttatctatatcaggtaccctagtaaatcaaattccctgaggacaaagaacttttattcatattcatctctcctccttcacaggtaaaacattctgaatacatctttgttgaattttattaaatgaaatgctttattttttttacaaaattctagatatcataataagccttactcatttattgtttgacataagaaaatataacacatgtgcacctaaaagaattttaaaaattacctttatgtaatatttagcacaaatagagaaatgtttttagatcatattgaggcagaggaacctgcaaactaattgctgattcactcactgggaagaaaacagtttatttctgtcaactaaaagaaataatacataaaacaaataccagagaaaagagaaatatttttgtttcacacaatacagagctgtgattgcaaaaagaattaaatgctgagcaaaggaaaaatatgtttatttattcgtggagccctttcgagtcttagatgaaaaagggtaactaaaccaaatgataacctggaaagtatctcctagaatcttaaaatgtttaaaattttaaatttaataatgtgaaaaatgagaaccatttttatagcactggcaagaaaacaggttctaagatgtccttacaattccatgctcagtttatattctgttgtaacttccccaagttttatttttctgagtgggctgggcagtgaaacccataagatttgccctctgggacagagccattttaaatacaatgctcttcctactcttcagacaagaaagcagtgaatcattcatcttctaaccaaaattaagctggttaattccatggctatcaatcttgacatttaatgtttacattcaaaatttgggattaaaaaaaaatgagtaaaaaagaaatatgaagtggaccattagtgaaattctaactgaagtgaaactaaatcttttgttaaatggcaatggtaaatgttgtaaagatatattacttcctgttttccagtctctttttcttgaccacaaccagtgtaagatataataaaataacaacctcccaagttatgttattatagagtacttttacagcccaacccaaggcaaaataaacatcagtaatgaattgttcccatgtactgacataaggaaagactactgactgtcactaaaaactagtgtatttttttaaaatctaagaaaagtagaactctaaggcacaacagtttcattgttaatttatgtcatccaagattttgtccaactgagcaatcaattaggaaataatatatcaagaatcttactggctctagttgtaatcatttacaaattactgataaatttaataatattttgaagggtaaattgttcatttcctcagcactagatgttgtatttaatgacaccaaaatactgtttagtttcagccaaaagtaggcaactaatattttttcctaatatagagtgtagaggtgactgactcatcataatattttctgttttcatattagtcagttagcactcaagaaactccgtatgccattgggagtgcaacaggagtcatatttctgaaaatgaaatttctgtttttatatayactccttctgttggctcctaaattcaggtagtttagagaaacatactttcccacatttagtgccctgacttaggtagaagttaataatatctttattctaaactgaatcattggtatattgatgctaaatggttgcaagaaattaaatggtttattcttttatgtacccccaagaagcaattctagtctgtcattcttctgcaacaaacacctaattagtttactaatacatacagaggtgaaacaaaaagtaaattaaaaatacatattttcaattttaactggccataattttaattttcaaattagtgttctcttctattagcccaggctgaaaaattaaatataggatacctaaataaaacacatttatgaacaaattcataaatttaagtcacataaattcaagaaagtatattcttatttgatgtttgagaaattttccatcaatagacaagtttttatattccatcaaattcagtgctaaagacgaggctttgtacttagtatgctgtctttcatctttggccttcgaaactctttatgggccttaattaattctcaccacacccctctgaggcaggttggtattattattccctctttatagttgaggaaatggagacaaaaagagattagtatgagatttgcccaatgacgtagaataaatcagagacacatttagtgtgagcttcaaaacggctcacagataaacatgttgttggcgtcttcatttctctttcctatcagtatcaatgtttcaacattctcaacagaaaatgtttcttgtttagcaacattgctaagttgaattactttttcactctgagaagtttatattgcctctttgagaatttattttattgctttcttctttgctacaaaatgaatttttgacataattttgacatgttgcaactaaatgtacaggttggtaccctgaagaaattagagtatgcattacttgcaattagatataaaactttcaggaaaaaaaaaaaaaactttccagaaatgtgtagcatgctgtatcagatcattcatggggacattctagggtccacggaagccattcacctagaaatcttgatggtaatattattatgataccacctcattaagtgactcatgatggcttgttcaggcttgtgttctttgtgaactgaagacctgctataaatccagttacaactagtttctctgctattgcattatacctcatgttaatggctaaagtaaacttgcatatttttttccattggagttcaatggcaaatgtctgctactgaagcaaaatgaaaaataatatacattatttttccttttcttcttgagacatccccaaaaatttatgtttaggtttaaccaaatccaacggttttgctgttctataccctacgtgactagcaacttttttgnnnnnnnnnnnnnnnnnnnnnnnnnnnnnnnnnnnnnnnnnnnnnnnnnnnnnnnnnnnnnnnnnnnnnnnnnnnnnnnnnnnnnnnnnnnnnnnnnnnnnnnnnnnnnnnnnnnnnnnnnnnnnnnnnnnnnnnnnnnnnnnnnnnnnnnnnnnnnnnnnnnnnnnnnnnnnnnnnnnnnnnnnnnnnnnnnnnnnnnnnnnnnnnnnnnnnnnnnnnnnnnnnnnnnnnnnnnnnnnnnnnnnnnnnnnnnnnnnnnnnnnnnnnnnnnnnnnnnnnnnnnnnnnnnnnnnnnnnnnnnnnnnnnnnnnnnnnnnnnnnnnnnnnnnnnnnnnnnnnnnnnnnnnnnnnnnnnnnnnnnnnnnnnnnnnnnnnnnnnnnnnnnnnnnnnnnnnnnnnnnnnnnnnnnnnnnnnnnnnnnnnnnnnnnnnnnnnnnnnnnnnnnnnnnnnnnnnnnnnnnnnnnnnnnnnnnnnnnnnnnnnnnnnnnnnnnnnnnnnnnnnnnnnnnnnnnnnnnnnnnnnnnnnnnnnnnnnnnnnnnnnnnnnnnnnnnnnnnnnnnnnnnnnnnnnnnnnnnnnnnnnnnnnnnnnnnnnnnnnnnnnnnnnagatgcagtgagccgagattgcaacactgcactccagcctggcaacagagcaagactttgtctcaaaaaaaaaaaaaagaaaagaaaatagtcactcaccttccttataaaaccagtcaattttttttaatttaggatattactaatcactaaatatcatgttgtattgtaaagacaaaaaataaaataaaaatagaatattactaatcatttaatttcagcagtaaccattttgcttcaaaattctgctaaattaaatcatggtgaacttaaagttgttaaattttacacacattactttatatgtaaacatacaaacgcactttaacgaaaatgacaagacttttcaatatagaaaaataatttactccaaggttcagagtcagagtgagactcgttagcaaacctcaattggtggatattttcagtattttccaaagtctaccagtgtgtgcccctacaggttggatgttacaaaataatctcttctttttaaaatggaaatatgctgtatttgccttagaagacagttttcaaataagagatctatcttctttcaatatttattgcaacttataatggaattcttgtttaaaggtttgtatagaattagttacactcctttgtcacatactcccaaatatttattttagggagtagttgataaacctgctggttctatctgaaagcgtgaaaccaggtcaatttcgccactggggctaagcaccattcatcacccttatctctctaacagctaatctaaagtagttaagtagtaatacattggcaattcccttatttaagtgatgcagtaagctataaacttagcattgcaaaacagaggcaaaaactgtgcaataatcctttttgaccccaggataggaatcttgggacattattctcagttcaaaataaagagacttaaaatcattttcatacagttaatggattctttcctgtgcagtcctaggacatgatgaaatatatttaatgagctgtgcaaggaatgaagcgtgtttgccactatagagtccatgtcagaaatagagcaaagcataggaaatcctgctcacatgtattacaatccctgttcaatctcctaggtcaacagttcacaacctttttggcaccagggaccagttttgtggaaaacaattttttccatgaatgcgggagtagggggaatgaaactatttcatgtcagaccatcaggcattggattctcctaaggagtgtacaacctagattcctcacatgcaccgttcacagtagggttcatgctcctatgagaatctaatgccactgctgatgtgacaggaggcagagctcaggtggtaatgctccagcccagttcttaacaggccatggacccataatgatccatggcctgggggatggggatccctgtcctgcaagactctgtcagttgctgtgtattataagttcttatgctaaaatgtgagtaatataatgcttattagaagtagtggtagtatttcaaaaaattattctataatgtgttaatagtccagactctcatgtgttttcgacattatttgaacctagtttcaaaagctctttcatttcttactgagagcaattctccaaaacctccttcctcttatctacaatcaactgttcattcttgcttcccttgttgatttacagtgaatgaagaactattctggtgttattgagatctgtttcttatgaaaaattagctgtgctggctctctctatatatatgagggagaaatgagaagagaaggtgattgagtaatagtctaattgttaagacttaattacttaaaagcagacaatatgaaagtagatgaaacagataattaaggaggttatttattcattataaaacacttttctatgtcaagcaatgtacagtgtattggggagacaagaagcagacagaggacttgctcccakaaaacagacaatctagttggaagaaatataaactgtttcttcttttgcaattcttgttggatcattcatttttccctattctaatttttatcatcttaatttggacatttaccacttccttcttggatcactactgttctcccctgaaaggctttcccatctctggtaaatatccccactcgatcctttctaaattgactcttacttctaacttctactttgattgcataactatcctgttcaaaaagttcaagagttgggccaggcatggtggctcatgtctgtaattctagtactttgggaagccaaggcgggaggatcccttgggccccagcgttcaagaccagccttggcaacatagggaaaccccaagaagattgtttgagcccaggaggtggaggctacagtgagctgtgatcatgccactgcactccagcctgggtgacagagcaagagcctatcaaaaaaattaataaataaaatagttcaagggttaatacttttggaataaagttttaattgttaatctagcctcagcatcaatgctcctaacatcagatgccaatctactcatcaattttacatgctgctaggctgggtacagtggctcacacctataatcccagcactttgggaggccaaggcagaaagactgtttgaacccaggagttcgagaccagcctgggcaacataaggagaccttatctcagtaaataaataaattaattaatttagccaggaatggtagccgatgcttgtagtcccagctacttgggaggttgaggtgggaagattgcttgagtctgggaagtcgaggctgcagtgagctgtgatccagccactgtactccagcctgggtgacaggacaagaccctgtctcaaaaaaataaaaataaaaaaaaacaactttacctgctgcactatccccacacatactgtaagttaaactatgttgcaaatcattgtctaatatacactacacactttcccatatttctacagtggattacactgctgcctgtgtttagaatgttctctgttgaaatcctacccatctaaggtaatattcatatgccacttcttccataaccagaattcctaaccagaattcctccagctgaaactgctctctgtcatctaaatgctttaagctccttctttgtataactcttaaggtaccagtcaaatactaccttgtattgttatgtttatttctttcctccttacaagcacataaaaactcctacataacccttggtatgtgtcttatatatattgagcacttagtaaatatttgtgcgatgttgaataattacaatgagaggaaaaagcaagtgtgcatgagaagagagcaaatatgtaggtagagataaaagtcatggaaacctttgtaaactgaaagaagtggggcttaaatttaatatggaagaaaggaattttattcataatagtatcttgatttatagtttacttacaggaaacttttgattgccaacataacaattcatttacaaaatatgagggaggtaaaaaaaaatgatgttgaggttagcaggtgaaatcattgtgaaaattccaggagagaaaagaaatcagaatatttgaaaaagaatttgttcaaagtagcagcattatttatacccagataattaaattaccagatttatgggatgaagtatctgtttacttttcatcttttatgtttgtggtatctaggcccatttaggattggagtaatttttctgattacctaatatagtagtcctccccatttgtccttgggagatacattccaagacctccagtagatgcctgaaaccacggatagtactgaatcatatatatagtatgttttttgttttcttctctgataatcaagagacctactaagtaactaatgggagggtaatatatacagtgtggatacattggacaagaggacattcacatcccaggccagatggagctggacagcatgcgatttcatcatgctactaagaatgcacagtttaaaacttaaattattattttttttgagacggagtctcattctgtcacccaggctggagtacagtggtgtgatctcagctcactgccacctccaccttccgtattcaagcgattctcctgcctcagcctcccaagtagctaggattacaggtgcatgccaccacacccggctaatttttgtatttttagtagagacagggttttaccattttctccaggctggtctcgaactcctgacctcaggtgatcagtcaccctcggcctcccaaagttctgggattacaggcataagccaccacgcctggcccaaaacttatgaattgcttatttctggaattttccatttactattttaggaccatagttgaccatgggtaattaaaactgtggaaagcaaaactattgataagaggggctactgtacatctaaactacttcttttttgcatagctttgcctaggtttgtatagcttttgagatgaacagtctcctggccatggaaaggcattggatgtatggtgttttgaaaaagaaatgcaaaagaagaggaaaaggaccaaaaccattagtagtacagaagttgcctctccaaaagcagcttgtttcagagcctcttgcttgcttcctcattgacatctttccctctcccatctcttaagatatagtatacaactgaaaaggaatgcaagccaaccaaagaaagaagataaggaacagttgtgtaaaacatttatttgcctatgaatggagacatgcacagacaccaccaaatgaatccaattcttgcactctccactctgcaatggagagaaatctgtgtgatcccatgcacatatagcgccatgaggagataccccttcctccttttctaccacctttttaaggaggtgaaaccggcaaatattctttaggctggatttagacctcaaagnnnnnnnnnnnnnnnnnnnnnnnnnnnnngtacaatctcaagctactctggagagtaacgcaatagagtatttgcttaggctcgtggaacaatctgcatttattcaagcatgagatggcgggggaagttcaagggcctcccacactggaaactgtgcttaatgatttggcatctcgagaacttatctagactagcaggaggaagtctaaccttacaaatgggcttctgtgagacttcttacatataccactcctgttgagagtgcagctgggtgcaaatgtggcagccagatggctcccatgttcactcagaatgtgaggtgctggggagagggaagatgagtccgcctcctactgtacactaacaacacattaagcaaatcaaacttatctatatatgaattcacttttaaaaacagctcagaacaatatatttttattgctgaaatactgagtatattctcacatcatacatatcctcatttcctactttgctcaaaagaataaatccatgtaaaaatgaactaaaagtttccaattccaccattgtattactttgtaatttaagagtagacaggaacaaatcttaaatttatagaatattaataaaatatcttcttacaccgttgtagtctataaattactctcaaacacacaatttttctctaaaagctagtatttccattcatccaaaatataataattgatccaacaaaaggacaaatagttgagtcacagaaaggtcttcaaggtccctctaaaacatcagtgattaaattgtatttagcttttcgataatgctaagggaaacagagcacaatgaaaaagtatgcagacgtagcagatgcagcacacatttatatagcaaagataattaacagtattcaatgcttcagcccaggaatagattagatttagcttgcatacaatattttgtgcttatctcaactccatcttcctatttaaatttctctgacagcttatcatttttttgcagtaaactatcaaactcctatacttgtccttcctcatcacgttccttcctaacactgaaaatgtatcttcaactacttccttaaataaaactcctgctcaccacagactggcctattcattgttgcctgaacacatactcacattctttctactttcatggttttgctcaattccttccccccaagtctcttgtaacttctccattgcctagacggtatcctttcttgaagttgtagtttaacttctacctcttcaggaagtcttttccaatcatctccctaccaaaagatttgcacatattaacatccttgtggaacatcctcttccctgcactcttttggcaagtattttctgtattatcatttggtattgactttgttcctccatccattcacttggtatacggcatatattaattccctcttcccaaggtcaaggatcatgtctcctatttttatccctagaaattagaaccaaaaagtactcaaatactacccctgataataatgttggtgtgatgatagtggatctatggaaaacaaagactaagatggaatctcttaggaaattactgggcacaaaaaaatatgagttcttttcagagaagcatcctgtttccttcctatattcaccagatataaaagtagtctaggccgggcgcggtggctcacgcctgtaatcccagcactttgggaggccgaggcaggtggatcacctgaggtcaggaattctagaccagcctggccaacatggtgaaaccctgtctctactaaaaaatacaaaaattagccgggcatggtgctgggcatctgtattcccagctgctcgggaggctggggcagtagaattgcttgaacgcaggtgacggagtttgcagtgagccgacacagtaccactgcactccaacctgagtgacagagtgagaatccatttaaaaaaaaaaagtagtctatattgtaactaatcatcaccaatgtccttaatttttcacttaagcatggtaatcaggctagatgcagtggctctcacctataatcccagcactttgggaggtcaaggctggagaatcacttgagccctaagttcaagatcggtctaggcaannnnnnnnnnnnnnnnnnnnnnnnnnnnnnnnnnngctgcagtgagctgtgatcgctccagcctgggtggcagaatgaaactgtctcaaaacaaaaacaaaaataaaaaaccatggtaatcatattcagtttggtgtacatctttcaagactgcattttaaaattacttagattgtatactgtacataaaaattttattcaaaagtataatttttcatacttgaaaactcagtatgaaatattagttctaaattttttttttttttgagatggagttttgcacttgttgcccaggctggagtacagtggtacaacttcagctcactgcaacctctgcctcccaggttcaagcgattctcctgcctcagcctcccaagtagctgaaattacaggcatgcaccaccacgcttggctaattttgtattgttagtagagacagggtttcaccatattggtcaggctggtctcgaactcctaacctcaggtgatccacccgcctcggcctcccaaagtgctgggattacaggcgtgagccaccacacctggctgaaaattcttaaaggaaaagtagtgcataatgtcaaagtagtacttaatctacactatttgggtaatggtatgactgaaagcccagacttcaccactatgtaatatatctatgtaacaaaactgtacttgtaccccttaaatttatacaaataaatatttacttattaaaatcttgaatttcatttgatagtagattcactgacatacggagaaatttaaaagagaaatgtatcatagaatgaaattagatcagtaaagaagtttatgtcaaagtgatttattttttcttagggaaggttagatgctcaagaagatagcataaaggaaaaaatagtcaacatctcctaaaatatatgtgaagtattattattgtaacagaaagtaaaccttcgcaataaaaatgagaagacaggaagttctagctagagcaatcaggcaagagggagaaataaaaggcatccaaastgaaaaagagacagtcgaatatctctgttcactgatgatataatcttatacatagagaaccctgaagactcctccaaaagactcctagatttaacaaatgacttcagcaaaggtacaggatacaaaatcaacatataaaaatcagtagcatttctatataccaataatgatcaagctgagaaccaagtcagaactcaattccatttacaataactacaaataaaccaaatacccagaaatatattttaccaatgaggtgaaaaatctctacaagaaaaactacaaaayactgctgaaagaaatcatagataacaccaacaaatggaaaaatatcaaatggtcatggattagaggaatcaaatcattaatactgcccaaagcaatctacagattcaacacaattccttttaaactaccaatgtcattcttcacagaattagaaaaaataatcctaaaattcatatggaaccaaaaataaaaacggcccaagtagccaaagcaatcccaagcaaaaacagtaaagctggaggtattacatcacctgatttcaaattatactataaccaaggctataataactgaaacagtgtggtactagtataaaaatggacacrcagatcaatgagacagaatagagaacccggaaataaagtcacacacctacaaccaacaggtcttcaacaaagttgacaaaaatatacactggggaaaggatactctattcaatatatggtgctgggataattaaagagcaatatgcagaagaatgaaattggacttctctttctcaccatatataaaaattaactcaagatgaattaaagacttaaatgtaacacctgaaactataaaaatccaaaagaaaacctaggaatagctcttctggacattggtctgggctaagaatttatgactaagccttcaaaaaaaatgcaacaacaacaacaacaaaatagacaaatgggacttcattaaactgaaaagcttctgcacagcaaaacaaacaatcaacgcagtaaacagacaacctacagaatcagagaaaatattcacaaacaatgcatttgacaaagggctaatatccagaatctacaaggaatacaaacaattcaacaagaaaaaaacaaataactccactaaaaagtaggcagaggacgtgaacagacacttatcaaaaaaagacatacaagcggccaataaacatatgaaaatatgctcaacatcaccaatcatcaaagaaatgcaaattgaaaccacaatgaggtatcaccttatacyagtcagaatgactattattaaaaagtcaaaaaacaacaggtgttgacgaggatgcagagaaaagggaacacttatacactgttggtgggaatgtaaattaagtcagctcctgtgaaaaacagtacagaaaattctcaaagaactaaaaacagaactgccatttgatccagtaattccagtactgggtatctacccaaagaaaattaaatcgtatttttaaaaaaagacagctgcactcgtatgcttatcatagcactgttcacactagcaaggtcatggaatcaacctacctacctacctacctgtgggatttaaaaaaatgtggtattatatataccatgaaatatgctcagctataaaaaggaataaaaccatgtcttttgcagcaacatagatgggactgaagaccattatccttagtgaaatgactcagaaacagaaaatcaaaaaccacatgctctcacttatatgtgagagctaaacagtgggtacacgtggacattcagaatggagtaatagacactgggaattccaaaaggtaggtgggtgagagagggggtgaggaatgaaataccacctgttcagtacaatgcacactattcagatgatgggtacattaaaagcccagatttccccactacacaacatatccatgtaacacaactgtacttgtacccctaagtccagaaaaataaagtacttaatttcaaaaataaaaggagaaaactgtttatttcagctgagaaaaaaagtgaaagtactatccatcaagataaaagtctgagataaccaagactcaaatatcttcattgcttaaaacaaaacaaaacaaaacttgtttaaagttacttagcacctataatgtgccaggtagtgtgttgcctgggaattcaaagatgaataagacccaaaagaaatcccataactcaaaatatggtagacaaatagttaaatagatccaggctcagcaaactacactgcatgtttttgtaagacttgtgacctaagaatggtttttacagataaataggtacaggtaaatttatttttacagataaatataaacaggtaaatattacagataaatctgatgacagggaacactaactttgaaccccaattaagaaaaatgttatcccccaccaaaataattccattcttctgattagtatacttggtattatgaaaataatactcaatattataattttacttttgccaaaaaaaaatcatgggaaattgttttctcttttgttatataagtacctacagaatatccttgattttccctcttggcctacaagttctaaaatatttacttgctgtaaacttcacagaaaaagtttgctgatccctgaaatatttacaaataattataatttggtaaatacagtgataaagaatatacctataacctgagaactgaagttattatgaaaataataacttgaagtaaggaagaacacctaaattagcttagtagaatggtttcaggaaagacttcctggagtaggtgacatttagtctgaaaaactaaataggagttaacgaaacaagggggatgggcagaggagtcaccaagaggttggaggagggtctttagtcgcccatggccagtttgagtcttgagataagcagatgccagggtggaattgaatctgattagtttcagttgttaataactcctaactttatatctctaccacagactcagttccagttataaccagctaccagacagcgtttttaaccagctaagggaggtggggtgtgcagaattccctgctgagaagatgccataatctctactcttcctatagacatggatccttctttcaggttctattatctctgtgggcctgtcctgtttattttttaaagttgtattgttttatataaaagatacttaataaaatacttagggttttttttttagtgattggaatctgtaaaaaataaaattaatttaaaaaaatctttgcaatgatatccaaaatttaaatatatatatatatattactggatagatacatgtatatatatatttactggatatatatatacgtgtgtgtgtgtgtgtgtgtgtgtgtgtgkatctccagtaaaagatagtgaatagaacacctatatgagcttatcaattctcctttccaaacatcacaaaaatgatggcaggaaataaacttttaaaaatttagaaccttaaataaaaggaaaactagagataaaataacaacagtgagaactgtcaaaaataggttaaaaaccggaaagcatatgatcaagtaacaattgacttcttagctgaacagaggaagttaaaagttaagtacctgtagctgggaaagtcaagaagcaaactaattcattcctgaaaaggaatgaatggagctttccttcctagagaaatcaaggagagaaaagacctcatactaaaaactggtgggctgccaaagatacggttggctatctcctgacaaccttacactgaagcccaataattgaatttacttgtctatggtaaatgtatgtgtaatttatttggggtcagctacattatgtaacgagccccttgttcaaaaagcagaaaaaaggtgtcattaaaaatataaaatataaagctttttcctttcttccttggtctttttttcagtttgtcatggttttttattttttatttgctagttaaaattttttctaaggaaggaaaaattttaaattattaggctgaattttgtcattcgtctttatattgcataatgctagctttaaatgtatatatgtacatttaactcctatgtaggatcaccaaaatcacacaattcttattttgtagttcatacatgcacatatattttgttcttaccagaacagtggaaacactacacaaaatttactcaattttttatttcaagtctaccaacacattctaccaacactctctacctttgacttatggcatcattactttcagcaaaaccagctgtgtaatactaggaaacaatgggaataagaaaggatatcataggattccttgctcatttgtgtttcttagaatgccattgtcttctttttgcattagaaacaactctagttcaaataaaaaacatagcctcaagaggttatcagtatttatgtttactcagacttagctgtaacatgtttaccttgtgctagctgtgagtctcattaaacttgtaggcaccactgggtcccttggaattctgtgttcatggggtatctccaacactatatgcaaacagggcagaaagtactggcagacgaatttcatagtccagtgttccaacaggccttacttataaaatacaggtttcgagacaaaattattagaatttcaagatactaacagtggaatattaagccgaatatgggactcttttgagcatgaggccctgttcaattgcacaggtctcatgctcatgaacctgggtctgagtttataagaaaatgccaaatggctgtgccatattgcattcccaccagcaacatttgaaagttcccgctgatttgcatctttaccagtaattggcagtgtcaaacttttaaaatatagccattctagtaggtatataatgatattcatcttaatttgcattttcctaattaataatttcggtgaatatcatgtgtttatttgctatctggatatcttctttagtaaaatatttgtttaaatcttttgcccaattaaaaaaatgaattgttttctttagttttgaaagttcttcatatattctggatataacttcttaatcagatatatccttcacaaatattttgtcccaatctgtggcttgttttatttattttttcacttttgcaggaatcttttgaagagcacaaggtcttaatttttataaactctaattttccaattttttaatagttgatgctttttatgtcttacctaagaaagctttactatcaaaggtcacaaagaatttcccctagcaatttatatcgctttaggtttcacattttgatctatgtacaatttcaagttaatttctttatatggtggagataggttttagcttcagttttctgcatatggatgttccagcaccttttactaacaatgttttacctcatgaaattactctstcatctttgttgggatcatttaattgaatatatgtgggcatctttctgtactatctttatctatatagctatccttactcccaatactacactgtcttgaatactgcagctgaataagtactgaaatcagacagtgggaggcctttcttgtttttctgttttaaaatcattttgcttatacgaggtcctttgcatttccaaacaaagtttagaatatgcctatcaatttctactcaaaaagctgcttatatcttgattgaaattgcacagattctatagataaatgtgagataaatttacccattaaaaagtctttgaatccataaacgtgatatgtctctccacttattaagttttctctcatttcattcaccaatgttttatagttttcaatatagaaattttccacattttcttagatttatcccttattattcatcctttttgatgctattgttatattttttaaatgtcaatttctaattgtttaattacaagtatatagagaaatgcaattttttaaattatcattatactttaagttttagggtacatgtgcacaatgtgcaggttagttacatatgtatacaggtgccatgctgctgtgctgcacccattaactcgtcatttagcagtaggtatatctcctaatgctatccttccaccctccctccaccccacaacagtccccagagtgtgatgttccccttcctgtgtccatgtgttctcattgttcaattcccacctatgagtgagaacatgcggtgtttggttttttgtccttgcgacagtttactgagaatgatgatttccaatttcatccatgtccctacaaaggacatgaactcatcattttttatggctgcatagtattccatggtgtatatgtgccacattttcttaatccagtctatcattgttggacatttgggttggttccaagtctttgctattgtgaatagtgccgcaataaacatacgtgtgcatgtgtctttatagcagcatgatttatagtcctttgggcatatacccagtaatgggatggctgggtcaaatggtatttctagttctagatccctgaggagtcgccacactgacttccacaatggctgaactagtttacagtcccaccaacggtgtaaaagtgttcctatttctccacatcctctccagcacctgttgtttcctgactttttaatgattgccattctaactggtgtgagatggtatctcattgtggttttgatttggagaaatgcaattttttttaaagtcagacctatggctaagaaatacaacttacttttgtatgttaatcttatgttctgtgacctggctaaactcacttattaattttagtagaattttaaataatctttgggaggggatggggggcaaattacaccatctgagaatgctgatagttttatttcttcctttataatctgtacacctcttatttcttcttcttgcctcattgctctaaacagggcagttaatatatgatttaacaaaatatgatggttaacatgtcaacttgattgtgccaaagtgtgcacaaattaaccattatttctgcatgtgtctatgaggatgtatttgaatgagatgagcacttgaatcagtggattcagtaaaatagattgcccttcccagtgtgggtgggcatcatccaatctgttgagggcctgaatagaacaaaatgacagaggaaagagaaactcccttcttttcttcctgtctgcctgtttgagccgggacattggccttctcctgcccttagactaagattcgcactgattctcccctgattctcaggccttcggactcagactgaaattataccactttccttcatgggtctccaacttgcagatggcaggttgtgggtcttttcagcctccataatcatgtcagccaattcctctaatatctcagatattatggatatttgatatcataatatggattatggaatcggatgggaaagagatccatcctattggttctgtttctctggagctgactaatacacacaagtagttagaacaaatgtattttatttggtcctgatttttaaaagaaaataaatatctttcattattaagtatgtcagctctagttttttggtagatatcctttatcaggttgaggacgttatcttctactcctaatttgctgagttttatttttctttttttgaatcttgaatggttattacatttatttcaaatgctttgggaggggatgacacaggagatcatatgttgtttttgttttgtttctagtctgttgatatgcagagttacattgattactttttaaatggtaaagcaaacttgcatttgtgtttaagaatgagttactacatcataaccaaaaacaccccatggtgtatgaggggttatgatgtagtannnnnnnnnnnnnnnnnnnnnnnnnnnnnnnnnnnnnnnnnnnnnnnnnnnnnnnnnnnnnnnnnnnnnnnnnnnnnnnnnnnnnnnnnnnnnnnnnnnnnnnnnnnnnnnnnnnnnnnnnnnnnnnnnnnnnnnnnnnnnnnnnnnnnnnnnnnnnnnnnnnnnnnnnnnnnnnnnnnnnnnnnnnnnnnnnnnnnnnnnnnnnnnnnnnnnnnnnnnnnnnnnnnnnnnnnnnnnnnnnnnnnnnnnnnnnnnnnnnnnnnnnnnnnnnnnnnnnnnnnnnnagaagatattgtatgctaggtaacataacataatattgtgtgtgtatgcgtgtgtgtgtgtgtgtgtgtgtgtattatatattgcccaggctggagtgcagtgatgctcatagctcactgctacctcaaactcctgggcttaagtgatcttctcacctcagcctcctgagtagctgtgattaaaggtacaagccatcatgcccaggtaatactgtatgtttttaaaagaatcattcaaagatccagaaagagctcctgtaaattaaaaataggacataaaaattcagtggaaaaagatgacatctaagatatttctcagaaaatgaggggggaagacaataagaataaaattatcaagaagcagcataagaaaattagaggtttagcatctgattaatggtagctctacaaagaacagagatactaaaccggggtgggggtgtggcaggtagagtagttaatagcgttataatgcaagaacatttcttaaactgaaagacctgaatttccagtgcccagcatgattttaaacggcctatagtaggccgggcgcggtggctcacgcctgtaatcccagcactttgggaggccgagacgggtggatcatgaggtcaggagatcaagaccagcctgactaacacagcgaaaccccgtctctactaaaaatacaaaaaattagccgggcgcggtggcgggtgcctgtagtcccagctaacttgggaggctgaggcaggagaatggcatgaacccgggaggcggagcttgcagtgagccgagatcgcgccactgtagtccagcctaggggacagtgcgagactccktcccaaaaaaaaaaacaaaaaacctataattggttaattattgtgaaatgtctgaacactagacgaaggttttaggataaagatcccaaaccttccactgagggaaaacaatttacatttaaaaactcaggaactagaatgacagacttttcagctgcaattctgaaagtccagagacaatagagcgctgcttttaatattttgaggtaaaagaatttccaacattatatttagtataaatgcatttttaggcccactatattggcttacacatgtaatcgcagctctttgggatgccgaggtgggagggttgtctttgagcccagagtttgagacaagctgagcaatgtagtgagaacccccgcaaccacccacctctacaaaaaataattggccggatgtgatggtgcacacttgtaataccagctgcttgggaggctgaggtaggaggattgcttgagcctgggaggttgagactgcagtgagctgtgatcatgacactgcactctagtctgggtgacagagaaagaccttgtctcaaaaaawttttttttaattaaaaagaaagatgtatgccattaaatcaaaagagcaaactagaaggaaaaggacataagactcagaaataaagaatcaaacacacaataaagataaagagaatccccagaacaatgatacaaagaaattccagaatgacatctatgcagcaggcctaaagaacaagtacatattagagtaggagaatgcaaagctctaataagaaagtccctgaaatggaaaaatgtgtttgtttgccaaccttgttgagaggagatttatgtttctgatagtttagggacatttaagcacacagaaaaccaagcaagcaaacaaaaaaggacaattatttactccagaaggaaaataaaatagcccaagaaaattaatataatccaaatactctatgcaactcagttttgagtaattacgtggttgcaatcgttataaaggctgaatattgacaaaattgaaattgagatcattgaattggaaaaacaggggcatgaaagtctaatggataaaacagagaagaaaaattttaaataccattttattgagtaaatatttatagaatatttattgtggtctaggcagtaagtgcttcacaaatactatccatgtaatcctgatactaggattaaggttagtattaattccaagtcaattggaattaaggttggtattattaatacctatattaataaggtagtaatttctaaggttggtattactaattccaagtttgctgatgagcgagcaaaaacacagaaaawttagttaatttccccaagatcagtggttttcaactgggggtgatgttgctcccaaccccaggggacatttggcaatacctagagacatttttagttgttatagctggggtggcagtgctgctggcatctagtgggtagaggccagggatgctgctaaacatcctgtagtgcacagtacagctccctaccacaaatcattatctggcacaaaatatcaattgtgctttggttaagaaataatatccagaatgaaaaggaatggcagtgggagagctgggatttaaatcccagcagctcttgaccaccttactactctgcctttcaatagcagtctaatgatgttgtttagaaacatgaagataaaatcagaagaaaaagctggaagaattaaagtggttgcttctacaaagacataacctgagatggagaataaaggccataaactattattgtgcttttgtgtgttgtttttcactgttctcttaaaagacctgaagcactatttgaattgtaatatgcttattttcaaaggttaaactatttgtgaacattcaaatcatagataattttcagcttaattattgttttccatatttgagagtatttattaaaatgcagtttataagagttttctagcagcaaatatttgtaatgaatgaaaagagggaaaaagtttcatggaggagagaataagagaacttttgtcttgattgacgtcttgcacctcaagttccaacttgtgacataatgaagcattttaaacagaaaatcttgaagattttctgtttaaaaatctggaagatagattaccaactctatcattacatatattaaaacatcaacattagaggaacagtgaagttgttcaagaaaacactggaagtgagtgaaataaggatgacacttttattcttaataattatttttaagttaataaatgtgatataatctaaaaagtcatatggaaaaaacaaatctaacttggaaattcacccaatattttctgccagtgagaatgtatctttaattcaacaggatatacggcaaagataggaagaaakatacaaagtttatgttactactacagcagtacattggatcagcagattatcccactccttagcctcagagaaaacagaagccatctacaagaaactttcctatctctgtttccttacccacatctccattttcctttctcaggtgtttctctttctgtttaaggtactttttgttttcttttgttttttctgactaggtaatttcacatgtttcaaaaagtaaaagatatcagcatacagtaagaagtcttgaacctgctgccatgcacatttacctcattcttcccagttctctacaaataaccatttttatagtctgaatcctctcagtaattctttatataaatacaagcaaatatggatatgtgtatacacacacacacacacacacacacacacacacacacatttcttatatttcccatatgcactcttctatgtcttgctttatttcacataaaatgttttgggatacaatttaatatagcaaagtctggccaccttgaagatacttatcatttaacaactgagaaaatttaattccagagattatatttccattaaaaatattaaccaccataataattactggacaatttttaagtttttcacttctcagatacactaaaagaaaaatatttttaaaatcagatgtatgttttctatgttttagatttttctttttaagagacagggtcttgctctgtcacccaggctggagtgcattggcacgatcacagctcactgtaacctcaaactcctaggctcaagtgatcctcccacctcagcctcccaagtagttgggactacaaatgcctgccaccacacggactaattatttttattttttgtagatagaggtcttgctgtgttgcccaggttgctcttgaactctggatttcaagtgatcctcctgcctcccaaagtgctgggattaccagtgtgagacaccgtccgtggcctgtttttatgagttactagttaagccaacttaaagaaaaagtgtactttagcaagcagtatgtttggaaacaaattaataattagactaaataccctttgtataaaagttggccggacgctgtggctcacacctgtaatcccagcactttgggagaccaaggtgagtggatcacttgaggtcaggagtttgagatcagcctgatcaacatggcaaaaccccgctcctactaaacatacaaaaattagccgggcatggtggcgtacatctgtagtcccagctacttgggaggctgaggcaggagaattgcttgaagccaggaggcagaggttgcagtgagctgagatcaggccactgcattccagcctgtgcgacagagcgagactccacctcagaaaaaaaaaagtaaatcagtggtcttaatgttcttactttgccttaattttgcatcattttctgtacttctaaattttaaatatgcaactttatcaaatattttaatttctctatttaaaaaaatcctgagatagtcaaagatcatttttcaaatgctaaaaacctaaataatcacattgaaatcaatttttttctagcaagattttaatgggagctaaggggcttgagattgtataaataaaccctcccttctactccatgcaacatggataactcatgtggacacacatttctttgaatggagctcagaatgtggagttggtagaggagagaaagaaaaatgtaacacatgacaactgtacaccaagttaaccccaacatatctctacttcctgcggataaacagcctgatttgacctggagttgtgaaatcaaaggaaggtgagagtttctctgtggcccttccaagattctcccagagtgcaaagcctaccctaatgccacaggagaatcctattttatagtcagttgtctttgaataaatggtgttttgcttcaattctaaatgaatattatcttttgggtacatattaaattagtttcctgtcttctatttcaagtgaaaaattactttgcattttatggattcaacttattgccagaactgctagaattgtactagcagacaatcagagggttttgcaccatgtctatttgactttcttatggcatatggacatacccttgtctgaaatttaaaaaaaaaaatacagaaaaaaatggaaagatcagctctattccctaaaacaggaagagaaataatttcaacacatataaaataataaaagtaaattcaatatctattgaataactaccataggcaaagcaatgcaaccttctaaaggttgaaattagtaatgtgttactagaaatataataaaaatgtcaaatacaaattatattagtgctgtaataaaattaagtcgagattcttcaaaattatatatgttcacaagcacaaaaataacaaagaaaaatggtaagcatgttgtcaaaatgcaatcgatgatatttcaatcatgccacatttccccagcaggtgttctatttaaagaaatttgttatatttattctggttgttttgtataactaagctatctttttttttcagttattgtgtgtgtgtgtgtgtgtgtgtgtgtgtgtgtgttattttggtgaagatgaagtataagaactctaaattctttatacaacctctatgtatctttgaatagactatcaatttttaaaaacattattaattggacacaccaactgagctgtatgttcttatgtgttatttgctggcactgataagtttctggaaattagtaaaacactttaagctatatatattatatatatatatatatatatatatatatatttctaatactgcagaggcatgtgaatcaagtggtttgcacaactgatgtccaaacaggaacttattttttgttaaaatatcatttatcaggtgccaagtgtaataggaattctcaggagcttcatactgaatctacaggcttttttctttgtcttcaaaagtacaagaaatcgtttattgtttgtaatctgtaaaagtgaaagtaacagcaaatataaaacgcatttaggaaaacagaaaaagtaagccaaatgtaatctctaactctttcaaaattaaaaatcccttttgagaagaagaaatttgtaagtacaaggcaaatttgctaatacgtttttgtttactttgttataagttcagtataaaattagcataatttccaagtactagataccatattactaatataaatacatgctatttagaaagtgattactatagtagtttgaaacagacaaaatcaagcaagggtttttgcacatatcttgcaaatataaacttagaaccttgattttaccaaaattatacgaaccttatctttattcatgatcatatcaaataactaccttggctctttgccctcccaaaacaggcctccttttccttaaagctattccatttacttggcttaatctataactagagcaagactgaaataatcatctatgtcatctaaaaaaaccacttacacaaacgacactgtgggaaaagagagaggcagtggcctggcactgatgactgtcaaacaggaattgggaactaaaccaatgagccctcaaagactggtaatttgataggacactttctatagtagctgagaaaacaatgatactttacataaaatttaatcttttataagatttttgcattttagttgataatttatatttttatcttactactgtggttatatttgaatgtgttattaatataattaggtgatataaataaaattaacatattattttatgaaaatattattgtattattcaaaaaccaaataatcatttaaaattttttgttaaattgaaatagctcataaagatctttcttatttaattagtgattgatggaaaaacttattgttactacatccaaataacctgttcaccctaccctcaccacccagtgaacactaactctgtctgtagtacccccatgtagtacagtacctaaagtacctaagtagtttacttaggtagtacagttacctaagtaaactaacatatattttcttttctttttttttgtatttttagtagagacgtggtttcactgtatcagccaggatggtctcgattgcctggccttgtgatctgcccgcctcggcctcccaaagtgctgggattacaggcgtgagtcaccacgcctggcccccatatattttcaatcccttcatctcatgcctaccttttctagaagctagaaaagctatgtacttgcttccttgctttccttgcaatcagaagtggtcataagacataattccggccatcaatatgtaggtgaaagaatactagagagaagtcttttgggggaaagtcagtttttctacattaaaaaaacgcagttttccatcattctttttcggtcttgaaagaggatcgaatgtgtggaattgctgcagtcctgttatgactttaagaggaaggtaaagataattgcagtgatcctggattggatattgttgagctactgcactgtcagaagcagttgcctattacctggtttctaatgtgagaaaataaccctttctgtttaagccactgcttatcagatactctgttacttggggccaatagtctttctgatgcactgccctaaaagagttcatattctgagaaaaatatgatcacatgcccaaagtaggtaacagtgctttaaataaaagatatcttttatcttatctaaattgaggtacccaccttccacccccttgtaatatcctgattatcagagtctagctatttgctgaaagaaagggctggtgatttctcaaagaaagggctggtgaatgaatttatgcatagatgtgttttacttttggttaaaagacaggtaatgaatgtatgaatgtgtgtgagtgtgtgtatgtctgtgtgtgtgcatgcatgggtgtatgtagggtgataatccatataaaatagttaattttattagagactttgtgatatagtgaacccaactggtgctgcttcaagaaccaactgacaaagtatggcacagtggtggcctcacttctgcagttaagcccagcccagctctagctctttggtaggcagtttgggaatcactgagagacaatccctacaacatcaagattaattctgtcacagagggtataagcagcagcagacgtgtcaggaaactctacagtaagtgacaytcaggtattaaacttttaggaggtctaagtggaaaaacaaaggaagtttacagagcatatattaatatgtcttgaaaaatcctggaaatattgggagtggtaagaaattttggggagtatggagttcctacgagagggtctcactctgtcaccaggctggagtgcagtggcaccatcacagatcacagaagcctccaccttccaggctcaagcaatcctcccatctcagcctcccaagttgctgggactataggtgcacaccactacacctgactaatttttaaaattttttgtagagatggggtctacaggctgttgcccaggctgatctcaaactcctgggttcaagtgatcctcccacttagcctcccaaagtgctgagtttacaagtgtgatccaccttgcctggcctaaatttgcattattaatgtaactggaatctagtttgtagacaaactgacagggttatgaagaaggtgatttttggttaacagatactttaactcttcacccaattcaagctgctattggtgaagagaagcttgaagctgctattgagaagacttttatccaataaaagtcttggattaaaagtccaagacagtagctcaataatatccaatccaggacttttatctaacacttttatccaacttttaatccaattcaagctgctattgagaagactttcccattaagagaactggaccggagaaaggaagattattcaaacaagaaagcaagagaatgcttattgaaagccgagtaactggagtatattctttgattaaaggcagtagagtttatacttctttaggttcatattaatggtataccgtaataaccatatcattagaagggtaaaaagtcttatttccccctccacactccaagactctgtatgcagtagtaatctctcttcattttttaaaaatgaaattgaatgctatggaaagacaaatcattgccacaaattactatgggcaagaaaactggaatatattacaaaaatatatttaatggaagcattctaaactcattgtttcacaagtgtcctcaagctatatgttccctttaacaaaaactaaaacaaaaaactgttggttttgcattatggaaagtgtttatgtaaataagacaatctagaactcccaacagtagatcgatggtcaaaaggccttggcccagcatccaaagactggctaatgaatgcataacggtaggtttttagtgaaaatataatgcttacatcatatatgtataatattttatagttctctactttaactttttagaatagctgaagaactactcatcctaatcgtttcagctctctaagacaaatttcccctcttcatgttgttgaatgtggcaggttccccttttaatatgaatatcgtaagtctgggtttggctctagattaataactagtctctgtagatatgaccattttcctcctaagttttctactagacattatagggggagatgtaaaaatcaagacaatcgacttaaaaaaattattttcaagtgatgcctgtttaaattaaatgctctaattccacctaacaaagcctttaattatcaattttcttgcacagcagctcactcccatcagacaatatgaaatcacactctttaagacagaagataaactagaaagcttaacttctgtcttggtcttcatttctgggaacacttttacaaatcaagattagcagccatgaaccctaaggcaagtccctgtgggtcaggattagagcatattcacattaaattacttagtatatgttctaacatggctaagtttcaaaaatacagaagggttatgcttatttgccatattcccttcaaccaaactgaataggcagttacataaccttgccaggacaagtagtagaaatgagtcagagacaggaccaaccctagtaaaaattgtgaattaggcagtttgacttcagtgccacacccctttagtactacatatacttccttgatcccctcccttggtatcatcagccccgagggccaccctcataccacatacctctcccccaccaaattcctctctctgtctttcactcatcatcgaaactggcttcccctctttcctacttccccttcgttaatttgaatttgcagctccagtatctctctcctttagggtttaaaatgacaactaactaatctgataaaccaatccacattaacgtgtgaagagagaaagctagaaaataaagtgaattttaactatgactttctaaagataaaacctttgcagtttaactcattaataactaaaagtgagaatttctagccaaaaaatttaggtgagggaaatgttttggttcgggtagagccttgaagcacctggaaaatcaagtaagaatagatggttgcttttatggtgtagccagctctaataagtgtaactgactagccctggtcagtttggggccagtaggggaaaacgggaaataagctaaatatacaaaagaagttcatttgcaaagaaaagtggaagttacaggagcaccacaattaaatttttctgtcttagtatttcatagatctagcgagtcctggtgcctgtaaatattttccaaagtttctcttcagaacgaaaaaattaagtccaaaaattatctcaagcctaaaatatccagcaattccaaaaacctgtaaagctttttgttgtttggctttaaaaaatagtggcctaaagcttacagttttcatgcatatattgtatttgctcctgctgaatattgaaaaaacattacaggctatcatgtgtggaacatattcgctattcttatttccttcactttacaaatgaggaagatactcaaagaagttaagtggcttgccaagatttgtacttaggttttctgagtgcaaacgctgtgttcttttcaatgtactttgtcccagtgtttagttatctctgtcatttctgtcatgtgactctgcatcctaggggaattctcaaattttaaagagcgttcagctactaccaaaagaaaataacttttgtattcaatggacctgaaggtaattctagtcctatctggtttctatcactgcattttttttccccagctaattcttggttcacttggaagtgttagtattgcctcacaaagtcttccttaagcactgtcagaatttgtgcttcaattatctgctcatgttttagtggattacttatcttgcttctgcttctcacctgggcaacgttcccatcacagctcttactctgtaagcaagaaaggataatatgctcctgggcttaaagtagggaaaaacactaacatagttggtacaagccagaatgcaaatatttcacattgagatgaacacaagaagccagctgggaaaacattgctatttacagatttagattagcccagaattcatttcagcctttgaggtaaaaggtggcatttaaaaatcactggcatttaaaacacacactcttaacactttggagagatatagacccctttgtgaatttgtcaaaaaattatggatgaagctgggtgtggcaatgcgtgcctctagtcccagctacttggtaggctgaggctgtagattcacttgagcccaggagtttgaggccgctgtgtagtatggctgtgcctgtgaatagccactgcactccagcctgagcaagagagcaagacccatcttttaaaaggagaaaaaaagtatggacattttccctagaaaaaagcacaatcacacatacctggaatacagtctgggggctccattatgtggttgtccatgggtccaacataaaatactggaatacagtctgggggctccattatgtggttgttcatgggtccaacataaaatattcttgagttagagtgtgtcatgagtacggtcccaaagtgatgaacaacccatatgccacttaaaggccaatatttattatggccagctttctaatttccttagtagtagcagcaataaatgatgtggatcttttataacaaaagtaacatatggttgtaaagattttttttaatttcagaaatgcaatgttttccgtaattataatcctcaaacagttaacagaaaaatatctccatatatatttatagatataggtatttttaaacagaaatcagatcatactatatggcaacttgattctgttgctagatcatatatattggtttaccagagtttaatcattctgttagcatggacatttattttgtttttgattttataactatcaacaataaggcaatgaatatccttgatcacatatctggtcatgtatataaatatatgtaggataaatttctgaagtagaataaattaaaggatacaaacataaattgtgaaagacattgaaattgtacttccaaatggaataaactaacctatgatctttctattacttacagaaactttttattatattttatgtagtaaaatgtacaaattattttaagtttttggtttttatcacgtgtagaaacaagactcaaatgctctaaataaattcactcatacctccttctagtatgttatgactcagatttttatatggaaatctaaatgttattaaacagaaaagagcttaagggtagatcctagaacatacaggaatttgaatatgatacagagaggatttcgtttctgtggggggaaagctgaattattaggtaaagatgtggggacaaaggggtcgctgctgctaccaccaaaataaattccatatggatgaaagaataaaatgtgaaaaacaaagccataaaaattttaaaagaaaatatgggagaatatttttggtaacagaaaaaaaaatggcttttaagcagagaaaaatatcctcaaatagaatagaaaattataactgtaatgagatatcattttacatctattagactgggaaagataaaaacagtttgataatgctgtattggtgaagatgtggggaaacacagtatgctatcaaactttccgtctttgttaggatgactggaacttgtaccacttatctggaaggcagcccggttttgtctatcaaaatgtaaaatgtgagcgggcacaatggtccaacgcctgtaatcccagcactttcggaggccgaggcgggtggatcacctgaggtcaggagttggagaccagcctggccaacatggtgaaaccccatctctactaaaaatacaaaaattagccgggcgtggtggcttgtgcctgtaatcccagctattcgggaggctgaggcaggagaatcgcttgaacccaggaggcggaggttgtagtgagacgagattgcgccattgcactccagccagtgtgacaagagcaaaactccgtctcaaaaaaaaaaaaagtaaagtaaaatgttctttaatctagcaattttacttctagaagctaaacctacagatgtacaccacatgtaagccagaatcgtttacaaagagatatatttcaacttgaaaccccgtctctactaaaaatacaaaaaattagctgggcatggtggcaggcgcctatagtcccagctactcgggaggctgaggcaggagaatggcgtgaacccggcaggcagagcttgcagtgagccgagatcgcgccactgcactccagcctgggctacagagcaagactccatcttaaaaaaaaaaaaaaaagggaatagcaaagacttggaaataacgtatatgctcattgaaaagtgaggagttaaataaattatgctacatctaagcaagagaatactacacagcctttcaaaagaactaggctcatctaaagcatctgataacagaaataaaatacatattatgaagttaaaaaatcaatatactagatgagtaatatcctttggaaaaggatatttaggtgtgtgtgtctgaaaagatacacaagaaataactaggtttctcaacaccgtaacctgaatgatacacatcatcccgccctttgcctgtacctagttgactgcttgagcctgctgctaatcattctaatttatactttattttaatattttttatgtaactcccactcatttattttctttttaagactcttcttatttttgaatggyactcttccaaatgaatttttaaatcattttatcaaattcctaaaagtatcctgttggacatttgattagaattatactggataggctgggtgtggtgggtcacacctgtaatcccagcaatttgggaggccaaggagggaggattgcttgagcccaggagtttgagactaatctgggcaacatagcaagacccctctctacaaaacttttttaaaaaattagctgggcatggtggtgtgcacctgtagtcctagctacttgggaggctgaggcaggaggatagcttgagcataggaggttgaggctkcagtgagctgtgaccacactactacactccagcctgggtaacagagcaagaccgtgtctcaaaaaaaaacaacaataaaaaacccaaaaaattatactggatatataacttacttttaaaagataattatacattctttcaaccttggtatttaatttaaaagaagattgcttttttatttcaaacattgttatttctcataagtctgtcatgattctaaaattttttttagagaagggatcttgctgtgttgcccaagctagcatgcagtggctaatcataggcacaatcatagtccactacaaattatatcatttttaaagtatgtcttataacttttgtttatattttacattatgtatgtatttattttttttaaataaagatggggtcttgctatgttacccaggctggtcttgaattcccaggctcaaacagccctcctgccttggccttctaaagtgctaggattacaggcgtgagccaccatgcccagccagttttataaatttattttagtgtttatttttagctacttaaatttctgtggctactgtaagtgggatggattctttttatattgtattttcaaattggttatgataatacatgagaaagctcttgattttcatatgtttttttattattattattattgttatttttgagacaggatctcactctgttgcccaggctgtagtgcagtggtgggatcatggctcacttcagcctcgacatcctggcctcaagcaatcctcccacctcagcctccagagtacctgggactacaggtgcatcccaccatgcttggctaacttttttattgtttgtagagaaagggtttcaccatgttgcccagactggtattgaactcctggactcaagtgatctgtccacttcagcctcccagagtgttggcattacaggcataagccactgtgccccaccccccgtatgttaattttataactagttatcttaatttatcttttattgcctctaaaagcttttcagttgatgctttggagttttcatattatttgcaaacaaatgacaaccctgacttatttacagtacttaatttcttatttctattttatatctaattgcattggctatcgtttctattgttacaatgtgatggtgaacattcttgccttgtacttgacttcaataggaataattacgatgttatgttataaaggaagtggctggctttagtataacatatatatatatttaaattattacaaattctaatttttattgggaatgatgctggactttacaaaatccttttcagcatcaactgagatcctcataatgttttcctcctttgacttactaatataatcaagcatatgagaaaattttctgttattgaactattgccataactatacacatgaaataatttctcttaattttgttatattatttgtaatgtagtgctgggttccatttgttagtattgacttttacattatatccaaaaggaatttaacctgtagatttcccttgtgtgtactttttaacagattgtattttaaaaccagtctttcagctcatccaaaacagagggattactggtgaaaatgccttgagggcaaccacctgaaatggccttaataaaaaaaaaaacacgaagaagaaaaagaaaaggaaaaaagctaacaacactgtggtttgtctacttttgcggaaatttacaacactatacttgctataccttctttctgatgtgaatccacaagctattgcagccattaattaaggatattgcttttctttccaataaatacatgaactttctttcagaggcaaacagagacagatgtttcatgaaagtttctgttcttcccaacctgcctttcctacctccctgatagatgatccagaacatttaaaaatgggggaagaactgagaaaagggctccaatcatccacttgtgtttcccatccaaggagcctggcctgttatttactttcaccacttatccctgctgctgctgtttagtttttgttgttcccctcaactgactttcctcatctttgctgcattcatcaaagcccagtgtaaattcccctcttccataaactgaggaatccagcccattttacatagcaaactttctcttagctgctacctactcaaagtttggctgcacattttagctataattgttctcaaattgtttcaagagtgctagttttctttcttaggctccaggttagctccttgggagcggggacttagcttaaaatcctgctgtgtattttccgttgtgtttagccctatgagtaatcacattcaatgcatacttgtaaggcatatttgactgaagatatctatcatagttattcatttagtaaatgatataatgaaaactcaagtgctcgccaaagataaatcattactattaattccctcattcatcatacatgtatggcagcctcaggggctagggaacctaggattgctgctttgactttttttggggaagccaaataagcctcagatctctccactttggagccagccatgaaattcagatttacctagggctcaacattaagggtctcagactaaatttatcttcaggtaccctttccagagtggaccagtttaccttatacctctgagaataacccaaaactttcaaaactcaaatcacaggatattatttgttcatgaattcagcaagactctcttgtttaactattgaaactcaaatatttcggcttgcagcaaggaggggtacagctgtctggatataccttggccaaatttcagtgtatatagaaaagtgggaggttatcgactatgttaaacmttttccttaaattttcaaacttcgggattattttagtctcatagataaaataacaaggcaagtatttacaaacttttttcaaaaatatgagaatttcagttttccctagggcatttggcgttgtgctgtcaccacacttttgaagatagctttacaaccgtgggaaaactcaccgggcttttttcgttgaccccgccatttctaagttgctatattgctgcaaggagctggcaaagccatgctcttcctctcccccattctcctcttcctttcaaagaccaaagcgccccgtgagaatatagaaacaaggctgagaggcagcgaagagtaagggaggagccagcacttacgcatttttcactctcctcctcactccctagggtcatagttttgattctgaagttagaagtgtgggggtcgtcggctgcattttcaacttggcctaaaagttggagttcaccacactgcaggcgctaggaactctgccgctcggtcaccaacctgagcctctggctagtccgaagaacgcgaaaagccaggcccaaggcactggttgtcatggcaaccggggcgctggtctccctggcgacctcgtccctagggaggaggtggagctggatgccaggcgggccaatgaggtcgaggggagctcggggtgggagatctgcggtcctcccagtgccggggaatggttgagtgacaggaccgggggggcggagccggcgcggctgcccgaggtggagccccagtggtgcgagtagctccagcggccacgctgaggcgagggtgacacaccatgctcacggcccctggagaccgtcgtgctggcgagccgtgctccgtagctccccggtccgcctcggcagcggtcagagtcgcctacaggagttgagccgcccgcgccagaaggttttggcgaagctcttggagaggcgtcgagcacagtagggcggcgggggtgcgttgagcgctcgggggtcaggcagtcggccgggatcgccgctggggagcgtttccgaggcgaggaggaggaggaggagatgctgctcctcttctccccctccccaggctccttctacagctccttcagcccacgcccgcagccgcttgtgggagaagtggtggtggctctcggcgcccgcggcggctgccggcggcccgccccgacgccgcgtccctgcagccctcgcccggcgctccagtagcaggacccggtctcgggaccagccggtaaggacgagagccgccctgggctctgcgctgcatgtgcagaagtgcaaaacaaagtacattgcgctcgttctcttcctcctctctctgctttcgctccagtccctaaacccaactcctcggttgccctggtagaaggaacttttctttggttttggtggtgggtgtttttgtacgttagagtgggggtggggtgactggagtggggaagaatgagatgaaactccattgctaattaggtagatccatctcctctgcggaagaaagccggattctcgggaatgaaacccacagggggagtaagagattgtggggtaatagggagtgacattgccccgtcgtgcttgcacagctccgctctgtgcgtgcttaagggaagggctcccggagtctgtttctaatttctgcaaatgattgtggagatggtgtggttagaggccgcccagaagaatgtgtgtgtaagggctcgagaagggggtgggatggcggggaagcagaggaagagggggcagagggagagacactgtctgatgcaaggtcttttattgcttttcttctgcttgctaaagttaacactctaccctccggccccctagccccaccgctttgctcattacgtgatactgtaagagcagacagctgggaagctaaagttaaaccaaagtcaagaaaattcttacaaagtttaatttccttctgttgtgaatataatggagagaggaggatggggagaaatatcactaagagatttacagcaatacagttttcattggccatacacgtatatgatcgacaccaccgcacacttccaactaatctgttcgacagccttgtgtcattttcatttaattgcatctttgaaacaacaaacgcggtgacttcatagggagctgcctggagctgagctccctcgcagaaaatggggcaatcgggtttgttttcaaggcaggacctgaacaaaatgtaggacacctgatctgtgggatgaagggcgctggtaactaattataaattttaagattttaaaatttatatctagaaagtttactaaaggatgggggggggagtaaaagtgcatgtattatgaaacaagcttaggtattttcctaaagtcttcatgactgtgttggcagggtccaggtgaaaacttgcttcatgctcattggctgcttgtagtggtgccaatatacaaattatttctcgttttaatatcactaggagcatttgttagtaaattcatacatatattgatttagtaaatttatacagaggcgcactgactgacgtccaatcttgtttattatactttgttcataacattgtgttctacttgatgttctagaggctttgtgggagtatgtgtggggagaggataggatggaaattagaactaaaaacagaaaaatatttgaggttagttgttaagaaaaggactgatttcatagtgtttttcacttttacaattagagaatgatagcttgctttaccattatgtaggtttatctttgaatttgcatttgtcccaccatttttacttgcatgtaaagcctagttatattttggagggtgattaccagcatccaaaaatataaatggcttttcatgtcacaagtaacatacacgcacaccattaaaaccagtgtcaatttaaaagtcagattttaattctatgatggggtcacgttataaaacttaggtcatctttttgttgttgtttttgagggctgcctcctaaatacggtatgtgaatgtgagaattagctaatcatttgttttggagtagataatataaatgataggtgttcatctttaaatgaatgaaatttatgtattctttgttattgagaaaaacgggtgttgatttgttctgtctttaatgtgttaaggattggatggggaagtgttgtagcttctcccgtatcaatggggtgtatatttttccagctcatcttagtgcccagccccaaatgtactggagagaaggactgtaagggataaactattacttcttttttttcctcttcaccctcttcttttgacagagggtgtaatttttaaataaaccccaaaacatttttatgcataattaaattataattaacaccatttgaaatgaaaaagaaacacaaccatactccaagccagtgcatttagtagttactcctgtcaacatattcttgttttggaatatgctttgggagaactctgtgtagttcaaagtattctcctgtttgcctctgatgcaaccaagtacgactcatttgagttaatatcactttacaaggtaggggcctgagaaaggagaaaagataatgggccttaggatagaagaatcagtgctgatggaaatgacgagaatcttttgggctgggcttccttttttttttttttccctgaaaaactctcttttaatttgaaaattaaaatgggtcaaataacttaggaactaaatgttttaaagatagcttttaagatagggtctctgttgcccagtttggaatgcagtggctcgatcatggctcactgctgcctcaacttaccaggctcaagcaatcctcctaactcagcccccaaagtagcaggtaccacaggtgtacaacaccacacctagctaattttgtttattttatttttttaaatagagacaatgtctcgctgtattgaccaaggctaaaagatagcttttaatgagtacattaatgtaggacttttaatggcttaagttaaagttgaaagtttcatactagctgtaaatgtcccatcaaaactcccgtctgtaaactgctttgggaggtggagttctaataatcctttgagtttgggaagaaaatgaaaacacctttaagacccttattcttgtttagtgtcaggcactgtgaataagcaccctgctctatcctgcccaaccctgttcccaagaatgtgtgactgtcactaatagtaaggcagtaggtgggccatttcttaggataaaaagagaagaattcctaaataatcttgtatagaggctggtgtagatttaaaccataaacttcacatgtttttcccagagtttgctatcaaatgcatgggaaatacaggaacagggtctggttcaagtgcttgtttagatgtgtttgccttatcctgtgctctgccattgaatcctgcttttttaatttttgttttgttttgatttgttttcacactggaaaagtatgaaaattctctgaaacaaactgtctcaaagaaaatccttctgcatagtataaaaagtgtggaggactgctgtctgacaaatatgtatccaaatcctagagactaagtttatttttaataatttaataatatatacttctcaaggcttttttgctttgttgtgctttttttttttttaagatggaatctcgcccaggctggaatacagtggcacaatcttgtctcactgcaacctctgcccccgatcctgggttcaagcaattctcctgcctcagcctccttagtaagctgggattacaggcgtgtgctaccacacctggctaatttctatatttttagtagagacgaggttttgccatgttggccagtctggtcttgaactcctgacctcaagcgatcggcctgcctcagcctcccaaagtgctgggattacaggcgtgagccaccgtgcctggtccctctcaaggtattttgaggatgaaattaatatgtgcaaatgtggtttaagtgcaagctgacagtatttagtttgcttccttccttgccaattttctttaaaaaattaaataatcacaaaaacctataactactcaaatcattcttgaatgtgtaacttgaatctggctggtgaaaaggccctctttacctactagccaataaatgtcttttgttgcatacttcatctgtgcttaataaacagtttcttttttttcctcctagtttagtagtattcaactctgcctgtaccttagaatcacctggatagcttttttaagttttttaatttttttttaagagacaagatctcactctgtcacccaggctagaatacagtggtgtgatcatagctcactgcaactttaaattgctgggctcaagtgatccctccgcctcagcatcctgaataactgatactgcaggtgcgcgctatccagctaattttttattttttgtagagataatggtcttcctatgttacccagcctggtcttaaactccctggcctaaagcagttgtccctccttggcctcccaaagcacggggattacagatgtgagccactgcacctggtctggatagcttttaataatctccatgccccggcctcaactcagactattaaaccagaatcattgtggatgagaccctggcatctgtatttttagaaactccttaagaaaccatagtcaactttggaaccaatgttctagactctactagaatagagtgtagaaaatttggttcccataaatgcagcaacattttttgtgttggattatattttatatttatgtattttttctatataaatcttaagaatttaaaacacaaaaatgtctcagaagcatctatgtatatgcctatctacaggcctttttactatttggatgagaatttaaggtacaaatatttccctagagctgtactgtcaaatgtagtttccctggccatatatggtatgtaaatttatattttaattaattaaaattagatacaatttaaaattctgcttattacaactagccatattttaagtgctcaggagccacttgcagctactagctactgtagcaaacagctcagatatagaacatttcctcatcacagaaagtcctgtactgcttagaggttttgaaatttgtgtatgtttcttatcatctgaaatggcatatatataattcctgttatttccttcagatttataatttaaaaatatattgtgttattttttaaagttactttttttaaagtcaggagaaataccacattttttatacatttcctctttcctcagtcttttgtacctagttaaaggtttttcttttcaaagttaactgagaagaggaaatttagtgtccttgtttttattacttatatcagtatgctctaaacctaactaatggcttaattgcccttgtgtactgcaagtttcaggtctggaaatgtgatgtcccaaaatactgaaaatagtcatcatttcaacacaaatgttaggatttgattaaaagttttcctttttgctaaagatcctttttcttttgcatacagaaattctgagttatcaaatgatgtgattgagctttcaa

SEQ ID NO: 96174 - DNA, 46917 bp, Homo sapiens
  misc_feature (1)...(46917): n = A,T,C or G
gcagctgtgaggaagacccacgcagattataaaaccagcacaaggcacagggcaggtctgggtcagcctgaaggggtacaggagcatgtctgtctcttctcagctgttttaatctcccctctgccatgtctctccctcatgcaggactatgagttagaagcagaaaaactaaggtctcttctcgacttggagaatggaaggagcagccacgtgagcaagagagccaggctccaatctcctgccaccaaagtgaaggaagaggtgagttccatgggccaggcggcctcgggactgaggtggaggccaagctgccctgctccccagggagcatggtgtcacacgctggcctcagagatgcacacacaacagggaagccactgagagccctcctgcatgcaaacaggtttggtaagagatgaggaacttgttctagggcagtgacatcaatatgcctggaaagacagcaaggccgggcgcagtggctcacacctgtaatcctagcactttgggaggccgaggtgggagaactgcttgagcccaggggttggagaccagcctgggcaacaaagcaggaccccatatctacaaaaatattagccaggcgtggtggtgcaaacctgtagtcccagctacttgggaggttgaggagggaggatcacttgggcccaggagttcaaggctgcagtgagctacaatcacaccatggcacttcagtctgagtgaaagagattctgtctttaagaaataaaaatttttgaaaatgcagctgaacagaagtgtcagggtcagaaccatggatctgggaagttcctgttttgctcacctcagtaagtacagtggagggctgatattagtctcctgtacacacaagagagaacactggtgctctaagaggcagaaagacttgctcaaagtcagtgtggccaagaccctggcctggatcttctgcctcgagatccatttttctctccaccggtgaggctacagtctaactccaggcaggagtgggcaagagctatgcctccacccccaaattccacacttctcaagaaccacgtccacgctgtctagctctctgttgcttaccctgttgacacctgtttgttgaccgctctcctaatcctcttctctgcaggaagcagcacttgccgccaagttcactgaagtttatgccatcaacagacagaggctgcagaatctggagtttgctctgaatctcctcagacaggtaactgatcttagtaagaaattctacttcaggctgttctaacaggtgacaaatacagactctgtcttagagaaatggtttgtgaattgatggaagtgtccccttgctaacgtttctgggcagggccaatgcaaagactggcccgagccaatgcttctactgacatgagaacttattcaactcagtaaacatctgctgaaagtgaatgctattttcagctgggcatggtggctcacgcttgtaatcccagcactttgggaggccgaggcaggcggatcacctgaggtcaggagttcgagaccagcctggccaacatggtaaaactccgtctctactaaaaatacaaaaattagctgggcgtcgtggcgcatgcttgtaatcccagctactcaggagactgaggcaggagaattgcttgaacccaggaggtggaggttgcagggagctgagactgtgccactgcactccagcctgggcaacagagcgagactctgtctcagaaaaaaagaaagaaacaaaagaaagtgaatgttattttctgaagtccatgatgttgatgacagcattgttttttaatagcaagacactggaagcagttcactcttcatcagcaatgggctaaactgcggtctgtccagagagcggaaacaatgctgctggtaaatcctgaagcagcactctctgtgctgagctggaatgagctctgtaagtgcagtgagcagcaggaataccatttgtgcaggagagataaacacatggtacatactacagacagatattcttgtgtgagcacagatagcatctgcaaggctgacagacacgccctaggacggggaccagaggtgggagaccgtgctttcattttaaactcttccacagctcaaaaatgttttacctgattaaaaaaaaacccaaactagttgtttgatcctttttgaaagtaaccctagaactctacaactaacatgaactggcactgagggagtcccttggggaccacaggacagccactctgaccaggtggggacaggccctacatgtgctgccagagcctggctttaaccttgtcttgtcttctccatcacagcagccggaagtagaagtgacccatgagaccctgcaaaggaataggccggactctggagtggaggaggcgtggaagatcaggaaggaactggatgaggagactgagcggaggcggcagctggagaacgaggtcaagagcacccaggaagaaatctggaccttgaggaatcaggggcctcaggaatcggtggtgaggaaggaggtgctcaagaaggtgccggatcccgtgctggaggagagcttccagcagctgcagcggacgctggcagaggagcagcacaagaaccagctgctgcaggaggagctggaggcactgcagctgcagctgcgtgccctggagcaggagaccagagacggggggcaggagtacgtggtcaaggaggtcctgcgcatcgagcctgacagggcccaggcggatgaggtcttgcagctgcgggaggagctggaggcactgaggcggcagaagggcgcccgggaggcagaggtgctcctcctgcagcagcgtgtggccgccctggctgaagagaagagccgggcgcaggagaaggtcacagagaaagaggtggtgaaactgcagaatgacccccagctggaggcagagtaccagcagctgcaggaggaccaccagcgccaggaccagctcagggagaagcaggaggaggagctgagcttcctccaggacaagctcaagaggctagagaaggagcgggccatggccgagggcaagatcaccgtcaaggaggtgctcaaggtggagaaggacgcggccaccgagagggaggtcagcgatctcacccgccaatatgaggacgaggctgccaaggctcgcgctagccagagggagaagacggagctgctccgaaagatatgggccttggaggaggagaacgccaaagtggtggtgcaggagaaggtgcgggagatcgtgcggccagaccccaaggcggaaagtgaagtggcgaacctccgcctggagcttgtggagcaggagcgaaagtaccggggtgccgaggagcagctccggagctaccagagtgagctggaggccctcaggaggcgaggcccccaggtggaagtcaaagaggtgactaaggaagtcattaagtacaagactgaccctgagatggagaaggagcttcagcggctcagggaggagatcgtggacaagaccagactgatcgaaaggtgtgatttagagatctaccagctgaaaaaggaaatccaggccctgaaagacaccaaaccccaggtccagaccaaagaggtggtccaggagatcctccaattccaagaagaccctcaaaccaaggaggaggtggcgtctctgagggcaaagctctcagaggagcagaagaaacaagtggatctggagagggaaagagcttcccaggaagagcagatcgcccggaaagaggaggagctctcgcgggtgaaggaaagggtggtgcagcaggaggtggtcaggtatgaggaggagccaggcctccgggccgaggcgagtgcctttgccgagagcatcgatgtggagctgcggcagattgacaagctgcgggcagagctgcggcggctgcagcgccggcgcaccgagcttgagcggcagctggaggagctagagcgcgagcggcaggcccgcagggaggccgagcgcgaggtacagcggttgcagcagcggctggcagcgctggagcaggaagaagctgaggcccgtgagaaggtaacccatacgcagaaggtggtgctgcagcaggacccgcagcaggcgcgagagcatgccctgctccgactccagctggaagaagagcagcaccggcggcagctcctggagggggagctcgagaccctccggaggaaactggctgcactggagaaggcggaggtcaaggagaaggtggtgctctccgagagtgtccaggtggagaagggcgacaccgagcaagagatccagaggctcaagagcagcctggaggaggagagccgcagcaagcgcgagctggacgtcgaggtgagccggctggaagccaggctttcggagctggaattccataactccaagtcatccaaggaactagactttctgagggaagagaaccacaaattacagctggagagggaaaacctgcagctggagacccgaaggctccaatcggaaatcaacatggcagcgacggaaacacgagacctgcggaacatgaccgtggcggactctgggaccaaccatgactccagactgtggtccctggagagggaactggatgacctcaagaggctctccaaggacaaagacctcgagatcgacgagctgcagaagcgcctgggctccgtggccgtcaagcgggagcagcgggagaaccacctgcggcgctccatcgtagtcatccaccctgacacaggccgcgagctgtccccggaggaagcccaccgtgccgggctcattgactggaacatgttcgtgaaactcagaagccaggagtgcgactgggaggagatctcagtgaagggtcccaatggggagtcctcagtgatacacgacaggaagtctggcaagaagttctccatcgaagaggccctgcagagtggcaggctgacccctgctcagtatgaccgctatgtcaacaaggatatgtccatccaggagctggcggtcttggtatctgggcagaagtaggcacagctcttgcaactcttcgtaacggcagacgctggccctctcctacgacgcagtgacctccttggtgtcgtcctctccctagccctggtgcaggccaagcattttatacataccctcgctgccaggctgctcagagtcccgcccacatatgagacaggcactggctgaagacaggcaactctcgtcccaaccatcattcaccctgagtgacgtacttcatcctccaatgactggacaactgcgatgccttttcctcccttttcctgtacactcccagcaacaaactcctcatgataactgcacacaatctgaaaaccactgaaggacaagccaaccacagcagccaagcccactccttgcagcatgggtactggtggcacaccagacagtgacactgccccacaaaggcctgggcccgtgggggctgctgcctggcatgacatctctccagacttctggcttaaaaccaactttccatccgagaagcctcctcagtagttactctgctcatgagacagatctgggctccaagccaggaaaggtgaacagaaaccacaagtgtccagccctcggtgctggagtggacgttaattgtcagccaccagactgtcccggcacctacagagaatgtttcacagttctggcatttaaatcctttgatagtggattgtgctgctgttagccttagtttcagtgctttacaagtctcgcttattatctcattggtatttaggtatacaaaacagttgattattcaccacgccaatatctgggtctctgtatctcatgtagaacataagaaaatgggaactaatagggaaatttatttatagcatgaaaataaacctggtggctggagtctgcttgtacggtccacatgtttcttcttttgcatgcaaggcttactcccctgcccccccccttggctttcagccaaaatggatattccatctgtaacagctcctacaggaagaactacttacttccacatggtagaaagaaaagagtgagaaaaaatgttttggaaaccttgaaacaatttattgaattgctttatacaagattaacaatctccacaccacccctaacaccaacatagtcgctgcacaaaagccacagcccctctcacacctaagaaacggtcacgcccggtaagtgctcagagactttcgctgcgccagggaaacccctgcagcccccagaccccgaggctgctctgccccaccctctgctgcggcctcgcctgtaggtctgccttgccatggctgttcagtcattcgctctttcattaccacaaataaagcataaacaaggaaaagaaatctcaaactccccatcaaagaaacgtttccctgaggcaagaggcatcactagattcctaaaaatgagggtattctgctccagctgcacgcgcaatggtacrtggggaggagggagcaccaaagggaaaggaaggagggcctgggacccgggtgtttatgggcagagaagcctggagagtccctgctcagcctccactgccggcctctgcttggctttgagctcagcaatacaaatctcttctttggctcttttrctactacctaagactactctgtaaacaaactggaaatccaagttgcaaaaaatatatataacaaagggataaggaatccacttagcccaatgtgaaacacrgattggttcttatgtaaaaaaaggagwcagagcagaggccgggccaaagggcrgacagaggtcttgctccttgggaaaccgggaaggccagcaaacctctgaatgaaggatgagttactgggcgctgtaccctgggagtcaggagccaagagcggtccgttttcccacaggtgtatgtgctgaggacaccrtatactctcaacgtgcctgatcacttagctggagcagtcagttcagactcaccttgtggcacagacctcacaagacaggcaagtgccctcaaatccttgtgaaacagccactggttgagtggtgacttaggagctctgcagtaactgtcctagtctctctgatccactctccaagmtcttctgcacatcacccttcagtcgacacataaccccactgcctggagagccccaggacttcaaggcctatttctacccggcagacacttcacagaggcctgmttctgccgcactgcctaagaatgattcctaagaatacaaactggaatgtctatctgtgacttgggacccctggtatccttgaccctcagagagatgaagggctctgggctmtgcagtccacctccacgaactckggaaaaacaaaatgggagccmtggmtatamwgggacwtggaatttgggggcccagacaacmttctagtcaggacggcacagataatgatgtgcaagtgtaaaaaactcaaaactggctttctcttcaatacagacatatctttwaaaaggtcttcgtctcagatccattcagagggcwgaatggacatgtgttgtcgaattctgctccaccataaaggcactggaattatgtcttcctataatatgatgtgtgaagaacagtccccttctatccaatgcatttaatggtaatgatgaaaactgagcccaaaataggtgtctgtaaaaatcctatcataattgttgaatctacaaaggtcttttctctaaaagagcttcattgtcatgttccgaggagaaactggcccccacagtgagcacaccctaggtgttcttagtatttcgcagggacagtgcaggtctcccagctgtggctctggcctgagttttgtccgctttgagcacacagcctggggatggggcggcactgkgaccatccagggagcttactgcagccagaaggagcccctgagcagtggggtgctctgaggtactctgaccaaatgccaggggatcaggcagattcacccacaggtgtgccaactgctctgccaccagagcctgtaaacactgtgcctcccaccacggcccagcgcaagccccagcctagagctgcccctctaacaaccgtctagcgacagagctgcaaggcccagagcacggggcagtctgcacctcctgagcagcaagggcccggctccctccatgggaggcacatcagaagtgccgagaagcgctccgctgagaactcacgctcctccagaagaacaccaagcagcagaaagggcgcagtgagtgtacatcctgggagacctgcacgttctgattccacccagacccaagtggcaagccttgcctctgaagcggtcacaatttccgtggtacagcaggccctttcccrtgaagctgagaagcacctggaaaagagtaagaaaaattagaacgcaagtttttcatgctctctgatttccttaaggcagkagtaaccaaacttcaagggagacacctaaatagcaaaagtccccaaatgctgagtgttctagagctcaaacaagccatgagacaccagccagcagttattcgtgtacactactcctggccacagcctgcaagcacactagcactgtgaaggtcggtggtcactcagcacagtgtttccagaacagcaactctgctgtgcaacttgggctacgtcatctcaggctacaattgccatcctgaggcgaggcctgacgatcacacagaactcaaggcagcaatgatcattcattctcttaccatcaaaagaccctcaggtcctgtaaagacaaattcaaaggcactagcattctcagtccacagaagaaagaaaggaaagcaacgcagacacaagtcacgcagctgaaatgcgcaaatagcttcttactcgcatctcgtgtcatcctataagctgaagtccatctaaggaagtgagagaagctcacttggataaccctgttttggtatagttgcttttctgattgattttctttttcctcgaacttttaaactgattaaaaaaaatttttttagagatgaggtctcactatgttgcccaggctggagtacagcagctattcacaagcatgaycacagcacactataccctctgattcctgggttcaagcaatcctcctgcctctcaatgccaccacatccagcctctgagagccttaaacagttttaaaaactgactcataataatgacacataytttatggggtacatagtgatgtttcaacatctaaaatgtgtagtgtcacgttagagttattagcatatccatcatctcaaacgtttttcatctccttttgytggcgacgttcaatatcctcctcctaactgaaactacatactactgttaactacagtcaccctacagtggtatagaacactagcacttattcttcctattctgatagccttttcatacccagaggaaaaatgaaaatatagcagaaagcaatcttttgagacagggtctcactcttgcccaggctggagtgcagtagcatgaccacggctcgctgcagcctcgacctcctcggctcaagtgatccttctgcctcagcttcctaaagagctgggactacaggcacatgccaccacacctgactaatttttttctttaaatgtagagatagggtcttgccatgttgcccaggctggtcttgaactcctggactcaggcaatcctcctgccttggcctcccaaagtgytgggattacaggtgatagccaccgcgtccggcctcaattactttgcttttctgagagtaacattcctgagagtaagcaaaggcagggcagcctgactttggaaagacccctgctctcaccaaggtggctctgcagcctctagtctgtagagaagtcactgcactttacttctcctcccaaggaaaggaggagtcactagtgctataggcttagcccctcaaagaagcacagtttccattgtggagatttacagatttagtcttgccccatatggcctctggtgtttactataatgcgccatggtgccagggagccacagcacatcatgaggcagatgtaacttgggagacgtgcagcacagagggtccttacttccacctggcaccagttcgccagggttacctcggctggcttccatacgagyggctctccccttatccaagtagcaccctggtcatgtctgaagcgggtctacagtaggaacaatgctaggtcaaagctgagacaccatgagacttcccatgccagaattccaggaggcgtacccaagaatcgcagactcgggatagggtgaggcagacgcactcaatgcaaaggtaccaacccggggcacctgagcccagttmtcaggtgctaccagagcagcctcaagcctgaggcttttagaagttccctatttcagaagatgctaaggggagcaccgaccacatgcctgctgtgctcccacaaatctgttctgatggagttttcacacttggacagatttaaagctgctcctctcaaagtcttgcactgtggcctctggctgctacctggattttccctttaatggaaacaaagtttagagagccttctgttaagcaatcacatctgacagtggagcagcttgcattccaagaccttgttgtacccaattagcccttggagaagatgcaccattaccttccctttttttttttttttaaactgaagagaaaaaaacaagccgagggttaggaactcctccaccgcacacaaaagcgcaccaccctgccccccgcaactttccctgtgatcacacaggctgaggctgacctggcggcagctccaagtggggaccagaggaaaccccaagagtagaagtgcgtgtcaccctgagtactgacaaagcacagcctcaaaggacaaaccaaaacaacaacagcgtcaaggcaaagacaccaagacccttggcagcggcaaagcacctaggggtggagagggcaaaggcacacggtgmgcgtggcacactgaccgtcgggtgattacctggcagactctgcgggatatgggtgggcaccgcagcgtgtgggagaggcgctgcatggggcgggctggagtgcaagccagccagaagacctgagagaaaacaggaggggagaaaagaacaaaacacacacattgaagacaggaacaggaaagcagctccagcagccaaaagcccccgataacctgccagrccagtctgggcaccacacccaaaggggcagtgggggcttggcacagttcccggagatgttccccacrgtcacacaccagactcaaacacaggaaccagagtacacaacagcaggacccctggccacaatctagaggttcctgagtgaccagaggcagcaaagaagcacttactgtggccaaggccatggtggaaggacccrggggcagggcctgtgacgatggcatccttggagacccctgctttggcagaggagtcagcgctgaaggagagcacatggacaggaatagggacaggggttataattcccaaggagttcgagctcatggccccagacagctttgggctgctggatttgtagggtgaagccatcaaagaggagccggccagcagcacagtcccactcgctcctttctagggaagaaacacagcaagcggtaagaactccagtcctgttcgtggctcactcacaccaaacctggcaacacaaaggatcctccttgtgtgtccacaraggaggacatacacatccatgtcagatggccctgggaggcaccctymgaccctgcagccccaaagacaggatccaggacagtctttatgaaccaacatggaatggattccagggaacataatttttttaaaagcaggatattaaatatgtctcctacagaggttgcagtgagctgtgatcgcgctactgcagtccagcctaggtgacagagccagactctgtctcaaaaaaaaaaagcctcctttgtgaagggaaaaatgtaatatagatatccataaatgttcatggatatttatatgtgtatatatatttatatacatacatacacacacatacatatatacctttatttatatttattaatctttygtttaaaaagaggaaaataaaccagaaaytaaagagcttagttaccttacagaggtggtgggtgcaggaaaggaggtgagacctccaacagacctttctatggttttgtctttgcaaccacttcatttatatattagaaaaagaggccgggtgcagtggctcacacctgcaatcccagcactttgggaggccgaggcgggcagatcacgaggtcaggagatcgagactatcctggctaacatggtgaaactccatctctaytaaaaacacaaaaaattagctgggcgtggtggcggacgcctgtagtcccagctactcaagaagctgaggcaggagaatggcgtgaacccgggaggtggagcttgcrctgagccgagatagcgccactgcactccagcctaggtgaaagagcaagacttcgtctcaaaaaaaaaaaaaagaaaaaaagaaaagaaaatgctcactccctcttcccgaacctgctgtgattacacacaagcgagatgcattaattattggactctgtccttcaaaaaccaacagaatcactcttagaaggtcmtgytattcctggtccatgaacacstccacatgactcaactgatagaagacagcatttccagccccctttagagagatggagaggcaaggggtcacggaaggcaagggctgttgctcattctgtgccacacagacagcctccgaagaggcatggtgcttggtgctggccatcctttaggtccctctgccctcctcagaagaagctttaggccatcctgggcttcctgtcaccagaaaagtgaatacctgagaacagggagcccagtctcccttcctaygtctgagcccactgttcctacctgacctgtggttttagatctcactctccacccggggcaaggcaagcaacctcatccccaaggcccctgtgagtggggcagggcaggctgctatgacagatactcactgacaaggaggtagacgatgtcacactactaactgcagagggctttagggacggcgaggtcagcaactttgccactccctgggtcccaccactggaatctccgtttggaccgcctggaggggctaccagagtcaacttctgggamacaggcatttttttccctgctgaacttgggacgggtcggctggtggcctgtcccacggagggaggctgtatgccagggaccaggctcccagaaacagaactctggactggtgttcctcccgaggaagagctgccagaagaaaccccatgtttggagattgagctggcaaagggattattcttgtaagatgagcctgcagagctgactgaatgtggctttgctggatggctcagggcagaagaggacgaggctggggtcttgtgagagctgctgctggaggctgacaggcctcctgaggtggctggtgcagagggatggaagccctggcctttggccgctgtcttcactaactgcaggarggaacgatgacactgtgtgggagaagcctttgggccytggagcttattggcaaatggagatgggggcgtgaagtttttctgctgctgagtgccggcatgaaagactttgacctgggggccaggcacaggaactgccacttggggcccgtgagacgtccgtggcaagctgtggtgcttagctttggactgatgtacttctggcaggcccttattgaggggagcctggcaggacagctctttgtagccagaactctctggttttttctcctgagaggactgccccagtgccagagcctgttctgccagaaaattgaggggtgactgcagagagctagctggtggtggagcagaaggactaggcttcgcaaagttccttttttcttctgtacataaaacgcctccaactttttctgcaggtgcttttgagggtgcaggcagtgtgaattcagagttcccagctgctctgctattcaatgcagccaattccttggacacggcttccaccgaggaggctggattgcggatcaagtcttcatccaatgagtcctccaggttgacaggaggagggttagcaaggccgcccgatgcctgggatgggagctccctgctcgaggccccaatactcaggcctcctgtttggtgatctgagggcaaagcaatggggccaccaatctgtcctgatgggacagaaacctttttatcaggcttcgtagacgattcctaaaggaaaacagaaatgttgatgtttagaaaggtccaaagatgccaacaytggcctgttgtgaggatacaaacatgtgaactcgagtcaaaaaaactgggccttcctgtataattacaagacaagtggtgggacagagcaggagctgtgcccgccttgactttagatgccatgacttcatcacccctggtgagtatctggttggccagggctgggtttaccccggcatgcttcgttgctaagtacaaacaagccgccaggagaaactttcttctgttttgaaaagcgttaagactctcgtgaagagatactctgcctactggcattcccactgtctcagcgcactcctagctgcaatcagaccaaggcatggcatgagaattgccttaaagcagctatttttcccttcttgatttttcccagcacccatctcctcagactgggttcaaagaagagtgagcttttcatgggaacaggaatggggtctaatccttcactcctgcatccctggtgcttaatacagtgtgtctgggacattgtgggagctcaacagatacttaggagtaaatgatttgcacatctcattctcacggtctgcttarggatggctaagggcaccacactaagaactgggaaaaatgttgataaacagcaatttttactacattgagaggtttctgcaacatctaaggtaattttcacagtgtctattctccagccactatattgccctccatttctgcctggtagctcagtaaagtcgccttttctttctgctgtggctccaagctaaactgcacttggctagagtgtatttcttccatacaaagatcacagtgtaacacgttcacaccttcagggactactgactcctcagagggctgccaagaagatcccacttaatcccacatgaaccccaggaactgggccagctgggtactgtttgtagaaccaaggctagaggggggttaagtggcttgggtctctgtcctgttatgacttcaagaatgtcatcctgagcagctgtccccagacgagcaaagatcartgagcttccacagtcacttgactgtttccagagcayagttgtagggagatgggcatagctgacatgtgaccygagcaaactgactcaccttcaccttgattttagaaggggccataactttcttcttggccctgttcaaaggaatgagcacagaaaagtttagagaatatccagaggagaccaaaaacaacacttgtcccgagatgtgaaaataccaagacactcacaggattgaagtcaggtgcccatggcctcgtctgctctccttaaacagagttctgaaagacacagaacaccaggcatctgtacatgccccagaaagctgggactctgcttccagaactttgctagtgtccctggtcctcagtagctatccctcattaaatgtcaactggccaggcgcagtggctcacgcctgtaatcccagcacttttggaggccaaggcaggtggatcacctgaggtcaggagttcgagaccagcctggccaacatggtgaaaccccktctctactaaaaatactaaaattagccaggcgtggtggcgcacgcctgtaatcccagctactcgggaggctgaggcaggagattcgctcaaaccggggaggcggaggttgcagtgagccgagatcrtgccattgcactccagtctgggcaacagagtgagactttgtccccgcccccccaccatgcccacccaccccccacacacacaaaaaaaaaggtcaatggattggggagccaaattcctggtgagaggatctcaatgggacacactggctgcccaaaggctgagtctggcctttaccaagaaaatgtatggctctgcctcaaacctctcatggtgatgcttccctaaagggcacagcactttccttattgcctagtccctccattccaggaataaaatgtggagtgacccagcatgtctttgtccagagaaactcaacaaaaacgttcttcrtatgagtccagcctacgtagagaggacagcaatttcaaaggttccaagatctatccgcacaacagatgattcgagtccaatcaagaaaatcactccagctaactttctctgtcccatgtatgacacaaatacttcattcgcaggaagtgacttcgtacaaggtagcctctgagatggaagcctggcacttagttccaataaggagtcagccctgctacctgcaaatgacacttcttcaggaacatcaggaaagacccaagatgaacccatctctcaaatgctcatagcagcctgtatgttaaaacaggaagtgtggccgggtgtggtggctcacgcctgtaatcccagcacttagggaggccaaggtgggcagatcacaaggtcaggagattgagaccatcctggctaacacggtgaaaccccatttctactaaaaatacaaaaaattagccgggcatggtggcaggcacctgtagtcccagctactcgggaggttgaggcaggagaacggcgtgaacctgggaggtggagcttgcagtgagctgagatcataccactgcactccagcccaggcaacagagcgagactccatctcaaaaaaaaaaaaaaaaaaaaaaaaaaaaggaaagtgcatattgagatgggaggccaaacatcaactgaagtgggacaaaaaatgacaaaaacaaaaccctggaggcaacttcccttcctccagggaagatccagaagaccctttcccagctacctgcatgtcccccagttactcaggtgagatcagagttgaggcagctagacagtgactccctgtgagcaaggatcctgttggcctggcacaaaagcagcgttcaaacgtgtcttgactgcacagatgcccatctcagcacacggccctcacctggcctgcatccagcctttgggccagaggggcttgacttccgcatccagaaagcccttcacacagtcctcccaagcctgggctttgttgttcctctccaggtcctggctctccagtttgatcttcaccacctggcacagtagctccctgagaaggaggcagaaatcagaaactccaaactacttcagatgctgctccaaggttccaatcatgtgctttcagcagccctgatgaaagtaaatgagcctaacctttgtcagcaataggggacgtgctcagacactgccccaccaaccctccaaagaggccaagtcccagtgtgggcacacctgatctcatcattccattggaacttcttccgaggtcccattatcctcctgccccctttttcttcatcttcttcctcatccgaacaaatccggtccctctgctccttgtctttctcctcttccagcatcctacggggtgaatagaattacatggggccccaaggtgctcctgcccaccgcctctcccctcactctgcactactgggacttcacagagaaggagaaaaggccaaagaagagccaagaggctccttgggaaacggcagtacacaccgagaaacgggaggggaagaggcaagacgggagggttgcrcctgcaagcgccaggacaaacttacttggcaacctttgcctgcgtgtgtgcctggcattcgtcctggtacttggccatctgctctggcatcgccctgccaatggcttccttgagcttctggagaggctccttcagacggcccccctgcgaagagcgggacacaattcaaggcaggtttacacatcgctcttacgctcaggacgcatgatggggtgatcacaaggaggcagtggggcagcagacgcatcrttgcttaagactcagtcacccctcmgccaggaccccaaagccaaagggcttcactctagagtcacccacctgttcayagaggtgaagtttccgagcacgcttgagcagggcatccttgctgcagggcaggaatgacgcaagataggcatacaccccagagcggacctgactgctcagctcccgagtctgcgcctctatgctgaagaacaaaacacagtcaccaccggctgcagctcactgcaactcctgtcttcatcagctcaccgtacgtggagaggaaagctaggagccaacggcagtcaaaccctgtcttgttggtcacacaatgtaactgaatgcccaaggaaacacatcctcagcaatcaacaaacaacaacaactcccaagcctgatgaacatggctaggtaatgtgggccaaggctcttaggtcacaataccaggaaaacagagcccaggagaacaagctctgaagcactaaatttcatagagaaaacatgaaagctttcaaagtggaaagtcatgagttacttggggttcaaaggagacacttcccggcagcatttcttttttttcccccagtccccacgtttatcaaccattatgaggtcagggaaagcctcacccctccagtttctccatctagataagcaaaaaaatatttctcttcaatgccttgagctgtccacatttggcacgctcargcaggttccttgttgacacaatcctatcgtccgcaccaatgctcaggtgctctctgcagctcacacttcctgacccaaggggccaatccaggtcccggccaggcgaggccatgtggtagaacacccacattttgacaactgttcttacacacacaaactcctcagctgttgagcaacaagcttcccctgccacaaactgcaaccaggagaaaagcggcaacactgcaggccaggccacaaggattcacttttcccagtctggatttacaaatgtttgctcatctgttttttaacccgattcacacagcgtggtgtctcagaggctcaggcatgtgggaacagcattagggatgatgcacgtggcactaggaacaggagtgccagcgagcggaacagccagggacgccaagcaacacccaaggcagagcaggcccgaggccaccaggctgtctctcaytcttcaggattctcagagacagtcaggcaacaccttctctctctcctcatctcatacctgccaagaaatcctcttctaacaggccatgattatcacatgttattaatgcctgctgcctaagatcarggaggtctatcgcttctggagacaagtacttggtgtccctgttgtgttttgatttttaaaagaaaaataacaatgaaaccatgttaatccaattcttcttttatctccttggtggtcacctttatgcagttcaattgtactcccactgtcccctagctggcttgccccaagctcagtaatagcagaaacagacagacagacagacagacagacgatactcactctaataggattccattaatatcctgggtgaagaacttctgtctgctctccccctcagcagctctggcagcctggtgcacagcagacagtaacagccgttagtgcactttccccacatgtcccttacgctcacccacaggcacaggagtcatcgctccataaagagcacctgtcaatacagtcacaccgccacctttccaactccaccctagtcccaggttaagttcgcctgcgatcaatattctcttttcaaatgctgctgcagcatctgtgggctgccagttcttcctgggacttaaaacagtcacagaaaagaaaatcagagtcaaagccatcacaatgcacttagccagaggccaataaggccaactaacccctgcacccatacaccatcaactacaccattagttgggatttccatgtatctacagtacaaaaatattcaagaacttcaaccagtctataggatttaaaggcctttttatctacaaaaataataataatgtgtagctctaacacttaaggacattaaaactctttgacaattcctaatctacttatggtataccacgagctctctattagccagaccatgtgaataattaacccaccatattacctattaacaccagattataggagtttcagtacagtcttagtttgctttcgaaaagaacacagttaacacacaccctggatggcaagctcagagacccctgaagcaaccacggcaggcagccacgacacagcgggaacacaaaaaagcagaccctgtggaagtctgcatcagggttctcacacttggttgcatattggaattccctgggcagcttggagcaactcaggccattcaaatcacagtctctggaaaggagattcaggaatgcacactctcaaaagtggcccaagtactctttcaaagcaaccctgggaacactgatgtgcaaaaagggctgggaaccattcctctcaacccaagagctgctggtctgaaggctttgggtgaaataaaatttctgaaatcagacatgatatacagtaacgacagcaaacaagggtgataaggtgactatctagaatgaagggatcaacccctctgaaattgcagacactgctaacccctcaccatcatctcccccactcaccttcctctcactgcatcctctggggccccttccaaccactctaactgctccatctgcctcctccaccagctcctttccataggcggaccccaggattctcactagaacccacttctcccaataacttctttccccctcagggcttcaaaataacacagacaattgtacactcaaatctaaactaagccctaaatcctctcatctaagctctggaccagaatttccagttatctctgagaaatttcccaattacagtcaacgcctggtataggcaggggattggttacaggacccccgtatataccaaaatccaactgcacagtcagccctgaggaacctgcctatacaaaaagttagccctctatacacagatttagcatccctcaaatcaacccacatttggttagaaaacatctgcgtgtaagtggatccacgcagttaaaccctgtgttgttcaagggtcaactgcacttctgtggatggatgaccctctggtttgcaaactcaacttacaccagacccactggcttctgctcttcccctgtgttccccacttctaataattgcactccaaccttaagaccgccactcccttcttcagaacccttcagcagctctttccaagcctggtatcaaacccaaactccttcacatggcatttggggtcctccacgatctggcccagccatccaccaactcgcccatcttcagctctgctccctgccttctcttagggcatcttccccaggaggccggcgaagcctgttgcctccagtctgcttcctatatgccccccaagagcctctctttaaccccttaagtccggctatctggccgtccacacatcacaaagcttacttcattctgctctgtactacagtccattgtctgcgtatctatcgggtccatttatgtaacgagctcatgaaagacaagaatggaaccttggcccggcgcggtggctcacacctgtaatcctaacacattgggaggccaaggtgggcggaacacgcgagctcaggagtttcagaccagcttgggcacatgatgagaccctgtctctactaaaaatacaaaaaaaagctgggcatggtggtgcatgcctgtggtcccaactactctggaggctgaggtggcaggatcacttgagccctgggcgtggaggttgcagtaaggcaagatcgtgccactgcactccagcctgggtgacagagcaagaccctgtcttaaaaaataataataaaataaaatatagaactgagkcttattcatcagtatatttcccatggctgcctgtcacataatatttactaaatgttgactgagtgaatgaatcaacaaatgaagatactactgtaaaacggcacgccacaggaagaaaagcttaacaccaaacaaccaaaactaagtcrgaagaaaatgcgcaaaactcaagcttctacagatcccttggctaggtgaaagcccagaggggtgaaatccacagacgaataatggaaaaaaagggcatgacttttcacccagccatgtgccaatttcttacactcttggaaacattcagaattctaccttagcacttggaaggtactagaattatattagtctgggaaaaaataaaactgaactttttttgcttaagcttacactgctagttttaagatcgagaagcacccttacattaattcaaactaattaacatgtatttcacatgccacactttcagacccatctacagcttaaacttccaatcaaattttatcttattattttttatttttttattttagtttagtttttgagacggagtcttgttctgttgcccaggctggagtgcaatggcgtgatctcagctcactgcaacctccacctcccgggttcaagtgattctcctgcctcagcctcctgagtagctgggattacaggcacccacccccatgttcggctaattttttgtatttttagtagagatggggtttcaccatgttggccagkctggtctcaaacatctgaccccaagtgatccgcccgcctcagccacccaaaatgctgggattacaggctgagccaccatgcccagcatcttattttattgagatggtctcactctgtcacccattctggagtgcagtgacgtgatcgcagctcatacagccttgacctcccaggctcaaataatcctcccgcctcagcttcccaagcagctgggactacagctgcacgcaaccacgcctgactaatttttagatttttttttctcactctgttacccaggctggtctggaactcctgggctcaggtgatcctcccacctcggcctcccaaagtactgcgattacaggcatgagccaccgcgccctgccaaattttctgtttagatagccacttgtacaatatttcagaagctttctatgtaatctttacgcaatctttaaaaatattttaaataatattatgtaattttagaaagtacttttctgtaaaccttttgaattgcatagacaatatctctgagggtctggctttatactgaagagtcgactgcggcattttaaagtaaatctaattaaaagagcaattggatatatatctgatagtcttccaaaaataaatggggtccctcacccctaaaaagagacactcttaccccagaagttgtgtgaattaatcaatcctaagttaactagtaaatgaggttaaacatcccaatcatgctgatttataagagttccaacagccttttaatgagctgttttatttattctaagaaaagtcacctgtagccttttagcacccagctcaaaatcttatatactgtatctgtttttgctgagtaggagaaaatcgggcatgattttttttaaaaagatcaaacaagttgttttcgttttttttccccctacgttattctctttggatccatctctccctgcacttcttgtgatgaggggttctaattctatagagggcagagcagaatgggtgacatggggtctctytgattcctgctcttagtattgtctctatgttatgcttgactaaagagaaccaaaatagatctgggttatttgtccagcccaaggctgagtagctgtcaaactacctcaagacaataacccaaaggagcatcaaacctgagctttgtcagcacctgtacctgccaacaaccaagacaaaagacaccatcaatgcatattaacagagggcagggtaaggccatcaaatcactggattccctggggcctayacaaatgtacaatacaaatcagtaacaaaaaacaggctgatgtgagaatgtagtgaacgtggcagaggcatcaccaaggttccctctcagaggacctctttaacatacacaagttttcaaagacattttttaaagttttaagtaccatatttagttagaagatatatctaattttgcttcccagagttttttcccctaagggatcaatacacatgggataagaatctgctatgtactgtggcagaatacaaaacaggaacacaggccaggcgcagtggctcacgcctgtaatcccagctactcgggaggctgaggcacaagaatcacttgaacccagaaggcggaggtggatgttgcagtgagctgagattgcaccactgcactccagcctgggtgatggagtcagactctgtctcaaaaaaaaaaaaaaaaaaaaaaaggcaacaacaacaacaaaccaggatcacagattcctcccacaaagaaattctcctcccaaagaggtgcaccctagctccctaatccttggatctgggcggctcttgtgatttgctctgaccaaaagtgtgctggaagtcatgtgatacacatagcctctaaggctagctctcaagggccctgcagcttccacctttcccctcttgagatgttgccctgagaccaccaagccctgaagaaggcaggatgaaaggccaggaaagaaaagccctgccagcacctggccaacttgccagctgaatgcagccatgagcgtkggcccagagtcaggagaaacgaactgctatgacaaggcaaattttggggggtgttttgcagacagtgatagaaactgatttgtgtgtcacctagggccaagatgtaaagtctacccaatcttataatagagggaaaagggggggaaaattaggggtataaaaaataaagtgagaaacacgtaacactgctaatgtcccagttacatacatcaggtttactttawattttaaaaatgcgatgtccatttcaagatctaggatggaccccttattaaggatccaaatatcaaatatccacatgtggcttttggaatcataagcaatttgagtataccagtgcattccttccctgggaagactatctttcccagcagattctcagtgggatcaggggtcctgagcatttgcacacacatgcagggactccaagtgccccaagtgcagggccctggtcagaagagcgcacctgaggacccttcggagtagcattaagcatctttttaaaataagccacctttttaatgcaaccataaaaagtcatgagggctttataatattacgtaaaaaggcagaaaacagttattcacaactataattacagctgcayaaaaacatatacacagaggctagaaaagaatatccaactagaaattgtttttatattggccggatggataatttccatacaccttccaccccatttttcaaagtttcttaatgctgttataggagaagggcaatgtgaagactcgaatatcaacttcacacttgaatactgtattttccaaccagaacatcagcctctcctggtcaccagctccccactgggacccaggcccaccttgactatgggatcctgaaccctgtgtttgttatgcccaagagctaactgacacttggcaatcactgaggaggggcagcttgcctaacaaggtgtttactcagctccgctttcttgcaccacagcccaacattgtttccggttatgtcattctgttgccactaaatctgtccccatctttcccaagaaagtgaaacagtaagttttcacactagaacacaacctatggcacgagtggggacacagccaagaatctggttttgacttttctctaacgaccatctatcgtcacatagaccttaaatgatttaacaagactttcagaagctaagaaacaatttgattacgaaccagaggattaaaaagaacaaggagtaatgtttggttaacatgaattctgagagcaaatataggacagcaggctcaaaaacaccaagttcagattcagctacttccacctcaatgtcatactaagagatactccaaaccccaacatggtacaattcacttaaatcattacattcaaatacaatacttgaatttccaatgctggacacaagctgacaaagatgaggtagagctttgaatagatactttatttgctttgtatatggtgttcaaatattttttggaagtgagaaaatcattttagcagtagctgacaatttaccctgccctaaaacacaaaggatattataggtaacaatgcttctgaaatactgtaagaatcactgatttaaaacctacagctgtagattatgactgccactagagctgcatcacaagtcctgatgcttaaggtaaaatgttattttaacttaaaggtaaatgatattacaaccaatgatccatgcctagtttacagttagaaatgtgttacttgaacagacaattctcagtgcttaattcccaatcactggagtaaaacagcaagagctgctagatcctaaaggtggtaatggtggttggtttgttttttaatggaatcttgctctgtggcccaggctagagtgcactggcgcaatctccactcaccacaacctccgcctcctgggttcaagcgattctgctgcctcagcctcccaagtagccgggattacggcgagcgccaccaggcccagctaattttttgtatttttagtagaaacagggtttcaccatgttggccaggctggtctcgaactcctgacctcaggtgatccgcccacctcggcctcccaaagtgctgggattacaggcgtgagccactgcaccctgccgatggtgggttttaatgggacatggacagcatttaaaattaagctgcttttcattcatcacatttgaggcattcctgtaatcactacctaacactggatacacaacgcaagggagcgactgaaacctagtggcaacgaagcatctactctacgtgtaacttgtatgtttacaaacttttgtgaatttgcaaaaccttcgtaagaattctaagattaatctctgcctcagctgcctgctgccaacatcatccgtctatcacatgaaggaaaagatgccgtgtggaaaacaaactgacagaaaacagaaagagaacaatctccccagaagaaagcaaattttccagaaatgaagaaaccaagaaaggcctaaaatgatgcctgacgggcaaggcttacactgttttctccctcaggatgagaakagggtttggaaaaagctgacaccttaactgccaactcactaagrgtttctctgggcaagcttcacgcagtgcagaaccaacagcaatctgcccaaactgcttccaggaaagcccagccgcactgtgccaccatacctgagccagctccttaacgcgcttctccaggggtgctggcaggccttcggggagagaagagggctgcctgaattcctggtccaatcccaccccaagggaatcacttccatcatccatatctcggaagggacttccttctggagactcactgagcagatgctccaagtccaaatccgtcagcgagtccatggcagtggccgcctggagcaagtcgttgtcagaagtagagccaaagagtgagagcaaggggtcagaggcaccctccagttcccgcaggccctgagcttccgctgatgggaccgcaacaggcttatgctcctcctccctttttttctgagcctctttctctttctgaaatttctttagcatctctttaacgcttaaagccccagaatatttcttcttcttcttctccttactggcattgagggctgtgaagctgcaagcaagagggaaactggtcactcagactataggacacctccaaagggaactccagaggccttcacccctgctcccagggtcatggtctccaggagaacctgtcacagtccaccctgtcattcctcctccctcctcttggcatatggagctcgttcttgctgagaccaaagcttgagagttaatacaggttagcaacacagtgtcacatatgctaaatttccgacgggtttttagaaaccactgccaggctgaaataaaaggttgcaaaaaggggcagggagagcaagaaaagtatttagagggagaaagcaggagcagcagagaacagcagcaacttgaagagaagctggggtgagaccaagtgaggagaaggaagcatgaccatagacaacaagggaaaacagcggagacagaaggagaactggggcagagaggagcaccccagaggacgagaaacatcagcagtcacacagtgacaacaatagctgccaacactgacagtggaactatctgacacactgagaggtgagcgtctatgcccagaatggcactgcgggaggcgtgcgggaggacaggaaggccaggccctgctgcctcttccgaagctgtggggaggaggtgagtcagctcccagtcgtcctgccctaacagttcaggctttatcctagcaaagaagctgctgcctctcacccggctttggaaaacttggactttttcgatttcttctccttgtcataagtgtcatcttttttcttcttctttatcttctcaccaccttccttcaacttccgcttctgagaattaaagacaaggcacagttacacggctccctaactcagggagcaagtgcactacacggcactggccttgctccgcccggggcacatcctgagacctgtctcatttccttcatgaacaaaagctctcagatcagtccctggaccacaaacccacagcattcccaccgacggtgtctcctggaaacacccagggctgagacaacagtgaccattctggagcctgaaacctttgtagtttgaaagttacaagtgggccctacctctcatcttaaacacataggcagtggtagacaggtttttaaacacactgatcctaaggctgactggttttcagtgggatggcagccctgaaactgaagtcctctacatgtccacagaagagggtcagcaagagtggtacacattccctcattccacagccttcccaccctgaggccacctccagaaacgacccctgctgagcctgctgggatgtcatgtgacatggacataatgaccaagtgctgaacagagcccccacgggcacgtgtcctcattagggcacacgtgtaagaggcgagccatcaacctggcacggctctgcctttccaccatcctcctgagccggccaagcgccacgtattcyggcaagtcacctactgatctgatagggtcacgtcaaaaagcatttctgaaatccaaaagcaagcacattctaacctttggagattttttcttcttttctttaatgaagtcatcttcagactctgatgcttgtctaaactgcagggttcccgagttaatgtaaaatcctccatacttcgtagtcaaagaagcaggaacaagctcatcatactgaagatgggaaacaaactgtcagctccaagttcygcttctgcagtccgaaggtgcaaagtgggtcycragagagatgtgactgtgctcctctgccacttccaagagcatgctaaaacatcctctggtcaaacatgaatgtctgagctacaaggtgttttggacagatctggtcatcactttctgaagagggaactaagacccggataaagaatgtcatttcgtctctcatcagtgctgctactgcctcatgctgggaagagggcacgactgctctgaccccacccccagcttcctggtcagtatcaggasgagctacaggtacagtgggtctgacacggcattttcagtaactactyaccgcctcagagttatcgatgaaggagtcggattcatcataaccataccccatatcgatcaagtcctgtattcggtcttttctacgtttctttccaccctaaaatgtgaaagcaatagattacatgctttttgaataaacacacagaattaactgtggccttsaacttcatcagctatgactcaaagaggtaatgcactaactaaaacagtcactctctcacatacacacaaaccccaaaacctcctttcctgaaaaccttttaacatagaacatatttgtacctgtataaaatgtcctaggacagaaaaatgaactaaatggcttcttatgctttgtaccaaaatatttcttctaaggcgaccacaggcccttctcggttatttgtccagttagctcttcacactagctctgccatgccccttttctgtaccttaatgcgttaggtttaataactgcttctcttctctccatgcttaaggcttacttccagatcagtgtttattacatgatgatccactaaaggaatacagtgtggaaacgtctcccacccaatgaggttgttttgttattcaagagagaaatcttacgtatttttcttcaaattttcgggcaagggcctctactttatgcctttccttttcttcgtcattgaaaggatctgacagatctttcttctgtaaagagatcgttccacaaaaaataagtcagaaaatattcccatgttcttattcatagaaacttcactgattactcaatacctctataaaaacaatgttttccagaaaagggcaaggtagaaaacatgctaccatctcatcaatgtttatcttaattaagaaagtaaaatttcccttaatgtaggttaataaaacktgattgaatgcctacaatcatccaccacagcatgaggggctgcaggactcaaagacagcaaagggcctttagaaggagatgcccagtcgctacacaaccacgttcaataaagtggacttcctttgtaactcttaaaattttcttcaggcatttaaaaacattctaagaaagagtccattgacttccaaaatagtcaagggctcaaaaacgtgaaaatcccactgaatgtggtgcaagttcttgagagccgttctgccatactgtttagaaaggtctgaatttgcacttctctcggtgctaccaaagttaaactcaggcttccaaggcttatttccattttataagcttattcttttctcatyaagcaaattttccacagataagccttaagctttgtgagcaaggaatccaaaaaaaaaaatttttttttttttttttgagataagagtctcactctgtcactcaggctgcagtgcagtggcacaatcatgactcactgtagcctcaacctccccaggctcgggtgatcctcctgcctcagcctcctgaatagctgggactataggcatacaacactatgcctagctaaattttttttttttaagttttttgtatagatagggtttcatcatgttgcccaggctggtctcaagctcctgggctcaaatgatctgcccatctcagcctcccaaagtgctgggattacaggcgagagccaccacacccagccaggagccaggaatcctaattttaataagactcctgtacgaagtatgtttaagacttcaaggtagacagaaaacactaaagactgtatgcctgtttcaaacaaactttcttatctcaccctcccatctctgcctactgaaataccacctgcaaaggatcagttaaatgatttgtggtgtacacatacaatgggatattatagagcatacatctaacgatcatacctcaaatggggagtctttcaaacatgcttatctggatcttctaatttttctacaatgatcgcatataacttgagtggttatgtaactgtaagaaatcccaccaaccttgagcagcactggattctatgtatactactgaacgccttgccaacagcagtcttccaataactaccatttcctgactgtatgacggaaggtccagctctgtcccaacactaatcaggaaataagctctcttctttctaagacctccagggcctgtgtcgtaccagacttaaacaatgaccatattgtaatttctgttacctgcggtggtaccattctctcaaaacatctataggatgtttgttttgaggctggtacagtgttttctctaactttctatagtcctctgagtctagcacaatgccttcatactattaaggactatacactaaaagaactgctgcacaaatgtgcctgattttattgtatttttaacactgcagagtagacccacgacgatttaggagttctgaacccgaagtccaggactgaatcctctgaattggatcaaaattctctgtgtatcctccatgcatttttctgcaatggtgaagggcatctgtagtccccaaaaaggtgacatcagagcactggagttctaatttcagttgacctgctgatttggtttgaacccatgaataaacacattaaccaactcctgctcctgtctcttcctctaaaggaagaagataccattttcctgaaacaggaattataaagggatttgaaattactttctgtcattctgcccagtggtgctcatgcaacaggctgacccttggtacagactcacaggcctccattctggcaatcaggcaatcagatctcaatcaaggaaacactttttcttttttggtttggtgttttttggtaggggragatggagtcgccatcacccaggctggagtacagtggcatgatctcagctcactgcaatctctgcctcctgggttcaagcaattatcctgcctcagcctaccgagtagctgggattacatgcatgcactaccacacccggctaatttttgtatttttagtagagatgggtttttgccatgttgatcaggctggtatcaaactcctgacatcaagtgatccgcctgcctcggccacccaaagtgtggggattacaggcatgagtcactgcgccaggccttccagccttttttttttttttttttttttgacacagggtcttgctttcacccagtgcggtggtgtgatcacggctcactgcaaccttgacctcccaggctcaagcaatcctcccacctcagctttctgagtagctggaacttcaggcatgcaccatcatgcccagctaatttctgtattattttgcacagatggagtttcactatgttgcccaggctagtcttgaactcctgtggtcaagtgatcctcatgtctcagactcccaaagtgctgggattacaggtgtgagccactatgccaggccaagaaaacacatttttttaatctcaggaaaaaaagattaatccttctaaccaaaaataccctccgaacagcacacctgtgaataagaccgactgatcacttggcactgaggcatactgctagaaaattcacaacatgatttcattctcgttccacactcagacaactgtgaaccaattaccagcctcatccccatttcactaagagacatgctagagaccacaatgctgcgagtgtggggcccacttaccttttcctcagagcctagcacagtgcaaaggcagacacaggtgcttaaaaatgcttttcacgggccaggcacggtggctcacrcctgtaatcccagcactttgggaggcagagacgggcggatcacgaggtcaggagatcgagaccatcctggctaacacggtggaaccctgtctctactaaaaatacaaaaaattaaccagacgtggtggcgggcgcctgtagtcccagctactcgagaggctgagacaggaaaacggcatgaaccgaggaggcggagcttgcagtgagccaagattgcaccactgcatgccagcctgggcgacagagcgagactctgtctcaaaaaaaaaaacagcttttcacctaggcggtactcaaataccatacaattccatctacataaaatacaaaaacacggccaggtgcggtgactcacgcctataatcctaacactttgggaggcggaggtgggtggatcacttgaggtcaggagttggagaccagcatggcctacatggttaaaatggtaaaaccccatctctactaaaaatacaaaaaaaaaaaaaaaaaattagccaggcgtggtggctggcacctgtaatcctagctactcgggaggctgaggcaggagaaacatttgaacctgggaggcggaagttgcagtgagccaagattgcatcaccgcactccagcctgggtgacagagtgagacttggtctcaaaaaacaacaacaacaacaaaaaagagaggccaggtgctgtggctcatgcctgtaatcccagcactttgagaggccaaggtgggtggatcacaaggtcaggagatcgagaccaccctgactaacacattgaaacgctgtctctactaaaaatacaaaaaatttgccgggcgtggtggcggacgcctgcactcccagctactcgggaggctgaggcaggagaatggcgtgaacccgggaggcagaggttgcactgagacaagatggtgccactgcactccagcctgggcgacagagtaagactctgcctcaaaaacaaaaaaaccccacaaatctaagcagatctragctgttagaaatcagggcagtggttgcccataagtattgaggtagtcttctggcagggcagaaggagggtttctggggtcctgataaatatattttgtgacctacgtgcaggttacatgggggtactgagttcatgaaaatccatcaagttgtggctaggtgcagtggctcatgtttgtaatcccagcactttgggaagccaaggcaggcagatcacttgaggccaggagtttgagaccagcctggccaacacagtgaaacgccatctctactaaaaacacagaaattagctgggtgtggtggcgtgcacctgtagtcagtcccaggtactcgggaggttgaggcaggagaatcacttgaactcgggaggcggaggttacagtgagccgagatcgccccattgcattccagcctggacgacagggcgagactcggtctcgaaaaaaaaaaaaagaaagaaaaaaaaaaaggcagtctacgtgtttttttgtctgcccctatactaggtagacagcaagattctgttggaagaggaaaatgtccagcatgaaattctaacactggaactgtcagggactggtttcatttacacataacgtttataaccttggcagagaaaaatgtattgtttttaaaatttatgttaattagtcataattcaaattggcctctccctttgcgcacagaggtaagasaagcaaatcttgtgcttgccttgagtgagtgacaggatcttggggcagccaaaacctcagttaagtcttgcttccccrctacggaagccccacawgcatgsactgacccctgtgcgttaaacctgcagcgcytctgggaacaaaggggtgtaccttatctccaggctgaaggccttttaccttccctcggatattcttcaccagctctgggtagaagaactctgggcagcgtttgtgatctggttcaaagagggtgagtgtaatccgaacagctgctgcagccggctcacagtcctgatgctgttctcctgccccagcctcctccttccgggacttcttcaaaaacgcaggattcagggaacctgggagagaggtgaactggaccctgtggggctccgacatggctaccaacaagtcttagcgggtgtcactgcatggcttctgttaacattgaaaagaagggccaggtcaaacgaagaygataaaatagtttacctgcctaattaaagagatttaagtttaagagaatttcaytgtcaagaaaactccattgttatattttgtcatttattgtttttttctgcttattcatcctaaaattttttcacaatcattcagagatagtcactgcttagcatacttccagtcttttttcctgtgcatgtgtatcctagatccttgaccttaaagaacccatrctgacagagccttagacctccaaattgtaaagactactaaaatattaattattttccatttaatttgtctaacacttattttttctggctgagaataatctttaagacccctttattttcatcaccagcagtttcctatcaytgggagccaatcttcacaatgacaaagcttttatcagctgaacaaaagatattgcctaccccaggatagtaaagaaccagtgactcaggagggtgtggctaggctcacttcctaacaaagttacacactcctgccctgtgcaccactctcacacccaaacactggccttgacaaaataacaaattatgacatgccaaagaccttcaaaatcacttgggaatggtcaaaatagattttgaatacagaattccaaatgttcacagaatatgaatatgctaatacatgccatacatgttttctgcttacttcgtatacaattttgtgtcctgctttttaaaagagttcatattctagtgtgaactttctaccataccaataaataaagatattcattgcagccttgtttatacaagaaaaatgatggaagcaaccaaaatgacaatcaaatgacaatcaatcagggaatggttgaataaattgtgactttcttattgacttgtaagcgctcttgatattatacataaattattatacattatagatatacaaaatctgtcatatctcttataagtacttcttcttgttttgttatttgctgtttagtgttgcttagagtgaggtatgatgaaagaaatgttaacttttttcttttttttttgagctagggtctcgctgttatatccaggctagagagcagtggcccaatcacagccacttcagcctcaacctcccaggctcaagcaaacctctcaccacttcaacctctcgaggagctgagactacaggtatatcccaccatgcctggctaattttttctattttttgtagagatgctgacccactatgttgcccaggctggtcttaagctcacaacctcaagcgaccctccttccaaggaaattataactttgtatgcagttaaaactaggctcttttcctttgagactcctcccatttcttttatgcctagaatgttcgtctccaaccagatcttatagaagaacttgtgtatataggttttttgttttttgagacaaggtctcactctgttgcccaggctggaataaagtgactcaatctcagctcactgaggcctcaacctcccaagctaaagcgatcctcctacctcagcctccctagtagttggaactacaggcgtgctaatttttgtattttttgtagggacgttgttttgccatgttgcccagactggttttgaactcctgctgggattacaggtgtgagccactgagcccagcctatatggtcatttatagatattttttcacatttacttcattaaccccagatgaatttgctatgctataaagtatgaggagaggctgtaacttggtttcttccagcatcaatcactaaacaatccttccttcctctgctgatttggcatatattgcaaagcaacatcacagatatctaaggcctgtttctgaagtccatgtgtcatattaatacggtatttagagattctttaatcagtattgcactgttttgtaaagtttcatactttaatgttgcaaagttaaagctcatgtttattatccttctttataaataatactttgccattccagcctatgtattattttggcaggtttcaaaaaaactcactgtattttggttgtaaatcaatcacaaatgtgagttaattcaggaaaattagcatatatcgtatatatccacatacatgtagacgtatttgtatatatccaatattcatttgtcgaattatgatcacaaaatcaacttataacatcacataagggaacaaaatatctacaaatgaagagttaaaataattctaatcaggcggcaaaacgattagcagtgtaacaggctggcgctgcaaaagaccatctcccaacacgtactaagatgttaaaggagatttccctaaaagaaatctccaaggccctcaggatatttgtgatgcgctgggttgtggaaataaatcccagctgaaggcttacagattcccccactgatagaaccggaacagtctcactataagaagggaatcagcaagttaaccaatgggatgcaggaaggtcatccttgaattggcaaccaggtcctactccccctgtccaggcagtaaacacataaccttatctcagtccaagtctgagagactgcagcttcaatcctagatggcaaaactgctcctttcagttgcttaagtgactctccaggcccaagaaggtaaaaaataggactacaggataaagtgagtcaaatctgtactctattaccacttagatttggggttgttttataatcattataatgttctgctgttactaagccatttgaaacatttaagagaatccaatatatttaacaatggtacgttagacttacaatcataattcaaaatgcttaagaaaatataattaagttcaaacatgtttgaatgcttaaaaaaaacttacatttatctattagacttacgagagttgcctaagtccttggaaagattttagctttttttgtggtttttttttttttttttgtgagacagttgcctcactcctgttgcccaggctggagtgcagtggcaccatgagagctcactgcagcctcaacttcccggacccagcactttgggaggctaaggcaggatgatcgctggagcctaggagtttaagaccagcctggacaacatgatgagacttcatctgcacaaaaaaattttttttaaattagccaggtatggtggcacacccctgtagtcttggctactaaggaggctgaggtgggaggatggctttagactgggaaggtccaggctgcagtgagccgtgatcctgccactgcactccagcctgggcgacaagagtgaaactccgtctcaaacaaaaaaaagaaaaaaacaaagatccccctttaaaaacctcagttggtgttactgagaaaatactagccttccttgtcccttggttatcctcagcaatttttaattttttcttactatatatatatatatctccttctaaacattgtattttcaaactggttattgatgaaacagaaaaactaaattgtgcattccaacttataatgagtacccttcctgaattcttattttaatgggttttttggtttttgtttttgttttcaaaataggcagacctatcatccacggaaatgagaattctgtcttcccttttccaaaaattgcatttcttatttttgtttcctgtcttactgcactggctagaactttcaggttttaggcaatatattcttattatctaatagtggtagaaatgtaccatgtttctgatgttaaggggaatgcctctaggttttggtgcaatgttcatttgagatttttttttcttttttctttttggcggggggacgagtctcgctcgctctgtcgcctagctggagtgcagtgacataatctcggctcacggcaacctccgcttcccgggttaagcgattctcctgcctcagcctcccaagtagctgggactacaggcatgcgccaccacgcccggctaattttgtatttttagtagagtactgggtttgaccgtgttggccaggctggtctcgaactcctgatctcaggtggtccacccgcctcggcatcccaaaatgctgggattacaggcttataccaccctgcccggccaagattcatgtttttatttaagttattaaaatctcattcaattcctcacaaattcagaatttttaaacaggaactnatgttaaatttttatcaaattattccctggaatcttaaatacgctttaaagatcactttgtcttaaaaatacacacgcagtaaatgacagtccgtgcagctaattcttggtacttcagggaaactgatctcccaagaaaaatcaggctgcgggacgacccagtacgctaaacaccgacttgcaaccgaaatctctaaccaccacaatgccttggggaaatgcgtgtsgactcgccacctttgccagctggcagtgactcaacaagagcccgacaccaagtctaagtcaatccttaacactgtggagtctgtgatcgggactgggatcttttgcaaaattgtgattctacctggtctgctgaagtttgggccgacgctgcgctcaactgcagttaacacttcccagttcatggttcagttttaaagtgtccaaactacgcccggcatctgtcttcctgttgtcacaactttttcaaaagtgcaaaactagggcaaggctaacgagagagcccggacccgacaacgacacgcacctttgtccccagcgccgacgcgggccgcagacgtccccccgcggcggtcctcatgccggtccccgggcggcggcgcagctagcggtcggctsctaagccgtggctcccagcgggcgggcggcccgcgcctcggcccatggccgggtccccgagcccaggggagcctggtgtgccgcgccgcgcgccggcccaggaggaagcgaagaaatgccaactcgacgtccgcgcagccactccggggacaccagggggtcgggggagcagcctccggtcgccccaggagaacttgcggcgcgggaccccgcgctcagacggcgcctccgaaagcggccgtcgggaggagcgctccaaagaacacgggcggcgggagcggacgggcgcggacaccggggcctcccggcctgcggccaagcagagttgccgggcgcgggagcccagacccggcggaggctgagttccaggccgcgccgagctccgtcagggtagctcactggcgctgcgacggggccgaccagcgcctcgggctcgggaatggccccggggcccgcgccggaccaacgggcgtaacggaagcgccgagaggggaggggcgcggagtccaagacccgggggcggggcgagccgcgaggccggctccctctcgcgctcagccggtcgcaccgtcgccgccgccgccgcctcagaccgcgggcgcttcgttgtcacgagccgaagggagggggaaggagccgggagtctctgcgctccggcgcgcggagaccgcggcgctcgcgtcacgtgcccctcggtcgaccaatgatccccggcgggcgcggtgacgtcagagtagcggcgtggccagtgacagccggcccccgtcacgtggtcgggcccactccaatgggcggcgccggggcgacttgctgttcccggcggcccgtgcgtcggcggtggttgggtggtaagatggcggctgtgagtctgcggctcggcgacttggtgtggtgagtccgagcggccgggccaaccgagacgcgccggggagctacccgcctgggcgcggggttcgctgccggccctggagctgcctttttatgcgctccaggtcgcggagagaggggaagagaaggtgccggcgcttgcgagcggcgccaggcggaaggggcagtccagtcccgggggaccgaggccgagggtggccacgtcgggcaccggctttgatccccgaggccggccgggtggggtctgcactcggggcccagatactggcggcccccgtgaagggagccgccggtgccgcgaggcttccccggacgaccggtccccggggtcttgttggggcttcccagaaagcagaagcgccggggaccggacctgcgagatctggccggtgccattcggtcaaagcccaggttgcgatgcagccgacctgtgcggccggctcagccggggttgtctaaaccggactgctggcgttgccccgcgaagaaacggcggggggacttctcctttacaaccgatggcttggcagtgaccagtgcacgcttgggtgcctcccgcggtctgcttctgtgtcccagacaaccgcccgaaccaagactttgtcgccgcctccctcgagctgcgtagcttgtttctccacccagaggaaggcttccattagcatttgtcaaagccaggcaggtctcctgttgaattaaaccagacttagggagggaaagtctgtgtttacagaggaagctgtcctcccacccccgtcattaagaagctctagacaagtgacttttgacagttgtgttgttctgtattccttgtcaacagaagaatggatatgcgttgtgcacataagtatacaattttgcattttacttctgagggtgttgggcccagctatgaaagcttttgtttcggcatttgaggatgccagcagagatttaggaaaataaattgcgtattgagtgggttgaaggagatggactggcttttgcagggcaagtgttgactctttgtgttttctctagggggaaactcggccgatatcctccttggccaggaaaggtgagtgtcttgctactaaaggaagagatctgaagttgggtttgaagaggtggagaatgtaagatgcattcctctcagtttctagtattgagttaaattgggctcattcagatggcacttagaattttttttcccctagtatcggttattttttaaaaggcaatgcagtatacaccagatcattaaatcttctctaaacccttatttctggatttagaggaggtttatgaagtttcttttttaaccccggaaataattctagtctgaatttagctttatgcttaaatgtaacaaaaggagaagaaaatataaattatccaggaagaaagtctaaatgtaggttagtgaaaagccaaagtatttttgtcccaactaagtttaaatcttctttccatgttaccatatgtgctactccagtgcctctttgcagaagttggcattccagattttgcatgaggtgatccatcattgctttccaaatgttgtgtttttatattcttgcttggagcccgggaggtgtctttagatggtctctttgcaatatggtgttttctgtgcctcggttgtcctttgttttcactatgtcctgtgtcaacccttcctgcacaggaagtatttcaaagagtgtcgtctgcattttttcagtaataatggggtcacattggagcaggggtggggtggtggggggcaggggatgctgttgatcttagttttaactgcttgtaaaacagggccactgcagtaaaagggatattgtgtctactgagcactgtgctacatgttaaatattgggaacttctagaatatctacacatttccatacacctcaatagaaaaatgggagatttagacaagtactaggccttgggttctgttttgtatataaataaatttatttgtaagtaagtccttttaatttacttttttcttagcaacgtagaactgtagagcaatgtggagccactagaaagtgggctgctgtgttgccagccaacctttttccccccttttatcctccagattgttaatccaccaaaggacttgaagaaacctcgcggaaagaaatgcttctttgtgaaattttttggaacagaagatcagtgagtagtactcaccaggagtctcccttcgcctttctttctgtgttacctggagtctgagctgctttgaaaatattctaaggatccttagttcagtcttcttataatgtgtaatactggcatctcattctgccttcatacctaaataaaggtgcaatttcttgcagaaattgccctagacaactgtcctaggtctataactaagtcaggcaagaactaggttcatttaccttctaactataacaatcacattgaaacagtttctcacatgtttctttacccaactccaaaggcagttcctttttgtttgtttttgagacagagacttagtctgtcacccagcctggagtgcagaggcagtctcagttcaccgcaacctctgcctcactgactcaagcggttctctcacctcagcctcccgagtagctgggaccacaggtgtgcaccaccatgcccagctaattttttgtagagggggttttaccatgttgcccaggatgttcttgaactcctggactcaagcaatccacctgccttggcctcccaaagtgctggattataggcgtgagccactgcgcccagctggcaattatttttataaaagccatgttcagttctcttttaatgccatatatcattatggttcatgcttggggtatacagtggaaacttttatttatgttaataaaagtaattgttcaatcatgttctcatgtgtaaaactaagtgatttgctttgacattgttatagtaagtctttttaccagatctgtcctaagttggggaaaccaggaccattaatctgagactctgaccatataacatgttacagtgacgggaagaacgtgaagaacctgtattaacttgagttgctagtgatttgtttagctttttatcactatgtcaagtggcttacctgggtctagctagatggtttgatttttttttttttttttttttgagatggagtttcactctgtcacccaggctggagtgcagtggcatgatctcagctcactgcaacctccacctctcgggtacaagtgattctggtgcctgagcctcccgagtagctgggactacaggcgcacaccaccacacccggctaattgttttatattttttagtagagacggggtttcaccatgttggccaggctggtctcaaactcctgacctcaagtcatctgcccctcccccccccaaccccctcagcctcccaaagtgctgggattacaggcaagagccaccatgcccagccggtttgatttctttaagtagttgtatttctatttattattcttataggaaaatacagccttagatttgaaaaaaatgtctgtggcttctctggtaaatctaattctgacggttaaagtatttctacttagaaagcgatatattataaacagtattcttcactcatccaggagtttatatgtcagatgctcttcctggtttcatgtttacagatagacccagccccatttctctatcacaagccagcttagcagcctgtggtggcagtatttcaaggagatcgctggcctggagctgtggagccagagcttctggaagagggaatgttcttagaactccatggatttaaaaagaagatttggccgggcatggtgcctcaggcctgcaatcccagtactttgggaggccaaggtgggtggatcactggaggtcatgagttcgagaccatcctggccaacatggcaaaaccccgtctctacaaaaaatacaaaaattagccaggagtgttggcgtctacctgtaatcccagctacttgggaggctgaggctcgagaattgcctgaacccaggaggcagagattgttcgagaccctgcactccagcatgggtgacagactgagactatgtctcagaaaagaaaaagaaaaacaggaaagattgtcctcatgcataacatcagtgttatgtgtccactttctgaattgcttgacactgagggaatttataagaaagcaagtattatagttcccaccttccagatgctcagtcaagtgacaagttgtaaacatttcagataagatgatgtgcacaatgatggtcgggcatggtggctcatgcctgtaaccccagcactttgggaggccggggcaggcagattgcttaacgccaggaatttgagaacagcctggccaacatggtgaaaccctgtctctactaaaaatacaaaaattagtcgggtgtggtggtgcacacctataatcccagctactcaggaagctgaggcagtagaattggttgaacctgggatgcggaggttgcagtgagctgagatcgcgccactgcactccagtctgggtgacagagcgagactctgtctcaaaaaataaataaagattatgtgcagaatgaatgatggcagataattgttaattctaggctgggcacagtggctcatgcctgtaatcccagcactttgggaggccaagacaggaggattgcttgagcccaggagccggagaccagcctggacaacatagcaagaccttgtctctacttaaaaaaataaattttttttttcaatagccaggcatggtggcacacaagtgtagtcccaggtatgcagaaggctaaggcaggaggattgcttgagcccaggaggtcaaaactgcagtgagccatgatcacaatattgcactccagtctgggtgacagagctagaccctgtcttaaaaagaaaaagaattctagaagagggagagctcagtggagagccatgagaaccaagaagactgactgaagagatgggatttgtttttctgtttgtttttttttgttgttgtttttttttttttgaaacggagtctcgctctgtcgcccaggctggagtgcagtggcgcgatcttggctcactacaagctccacctcccgggttcatgccattctcctgcctcagcctcccgagtagctgggactacaggcgcacaccaccatgcccagctaatttttgttgtatttttcagtagaggcagggtttcaccatgttagccaagatggtcttgatctcctgacctcgtgatctgcccgcctcggcctcccaaagtgctgggattacaggcgtgagccatcgcactcagccagagatgggatttgaatccagctctggaagatacatagaatctggatggatggggactataggggcatttcagacagtggggataccatgaacaattggcattaagctgggtgttatggaaaggaagaggctccctgcctgaggtaacttgtgcttaggaataacagaggcaatatggttggcccaaacttcattagctaaatgaataattacacaagtctgaaacaaaaatgggaactcagtctcataaggagcctgaaagccattgtttccttatgttttttgttgttgttgttgttgttgttgttcttgtttggtttcttgatttttttttgagaaagggttggagtgcagtatcacggacatggcttactgcatccttgacttcccaggctcaggtaatcctcccacctcagcagtccgagtagctgggaccacagttgtgtgccaccatgccctgctaaattttttactttttttttttttttttttttttttttttgtagagacaagttc

SEQ ID NO: 96175 - DNA, 66493 bp, Homo sapiens
tcgaaacctttgtatcttcaacaccaaacacagtgacgttatcaaataaaaagaatgttaattgaggcatgaacagaactagactctattataatccagtgcctatcctcttaaacatgtactgcttgcttcctttttcttttcttttcttttttttttttggttgttgtcgttgttgagacagagtttcgctctttcttgttgcccaggctggagtgcaatggtgcaatctcagctcaccacaacttctgcctcccaggttcaagagattctcctgcctcagcctcccgagtagctgggattactggaatgcgccagcacacccggctaattttgtatttttagtagagacggggtttctccatgttggtcagactggtctcaaactcccaatcgcaggtgatccgcctgcctcagcctcccaaagtgttgggattacaggcatggggccactgcacccggactgctagcttcttaaatggggatactgctaacatatatctgtagtcagtaaattctcccagaacctaccaccagtaatcatcctctctgcctcctccacaactgaaacagaacccattccctagatctactaggaagtgttttgtttcccaaaaaaacaaccccccccaaaaaaaccccaaaaccagaatccacttcagtttacaaccaagaaagaaaggattattcttatctgctaaatttgatgaaacaggagacaatttatatataagatttccacctcttaagtgaaatcatgtaagttaaattaattaaaactatagcagatctttaatattactttcaaggaaagtaatttaacattcctaccagcctctttagcctactcttaatgtagttcatatagatcaaatgagaaacgaaaatgcaccgcatcaaaaacatttgagtatatttacaaatgccaagttgctaatgaataaagtagaaacaagctaacattctgaggtgtcaagacagacaattatgctatttcatgtagtgtcccttccactgatgtttctgatggacacaaaccaccctgatgcaaaccactgcactggtagcaacatgattagcagagtatagacacttctgaaattcttaaatcctctagaaaacttacagagataacccataatgttgcctaattcagtgttaaataaggatattacgcacttactatatatacgatctgagagacataaaaatataatacatctttgtcactaccaaactacaaaagcaaatactaactgggaactcacggctaatactcttaatgttgtacttgcaattatctaaggttttttttttttttttttttttttgagagggagtttcgttcttgtgcccaggctgaagtgcaatggtgcgatcttggctcactgcaacctccgcctcctgggttcaagcgattctcctgcctcagcctccgagtagctgggattacaggcatgcgccaccatgcccggctaaatttgtatttttagtagagacagggtttcttcatgttcctcaggctggtctcaagctccgacctcaggtgatccacccacctcggcctcccaaagtgtcgggattacaggcgtgagccactgcactccgcctgatctaagttcttataataataaatttaccaaaaccaaaaacaaaaaagaaaaaagatttacccccagttttcaaagatatatacatatatacacacagttctaaccccattattcaatccagtaattcctacgtaaaaaaataagaacatttggagtttcaaggaactctaagagataacctgatccaatcttctgattttatagatcaagaacaagaggacaaaagagatgaaatgagtggctcaagctcacaaatggaaaaaagcaaaagttctgatttagtactttctacaatttcacggtaaaaactagtttactcacaaatattccacataatggcttaatattacttttcaccatataaccatgattcaatggtttaattataagctaaaatgtatacaataattaacaagagcttagtatatacacacacacacacgaatatgcttcgttcatttttaaaacgagttaaggaatcattcatatttttatttttatttttaattttttgagatggagtttcgctcgtttcccaggctggagtgcaatggcgtgatctcggatcactgcaacctccacctcccgggttcaagcgattctcctgcctcagcctcccgagtagttgggattacaggcatgcaccaccaatgcccagctaatttttgtattctaagtagaaacggagagacggggtttctccatgttggtcaggctggtctggaactcccgacctcaggtgatccacccgcctcggcctcccaaagtgctgggatttcaggtgtgagccaccacccccggccatcattcatgtttttaaaataatcattttaatataaaagattggtgtttataagtgttatataatcaaatttcagtaagcgtgtgatcattttaagccattattctaaaacaaagttcaaaagttttcttgtctgctgctagaagtacaaactcccaataacagcagttttctctgaatactgtctgtagtaaatttcaggatgcaagtttttccctacagaaataaaaataccgagttcttatggtgaccatttatgcattaaaccagggaaaatcaccgacacttaagcaacatgaaaattgaagtttagtcctaacattaaaagcaaaaaggtctgggcacggtggctcacgcctgtaatactagcactttgggaggccaaggtgggcagatcatgaggtcaggagtttgggaccagcctaaccaacatggtgaaaccccatctctataaaaaatacaaaaatcagctgggtgtggtggcacatgcctgtaatcccagctactcaggaagctgaggcagaagaattgcttgaacccgggaggcggaggttgcagtgagccgagatcacgccactgcactccagtatgggcaagacagcgagactctgtctcaaaaaaaaaagcaaaagtcaggctgggcacagtgcacagtggctcacgcctgtaatcccagcactttgggaggcggaggcggatggattacttgaggtcaggaatttgagaccagcgtagccaacatggtgaaaccccttctctactaaaaatataaaaattacccggtgtggtggcaggcacctgtactcccagctactagggaggctgaggcgtgagaatcccttgagctcaggaggtggaggttgcagtgagctgagatcatgccactgcactccagcctgggcgacagagcaagactctgtctgaaaaaaataaataaataaaagcaaaaagcatgcaatgccacaatgcaacagaaagacttgcaacaaactcttcaggtcacttgcattaattatctatgtattccttcatgacatcttagtacactgggattctaaaaatagacaacatgttataattatgtttaaatactctatttataaactaataggaaggaaaaaagcctaactaaaggggcaactactatttaaagaattaaccccagatagtgtcctaacagaagtactttattatgaatggcttccactttccctttgtataaagaagaggatgctgcctcacagaaaatctaatttaaggcaaaatatcaaaaatatgtagaagtcaccaatactgcaagaccacaataataagcaccacagtaaatcgactatatggttaaaaataaatgtaatgaacactcttcacccataaaggaaccactgagttaatgaaagccaacttcacacacaattttaacaaagctgagtatttaattttcaagcccacagttgatggaaggtggagatcaaaatgtcattttgcaggtaggtgaagaaactgaagctcagaaagataattgggccagaaagtccaaatttttctaacctaagaagtttacatacttatacactcctgacagcaggagcactcctgacaactgactgcctagaaaagccttaaaaaggaaaccaacaattcaaatgcgcagaatcctactacaagaccctataggatctcagagcatcaataattctgaatcataaagaaatagtcaaacaatgtacaatgaactcttgtttaagacacagaaccatgtaatttgttacagaaataattctgtcccaactcgttaacataaaaaaaaggggagtgctaaaacgggtaaattttcaggatatattaaaaacaggagagaagcagccattctaaatgtatcttttctggattttatagcacgatttcaaaatttataaaatgttcacccccccacccgtcattgttacaaagtagcaattaccggccatcctgttaccaaatgggaatacacaaagacaaaaacgtgtgtgtgaccgacacacacacacactcactcttttttcctggttttaactactgaaagttaatatcaggcccccctaatttctaaaacatctaattgttctttggacaactatgttagtaccaaactataaaagcaaatacttttgtatttgtgttcactactgcaaaatgttggttacacacagaaagggctatcgtggaaagaaattaaaatcaatgcacaaaatggtgcttttatagcatttccaaaacgattgtgcatactccttgccagcacatctagactttgctccttaagactaaacatgagctggccgtgcgcggtggctctcgcctgtaatcccagcactttgggaggccgaggtgggcggatcacgaggtcaggagatcgaccatcctggctaacacggtgaaaacccgtctctactaaaaacacaaaaaattagccgggcatggtggcacgtgcctgtagtcccagctacttgggaggctgaggcagaagaatcacttgaacccaggaggcggaggttgcagtgagccaagatcgcgccactgcattccagcctaggcgacagagcgagactccgtctcaaaaaaaaaaaaaaaaaaaaagactaaccaagaaccaaattagcatacttccccttcaggcatactgagccccgaaatcatcatcttcctcctaaagagtaattatctcctcctaaaaggcctgcgcagctcacagctcctccgaaacacgggggaacttcgcgagagctcaagaccctggacttgagttttagaaaaatgcttaacaaagtggcctctgccacttaactgcacgacagccactgtgctgtgagaggaaaaggtcgaaagaggaggaaagctagtcttcaattttaatccctgtgattcaggctcttcgcccgtcactctccaaccctagcctgacaggacgtcaggctgtctcccccttccccaccagtcccgccacctaccccgcaacagtgctgagtcttaggattttgaagctttaaaaatcaacccggctccctagagttcaggccgcagtcgctgccgccatgttacagcttgtgcggcaaaatgcgtcagtgagggaggtgtgcgcctgagtggggagggcgggggctggcagaggaaggaccgtccccaggccccggggctcgactgcaagccttctccttctgcaacagcggcaaaggcactgctgcggtcctcagggacttcctctgggcccaagcagccccgatacctcgagggaaagacggtaaacccaacccggtcagccgcgccggctccgcccctcttcccaggcccttcccgctttcgtacgcagggactgctgaaatgacgccgccagaacaacttgagcctcataccacttacctgcaccggtagagttttcctcttctctgggtccggtcctttgaagcgcttcaaatctaccgccgccagaaaaggcgctaaagcccgctaaccgcctccctcccccacaactcagtcctggcatggagagacagcgtcgcaccggaagcgcgtcaggagtgggttgtcagcatcggccagcgttcacctgcttgcgtcaccacgccctcctaggacttctaggattttggtgccttttaaattcctagtttatakgtggcctaatgctttgtggatgcgttgactgggaacgcttgtaaccgttaaaatgccatatcctttgtgaagtaaagtgcctcatttaataaacatttattgatcttacgctaggttatcagaaaggaaggcctaccttcatggagcttccagttaagcttccacttaacgctaggatataagttctaaaaacgcagtaatgagcaaagtgttatttgaggaaagaggaagaaattacaaagagctttgatgttctttgttgttttacagataaagaaattgaggctcagggaagataaacgcctcctcctcaaacacactgttcttgaatgccaaagcaagtcttttgatgccaaatctagtgccttctagagaaaatatggcatatattatttaattattttaaggggcaagggtccccggattatgttagaaataaataaccattgctgtttgggcgggggggtggggggggatgggcagtgattctggtagggatgtggggtgtgttttaaaggaactagctaactagaggacttaaattgttctgtcgtttaaaggcaacgtaaattatgatcatttaaatttttcactcacttgcatcaggtaaattaattatcaacaacagttaggcatgtggtggtgcttctaaggggcgtgaccagttttacacagcagtaaaacagaggacatttctgcctctccacccccaccycttttaagtcattgccctttattgcaggagagcagcagcatattcatctttagatagttcagagattaaacggatttacacttcgctgtgtgtggaggggacaattctgcaataccttaaaacaggggtccccaacccctgggccacagactggcctggctaattttttgtatttttagtagagacagggtttctccatgtaggtcaggctggtctcaaactcccaacctcaggtgatccgtcctccttggcctcccaaagtgccgggattacaggtgtgagccaccacgcccggccaacgcttttcgaaagaagacatacttgcagccaacaatcataatgaaaaagctcaacaccaccaatcatcagaaaaatgcaaatcaaaaccgcagtgagatactatctcataccagtcagaatggctattattaaaaagtcaaaaaataacaggtgctggtgaggttgtggagaaaaaggaacattttacagtgctggtgggagtttaaatgaattcaactattgtggaagacagcgtggcgattcctcaaagacctagaggcagaaataccatttgacccagcaatcacattactgggtatatacccaaaggaatataagttgttctgttataaagacatacacatatgtatgttcattgccacactattcacaatagcgaagacatggagtcaacctaaatgtccatcaatggtagacktgataaagaaaatgtggtacatatactccatggaatactatgcagccatgaaaaagaatgatctcatgcccttcgcaggaacatggatggagctggagaccattatccttagcaaactaatgcagaaacagaaaaccaagtaccacatgttctcacttataagtgggagctaaatgatgagaacacatgaagacatagaggggcacratacacactggggcctatcagagtgtagacagtgggaggagggagaggatcaggaaaaataactaatgggtcctagacttaatacctaggtgatgaaatattctgtacaacaaacccccattacacaagtttacctctgtaacaaacctgcatatgtaccccacaacttaaataaaaataaataaatggaaggatactgtatgtatagtgtatataataaacaacatttgttatcctatagtttccttatatatatttatatatatatttattatcctagtgtgtgtatgtatacatatactatatatgtgtatatatacatatatatacacacacatatatgtacgtgtgtgtgtatatatgtgtatatatatawaaataagtgttgtttaagccactaagttttgggatgattttgtcacacagcaagggataactgacacagagaagaaagaatagactgattatcacggaacttttcacttgtctaattctacatagcttcattttttttctttttttctagagacagggtctcattatgttgctcaggatggacttgaactcctggagtcaagmgattctcccaccttagtctccagagtagctgggactacaggtatgtaccacctcacccagtgatgacctcacatcataaggatctgagtttctgccagcccgaatcatcaaatgccagagaagtattttactaacatagcagtaayagctccaaaatttgtactcccacttacatagtagggggtgtcactggaaagtgtctgttctgctaagaactacattttttagctgtccccttgtatcttagtggcttgaaacaacatttattatcccataggtaaggatttaaaaatgctttttggggccgggcgtggtggctcatgcctgtaatcccagcacttttggaggctgagatgggtggatcacgaggtcaggagtttgagaccagcctggccaagatggtgaaactccagctctactaaaaatacaaaaattagccgggcacagtggtgggcacctgtaatcccagctacttgggaggctgaggcaggagaatcgcttgaacccaggaggtggaggttgcagtgagccaagattgcaccactgcactctagcctgggtgacagagcaagactccatgtcaaaataaataaaataaaataaaataaaataaaatataaaataaataaaatatactttgtgtcagtggaaagtgagcggacatccaggccaaaatgtttgtgaagtgctatgccttctccattccctctcttcctgttttgtcagctgaaccagaatgttttaaggccctggggaagggcctatggaaraggtctacttccctgaatctctgtttggagaaaagtcctcttccactgactagggatatccacattggaatgtggtgtgactgataaatcaaattatgtgggttaaatcactgatgtttggctttatttgttacaccagataccactaccaatctaataggctgtgagcctaaagtattagatttggcctagcctggatcacttcagtcattgtagtatgaggaatgggatttgataccagaagaagggaggtaggttggctgggctactgcaattaacctttactttacctgtgacttttgctttagagtaataaaactttttgtttctacccatagatcaacaacaaactgttgtttgttctattaatagttgtctactgtatcaccaataatatgtttagttttttttaaaagcatgccattctctgattgtgatggatcaaggaaaaaaccagacacttccataatcttgtttcagacaaaaacaagaacattgtacaaactgtaaaaacgaccaaacatcggccgggcatggtggctcacgcctgtaatcccagcactttgggaggccaagtcaggcggatcacaaggtcagaagatcaagaccatcctggctaacacggtgaaaccctgtctctaytaaaaatacaaaaaattagccaggtgtggtggcaggcgcctgtagtcccagctacttgggaggctgaggcaggagaatggtgtgaacctgggaggcggagcttgcattgagctgagatcgtgccattgcactccagcctgggtgacagagtgagactctgtctcaaaaaaaaaaaaaaaaaaaagacgaaatatccatctatccttgctaatatgaatggctgctgtttctttatcaattacagctttaacctcagttcattcttcctgccttctagatcaagattattagaatagaattacccttgcttactcacagcatccaatctagagaaaccactctaaaactctccaaaatcacttaacacaaggctaaaaaaaattttttttttcgagacagagtctcgctctgttgcccaggctggagtgcagtggtgcaatcttggcttattgcaacctctgcctcccggattcaagtgatcctcccacctcagcctcccaagtagctgggattataagcatgtgcctccatgcttggctaattttcgtatttttagtagagatggggtttccccatgttggccaaggtggtctcgaactcctgacctcaagtgatctgcctgtctcagtctcccaaagtgctgggattatgggtgtaagccactgtgcctggccaagactatatgctataatgacaactttctaacaccttcttatggagacacctcttagggtacagcctacttcattgcaaccagtcaataaacccaactttgtttaactatatgtgttcctggtgttttttgactggaaggcaatgacttggatcatgctgtttcatctctatgtttttcttacatttgtttgaaaaccccttctatgctgtgcattcagattaccttcatctcagatctattatcagttgatctagttccaagcaacccaaatcagtgctgtataaaattattgtctgggattagtggttgtctaaagtattggaggacaggagggggtgagggagacatggggagtgactgctaatggttacagggtttctttttggagttatgaaaatgttctaaatgtgagtgatagcttctcaactctgtgaatatactaaaaagccattgaattgtacactttaaatgggtgaattttatgggaygtaaatgaaatctcagtaaagctgtttaaaaaaaaaaaagtgtgggctgccaactgtsaggaagtgagcatccagaagctagacgtgtcccagctgcccaattgcgtttgctgcattggcatcatttgctacaggcatgaggttgggtgcaggcagttgtctgagctctgaggcatggaccactggacagactgactgataatggtggactcccacaggctctgccaatcatgcagtcactgccgtggagcccaactctgttggcattctggccatgactttcaagattttttttcctttttgcggggtttatggttaatatttctgtggggttacatttttcctgtagattacttctccaaagtctgatgttaatgtcccgtgaagacagtgccttttagtggccattattgcagtggtcgggcttcacctggtgttggtaatttatgtcttcatagtgtggaaggagggcttgcctcagtggtgggaaaacraaactgartagagcagcttttcctttggagtggcaaacgtggggggtaggcaggtacctaaagggtttttctttttgtctcttgttcacattaaatgtgatttacctcccaccccctgaaaggtggatggggaggacaattaagtatttaccgcagctaagattttagaaaaaatgaggatggggagggtgacatttttcaaccatctgttaagtgccaagtgctttttgttaatgacatatttttgactaaggatcatgtttgactgatgtaatttttttttttttttgagacagagtctyactctgttgcccaggctgaagtgcagtggtgcaatctcggctcactgcaacctccgcctcccaggttcaagcgattcttctgccttagcctcctgagtagctgggactacaggtgcgtgtcaccactcccggctaatttttttttttttttgtatttttcagtagagacagggttttgccgtgttggccaggctggtctagaactcccaacctcaggtgatctgcctgcttcagcctcccaaactgctgggattacaggtgtgagccacggttcctggcctggctgatgtaaatattaatgcaaaaattggaagctaagatgaaagtaacactaattagtaggagtagaatttatttcatattaaaatgtattgtggtgtaatttttttgttgtcgttsttgagacagagtcttgctctgtcgcccaggctggagtgcaatggtgccatctcggctcactgcaacctccgcctcccgggttcaattgattcttctgcttcagcctcccaagtagctgggacttcaggcatgcactaccatgcccggctaatttttgtattttttttagtagagatggggtttcaccatattgaccaggctggtctcaaactcctggccttgtgatccatccacctcagcctcccaaagtgctgggattacaggcgtgagccaccacacccagcctgtgttgtaatttttatggcttggctaaagcaacagttttcagagtgcaccctccttggtgctactcacagagatgtgatgtgctgttgctgctttctaactctgcctactttgtgacctcttaagaggatgaagttgataaagtaaaccagtgtcagtggctaagtctagaagacctagaaaacataggaataggtcctgaacctattgctcttgcgattgcactgcagacatcaagaagcaggtggctatttccacacattgagatctataattcgcaatcccgaagatgatggaaaaaataccccttggtgcattgcagagatgctacaaatcaccaagcaagccatgggattggctgtacctttaattgagaaaaaaaacttgagaagaagagcaataaaactsacgaggacatcattggtatcagatctcaaaaccacggctctttggttgagggaaacaattttttaatgagtaaatgttcatctccaaaccaaaaagtgaagtagaccgtattccccaatgtaaatattggcaacctaagaaagctaggaaattttacaagacttgaaacgaaagttaacttctttttttcttttttcttttttttttaagacccagctatcagagactttctatgtcttagcagcctcctgataaaggaagtcaaatgaccaatcaagtttttagtgaagaaatccaatcaggccaggtgcagtggctcacgcctgtcatccaagtactttgagaggccaaggctgggggatcacttgaggtcaggagtttgagaccagcttgaccaacatggtgaaacaccttctctactaaaaatacaaaaattagctgggcatggtggtgcatgcctgtagtcccagctacttgggaggttgaggcagaagaattgcttgaacccaggaggtggagattgcagtgtgctgagattgggccactgccctccaggctgggtgacagactgagactccatctcgaaaaaacaaacaaacaactattttagttttgatggcttaaccattcattccctatgtcttcatggttaattgaaggttactgacagtagacaaaaaatgtattctcatttgactctaatttttcccatattctacttgaacaaatttaaaatgttctgctgcctatacaccccgacatctaggagtattaagactagtcagtcataaaataaacctgatacatcagatgaatgccagcacctattcaatttcgttttgctctgttttcagaaatgtcagaataaatatatattggttactggacattctagaaggaagtcttcaagttttaatttttttccagtgtgagcatgcctcaacattttgcatagactgtcagaactattgaaaatttaggctgggcaaggtggttcatgcctctaatcccaagcactttgggaggctgaggtgggtggattgcttgggcccaggagttcgagaccaccctgggcaacgtggggaaaccctgtcgctaccaaaactacaaaaagttagccagctatggtggtgtgcacctgtagtcccagctactcgggaggttgaggcaggagaatcgcttatacccaagaggcggaggttgtagtgagcggagattgcactactgcactccaacctgggagacagagtgagaccctgtctcaaaaaagaaaagaaaagaaaattgtgctaaaactggttttatgacaataaccatgaccacataaaccaagagtctcctctgtaacccacacaataagaaagttgccccctctccctctccctctccctctccccacggtctccctctccctctccctcacggtctccctctccctctctttccacggtctccctctgatgccgagccgaagctggactgtgctgctgccatctcggctcactgcaacctccctgcctgattctcctgcctcagcctgccaagtgcctgcgcgctgccacgcctgactggttttcgtatttttttggtggagatggggttttgctgtgttggcggggctggtctccagctcctaaccgcgagtgatccgccagccttggcctcccgaggtgccgggattgcagacggagtctcgttcactcagtgctcaatggtgcccaggctgaagtgcagtggcgtgatctcggctcgctacaacctccacctcccagccgcctgccttggcctcccaaagtgccgagattgcagcctctgcccggccgccaccccgtttgggaagtgaggagcgtctctgcctggccgccatcccatctaggaagtgaggagcgtctctgcccagccgcccatcgtctgagatgtggggagcgcctctgccccaccgccccgtctgggatgtgaggagcacctctgcccggccgcgaccccgtctgggaagtgaggaccgtctctgcccggccgccccgtctgagaagtgaggagaccctccgcccggcagccgccccgtctgagaagtgaggagcccctccgcccagcagccgccccgtcagggaagtgaggagcgtctccacccggcagccaccctctccgggagggaggtgggggtcagcccccgccaggccagccgccccgcccgggagggaggtgggggggtcagccccccgcccggccagccgccccgtccgggagggaggtgggggcggtcagctccccgcccagccagccgccccgcccgggagggaggtgggggcggtcagccccccgcccggccagccgacctgcccgggagggaggtgggggggtcagccccccgcccggccagccgccccgtccgggagggaggtgggggggtcagccccccgccccgccagccgccctgtccgggaggtgaggggcgcctctgcccggccacccctactgggaagtgaggagcccctctgcccggccaccaccccgtctgggaggtgtacccaacagctcattgagaacgggccatgatgacaatggcggttttatggaatagaaaagggggaaaggtggggaaaagattgagaaatcggaaagttgctgtgtctgtgtagaaagaagtagacatgggagacttttcattttgttctgtactaagaaaaattcttatcctgttgatctatgaccttacccccaaccctgtgctctctgaaacatgtgctgtgtccactcagggttaaatggattaagggcggtgcaagatgtgctttgttaaacagatggttgaaggcagcatgctccttaagagtcatcaccactccctaatctcaagtactcagggacacaaacactgcagaaggccgcagggtcctctgcctaggaaaaccagagacctttgttcacttgtttatctgctgaccttccctccactattgtcctacgaccctgccaaatccccctctgcgagaaacacccaagaatgatcaataaaaaaaataaataaataaaataaaaaaaagaaagttgcacagcatattccaacaaatatcagtttggtacctttagagccttactttgttgtagtgattatcagctgaaaattatgtctgttgtaactttggtaagcattccactttggttatttattagtggtattttttttttaagtgtcaagtgtcaaatcttgggactattaaaataccatggtaagtaaaaaaaaaatatggtctgagaactggtacctatccacgacataagtgcagaaactgagagtatgagtttgcatactttcaaagttactcgacagagttatttcgtatatgctaaaaaataataagaaaaatctgtacgtgtcttttccatgtttacatttttaaatttcattttcctaagtatatttttgtgtatattataaaagtagtagacttccaaggactaggagaacaaccttagatagtagagaatmacctaaacgacctatatcttcttcaacagcttaagctgtgtactgcgctagagcctccctcaatgaggaactacaatgcccagaattcccccaaaatgcgtgagcgacgtccatttcacccacctcgccgcgacccaccctgggatatgtagtgcgtgacttccgcagtgcacgctgcgcctgcsgggcattttttcctggtttgggggcaaggtctcatgggaaaggtcatgtctctcgaagaaaggttataaaccctgagatatgagggttgggygagacatccgagcctgtttcgttccgtgttgggaccaggaataaccctgacttctgagctttcataaccccaggatcctccagaaaatttgcggcgcgctgagggaaaaccttgctggcaagtcgggactgtgtggcagcggctatttttcttttcccacccagcacgttttcgggctggggacatagggttcagttgagatacggaggcttccttcgggatattgggttctctgaagtgcggatggactagggcagggcygagaccccattcattcactcatttgtttagctctcctttatgcccggcgcagaagatacyccttagggtcccaaggcccttcctgtagttaagttccttccttaaggtcattcagctggggcaaagctggggactcgacacctttctatgctaaccattgagctgcctccactttgagcagctcagtggatgaatatagtatcttgaggatacctttgatttgtgcagggttttcttgtgcaggtttgtgacccaggtcagcttaggtcaggatgctgtactgcttgccacaaaatagcctgtactgtcgcgtcgttttttcttgtgaacagactgtttggcatagccgtagagaggggtctgagacatgaatttagtgatacagcgttgatttgtttgtgtaatgaagctgttcaagtggaaagaactgagttgtagtccctgcttcactagtactagaaggattttttaaacctttttgaacctattttgccttatctgtaaaatggaaataatatcaacctggaaggttagctgagagaatttaatgagataatgtgtttcaaacgttctttgtaaatggtaacatgttgcagaaatattagattatatgactttagtccctgcttttctaaccattacttctcaattataaatgtaaacatttatagcatatttttaaaacaaattattcttttttcataattatctttagttcttttattgtttcagcatgacttgaaacattacttaatttcttagtatttcttgattggtgctttaattgtgtcgttcattggttaaaacctatccaaggccrgtaatgattaaattatatgacttcttttatttatttattttctaaagaaaggaattatttgagctctttaagggcacaagaaaaaggggcaagaaattatcctgaaagcaaataaacctgagaccatacttctgaaaaattaaaaaaaaaagtatatatatatgtatgtataaatatatatggctctgaattaatgcctacactttttagaaactttgaaggtgattatttattttaaacaattttcctctttttcgaaaagacagctctgagtttgtgggctttttttttccttttatggyaaatttgaaaactttatgtaaatgtcagatttaaaacacttttaaaatggggtgcagaaagaagcccctttttctggacatttattttttgatcaaattctgctatctggtttagactaagaaaaagtctttagttartgcagaaaaaatgtattactttaatttgaattttggaatcattttgatattaatgatgtaagcataaccatgttaaaccaattcttttatagaagctgtacattggaatgcgtttacagtcattgtaatggaagcaaaatacatgaaggaaaaactgttatttgtatccctgcttattgcacctgaygactagttgcagatggttttgtttacctaagaaaacttgtgatataaatgaaaaaaacacctgttttcctagagtcattggttacaaatatgcttcgkctaagagctatttgtccattctcctggagagtgtttcaatttcgacccatcagttgtgaaccactaattattcagatgaataagtgtacagatgaggagcaaatgtttggttttattgaaagaaacaaagccatactttcagaaaagcaagtgggatgtgcatttgatatgctttggaagcttcaaaagcagaagaccagcctgttaaaaaatgctgagtatgtcagagaccatcctcaatttcttactcttcataatttagctacaaataaattcaaattaatgaatgacgataccctggtgaatgtgttatacgtcacacaacagtaagtaatttacttttatattttatggaatgattatatagtttacattttaattttctaaaaatctctttattttcattttatttatttatttttgaggagtctctgtcgcccaggctggagtgcagtggcatgatctcggctcactgcaagctctgcctcccaggttcacgccattctcctgcctcagccttccgagtcaatgggactacaggcgcctgccaccacgcccggctaatttttttgtatttttagtagagacggggtttcaccatgttagccaggatggtcttgatctcctgaccttgtgatccgcatgcctcggcctcccaaaatgctgggattacaggcgtgagccactgtgccaggtctaaaaatctcttcaaaatgaaaaataatttttttcaccagtagttttcctgataatctaatttttttgttttgttttgttttgttttgaggcggagtcttgctctgtcaccaggctggagtacagtggcacaatcttggctcactgcaacctccgcctcccaggttcaagcaattctcctttaacaactgtaatactattgttaactgtgggcatttgaaattggattattgtggagttttgtgaaaatgtggttggctgcagatgaggatatagtaggtaagcagttagatttaagattaatgccagtcgggtgtggtgactcacacttgtaatcccagcactttgggaggctgaggtgggtggatcacctgaggtcaggagttcaagaccagcctggccaacatggtgaaaccctgcctctactaaaaatacaaaaattagctgggcgtgatggcaggcacctggaatcccagctactctggaggctgaggcaggagaatctcttgaattcacgtggtagaggttgcagtgagcacagatcatgctactctactccattctgggcgacagagtgagacgctgtctccaaaaaaaaaaaaaaaaagtaatgcctaataacaatcagcaattagtaaattttgtctgtgataacttgtttgcaatctcgttattgtaattaaatggacggcacatatgttttctagggggtattggtacaataggttgtttctcaataatagcccttaaaaggaaaaagaaataaaatgattttgtagattcatttatatttgataacaatgttatacaaattatgtggatggttgataggtattacgtaaagaagggcttccttggtgtcagtggaaaaactcagagataaatgttaagaaatattacattccagttttgggatttgtgaagaaaaaatgaagagagcaaagaaaaaaggaaaaaaaataaaaagaaatatgttgtttgcaaggaaatccagccttcaaaagaactgggttccctgaatgaaggcttcagcagttgtacaagggggaaaaaacaaaaaagttacacctaatctgtttattagtctcaytgatgaaaaagagcagttttctcacatgatgacccaaccttcaggggttatttaaatggctgtaaatatcagcattacgtaagttagagacgtgtaagttgtttttgtaagagaattggcatttataggaaaggggcttggggcttatattggggattgatgttaaactgaaaaaggatgattccatgttttttggtggcctttctcaggttacaaagttgttttctctgaggtacttgaaggggatgcttaaagttttgtgaataaggtgattggtgactattagctttttaatttttttacaaacattttcttataaaaatattttatttatttatttatgaggtggagtctcactctgtcaccgaggctggagtgcagtggtgcagtctcggctctctgcaacctctacctccagggttcaagcaattttcctgccgtagcctcctgagtagctgggattaaaggcacatgccaccacgcccagctaatttttgtatttttagtagagacggggtttcaccatgttgcccaggctggtctcgaactcctgaccttaagtgatccgcccgcctcagcctgctaaagtgctgggattacaggtgtgagccaccatgcctgatcaaaagtatttaaatcagaacaaagacatattatatgtacttttaacataaatatattgttgaacattatcattggtcagtagcatgggtattgaaataagcagataaaagggtgagagggcatgggataaagtatagatgtttattaggctgtaccaaaaaawcagaatattgaaataagagtggaccagaaataaggactgcctgtataagaggaaaataacttgagtttcacttttgcattatcattcgtattgcatatgtttttaatgattttaaaatgattatgtatggaggattctttcttttttattaaggtttgctggtgaggcccatgacccgctagttgaagcactagttacagaagcatggagaaggctagaaaggcaagtaccctgggttcatcttgaagatcagggttattcttttcagggttaacagagtgaaatcttgaagggaaagaacagggaactgatgcctgtcaagcttcactgaaaaaaatgtatttaaactcagtttagttttaaagtttttgattgtgtaatgtgttgttgttkttttttttttttttgagatggagtctcactctgtcgcccaggctggagtgcagtggcgtggtctcagctcactgcaacctctgcctcctgggttcaagcaattctctgcctcagcctcctaagtagctgggattataggcacccaccatgactcagggctaattgtttgtatttttagtagagatggggtttcaccatcttggccaggctggtcttgaactcctgacctcgtgatccacctgcctcagcctcccagagtactgggattataggcgtgagccaccgctcccagccatgtcttttcttttttcttttcttttctttctttctttttcttctctctttttctgtctctcttttttttttttttttttttttttttttaatggacagggtcttgacatgttgcccaggctggttttgaactcttgggctcaagcaatacttcctccttggcctcacaaagtgctgggtttatatgcatgagccaccatgcctggctgtgtattctttaagagagaaaagaaagtatttcatatttttcctctttaagagtggggaatagtatacttttccacacatgtaattagttgaaatataaataagatagagtcacagctattcatgaactagcctttttgaatcttcttttctagaagaatacttcagaaaggaaagattcttgattaattggctatcaataaaaacctagaagtgcaggagccaggaaaggagaaaaaaagagaccctagtttaktagagaggaaggccatttaacactgtttaggagcatctgtagctacttgtctgttactccatttttaaggagaggcaatgaccagagcttataggtgacttagaagctttttaaagaaagtgagtttcaggtccactgctgtggacagtattaattcagatatatttcctatattgtacacagctctattttcagcatgttgccttacttgataatcattcagaaaaatgggaaatcttgtgagtacagagaaatttattctctaattatatatcagaagctctttatttataaaagggctgagataatagcagactcattttgggaaatcttcatctatttctgaaaactttgaattttttaatctaggaactctggatgattrtagtctrttgttagtggaataaggcaaatgttagggaggaaagaaaaaaatcagggtgaggaagagataggaggatattaaaaactacagagcaactctccctctaaatcaaatggaaaccagacaggaaagtcttgactaagatgaaggagaaacaacaggctatttatttgtagacagagaggagcgaccattctgatttttaaaatatttttaacatattgcctcttaaagcttaaactataataaatacttatatattggtaaactctgtaggcctttattacatgggctggattaaattaagggacagaacagttctccagatttagaaattctgtattaatctactaagttgtgattttaagttaatcttattagctaaacccatctgtcttcttttatactctctacctataagtatattgagggtaagcagagtaatcttattccttttgctaacagtacaaattatctatttactggatctttggggttagatttgttgataataggtcacaacattttatttctcttcaaagcaaggatacgttatgtgtattatgcagcttgaacaaatcacttgtaaaataggtggtcttttgtgttttayaattactgtattaattaaattacatgtatgattgtattttatagtgaatcaagcatttcttttaaatttttctttatttcaaaataactcagaagtacaatgatcttgctaaaatatctataaacttatgtttttttttttttgagacagagtctcgctctgttgcccaggcgggagcgtagtggtgtgatctcagctcactgcaagctccgcctcctgggttcaagtgattgtcctgcctcaacctcccaagtagctgggactacaggcacctgccaccacacctagctaatttttgtatttttagtagagacagggtttcaccatattggccaggctggtctcaaactcctgacctcgtgatctgcccaccttggcctcccaaagtgctgggattacaggtgtgagccactgtgcccagcctgttttataaatataatttgtaatgatttaaatggggtagattattctggattagtactatatgatgaatcatggcaaggataattaacatgtatttgaaatccatatatatttttttcttttgggatagggtttggctctgttacccagggtggagtacagtggtacaaccagggctcactgcagcctcagacttccaggctcaagccatcgtcctatctcagcctcccaaktttctgggaccacaggtggatgccaccacgcccagctaatttttatatttttagtagagatgggatttcgccatgttgccaggttggtcttgaactcctgggctcaaggaatcctcctaccttggcctcccaagaaatccaaattttttttaaaaaactttctattatagaatatttttaacatttacaaaaggagaaagagtagtacaacgaattcccatgtacccatcctccagcttcaacaattgtcaacacatagccagtcttgttttatctatatcccctcccactctcagtatacttcagtatattttaaataatatcatttcatctttaaatacctcagtatgtttctctaaggactttttaaaaatatagaaccagctgggcrtggtggcacacgcttgtagtttcagctactcagaaggctgaggtggcacagcaaaggatacaatcaacaaagtgaagcgagagtacacagaagggtagaaaatattggcaaactacccatctgacaagggattaataaccagaatatataaggagctcaaacaactctaattaggaaaaagtctaataatccaatcaaaaaatgggcaaaagatttgagtagagatttctcaaaagacccgtgcaaatggcaaacaggcatatgaaaaggtgcaacatcagaaaaatgcaaatcaaaactacaatgagacatcatctcaccacagttaaaatggcttatatccaaaagacatgccataacaaatgctggcaaggatgtggagaaaagggaaccctgcacactgtttttgggaatgtaaattagtataagctctatggagaacagtttggaggttcccccaaaaactaaaaattgagctagcatgtgatccagtaatcccactgcctgggtatatacccaaaagacaggaaatcaatatattgaagagatatctgtactcttacgtttattgcagcactgtatacaatagctaagatttgaaagcaacataagtgtccatcaacagatgaatggataaagaaaatgtggtggctgggcgcggtggctcacgcctgtaatcccagcactttgggaggacaaggcgggcggatcatgaggtcaggagatcgagaccatcctggctaacaaggtgaaactccgtctctactaaaaatacaaaaagttagccgggcgtggtggcgggcgcctatagtcccagctactcctgaggctgaagcaggagaatggcgtgaactcgggaggcggagcttacagtgagccgagatcgcgccactgcactccagcctgggtgacagagcgagactccctctcaaaaaaaaaaaaaaaaaaaaaaaaaaaaaaagcctggtgtggtggctcacgcctgtaatcccagcactttcggaggccgaggcgggctgattacctgaggtcaggagttcgagaccagcctcaacatggagaaaccctgtctctactaaaaatacaaaattagctgggcatggtggtgcatgcctgtaatcccagctactcgggaggctgaggcaggagaattgtttgaacctgggaggcggaggttgcagtgaaccgagatcgcgccattgcactccagcctggggcaacaagagcgaaactgcgtctcaaaaaaaaaaaaaaaaaagaaaaatgtggtatatatacacaatggggtaatattcagccgtaaaaaaaatgatatcctgtcatttgcaacatgggtggaactggagattattatgttaagtgaaataagccaggcacagaaagataaacgtcgcatgctttcactcatttgtgggagctaaaaatcaaaacaattgaactaatggacgtagagagcagaacgatggttaccagaggctgggaagggtaacgggcgattgtgggggaggtggggatggttaatgggtaaaaaaaaataaaatgaataagacctactatttgacagcacaacagggwgactatagtcaataataacttaattatacattttaaagtaacttagaacgtaattggattgtttgtaactcaaaggataaatgcctgagggaatggatactccatttttcatgatgtgtttattttgcgttgcatgcttgtatcaaaatatctcatgtaccccataaatatatgtacctactatgtacccacaaaaaaawttttttttttaattttaataaaaatgctgaggttggaggatcacttgagcctagatgttcaagttcagcctgggcaacacagtgagacactgtgtcttaaaaacataataaaattgataaatttaaattttcgatattacctagtaccttgtctgtgttcaaattttgttgattgtcttataaaggtctttttataggcagtttatttaaatcagtttctgagtaaggttcacaattactgtgtctcttaaatttttttgtttctttttaaataaactttacagaaaaataatgtataaaaattatactagtcataagcatacagcatgatgaattttaatatactgatcattgctatgtaacagcaccaagataaggaaacaacatcattagttcttttcatgttctcttctagtcctctcacccaaaaaggatcttgacctctaacaccataaattgtttctatagaaatggaatcctatagtatgtacccttawagtttagtttgctcagtatgttttaaggatttatccattatgttgtatgattccataattttattctattgtatgagtatgtgcagtttatccattgtactcttgatggacattcgggttttttgcagggttttgctattacatatgtgttgctgtgaattttcttatgcttgttttttagtgaattcaaagtcataaaatctataacagttcctttttcctctcttttgtcttgccattttcttgttgaagaaattggattatttctcctattaaaaaaattcatagcactgttgtagtagcagccattatatttgttaatatgcaaccttgagtcaaaattgttctgtcatctaaaaamattaagtaaatcattcaaataatttttagtgattttccccctttcaaaacctttctacagtatctgactttttaactgttgccatgttacttttataataataacattttagaaaaaaaattttatgtaatttactattttgattgcttttaattttataactatatattatgtgttttaagtgaaagtaaatactaatgttctcctttgtatatttcctttaataggtttgatattaaactgctctcagaattttcctcttgcctagcagatcagcatttgtattttagtccattaatgggaaaaatagctgatattgttcataggaacttggaaaccacacaggacttaaggtaaatttatttagggaatcttgtgttgtggtggaaagatcctgggctttggatgtggatgcagtcagatttgctactcttastttatgtgacttaaggttacttaagctcttggaagttcgttatcctcatctgcaaaagagggatagtaatagctactttgcaatattgctgtggggattagacataaggtacataaagtgtaatacaatattgttgaggtctgtggaggatctgagtttttacctatttgcaagctaagtttgcctgccacattttcctacgtgtgcygtaggaaggcctgagactccgaggtcagagagaggactttgttttttatagcaatagcagtagcagagtaccagaattttcttgtgttgattccctgagctctcgttcccataatgggttgtgatccaggagaggagctctgagcttaggaaacctgaatcttttataataaagcatgcctactctgctccaacaggagacattatctctattctcctaggctgtttgctatgcaaacatccttgaaaagatagttctgaacaaaggcagtcagaaacccactgaaaatggcctctgaataagtatctagaacatagaagtttctcagtaatggatagtaggtattattattatatcatgaagtaaacccaagaagtatttaaattaagtatgaattcaytggccaggcatggtggatcacacctgtaatcccagcactttgggaggccgaagtgggtggatcacttgatgtcaggagttcgagaccagcctggccaacatggcaaaaatcccatctctacaaaaaatacaaaattagctgggcatggtggcgggcgcctgtaatcccagctactcgggaggctgaggcacaggaattacttgaacctgggaggtggaggttgcagtgacctgagattgtgccactgcactccagcctgggcaacagagcaagactctgtctcaaaacaacaataacaaaaaacgaaaaaaaaacagtaacaaaacttgaaacaacaacaacaaaatccaaaaaaaccaaaaaataaattaataaataattaatttacaataaattaataaataattaatttacaataaattaataaataattattttacaataaattaataaataattawtttacaataaattaataaataattaatttacaataaattaatraataattaatttacaataaattaatgaataattaatttacaataaattaatgaataattaatttacaataaattaatwattaatttataawaattaatttataataaattaacaaataattgatttacaataaataaataatttataataaataatttacaataaattaataaataattattttacaataaattaataaataatttacaataaattaataaataatttacaataaattaataaataatttacaataaattaataaataatttacaataaattaataaataatttacaataaattaataaataatttataatgaataattaatttataatagattaataattaatttataatagattaataatttataatggattaatttataattaatttataaacaaattcacaaattttacatacaattatgtcttttttattctttccatctgggaatactttcttttcagtttcataaaggagagttaatagttacatttgctgaatgtcaaggaactattaatttgaaactaacatttaaggagtttctctggttttcataccagtggtttgagggtttgttttgtttttaacataagattacttactgtcaatgctaaccttcataatccagtactatgattgtctttggcgtttcagatacagctttttctctcatatttacaaagtgattagcactttggtaaaattaaattatagtagtttcctgctcttcttgccccactccaccctacttccctgcctttttttttttcttttgagatggagtctccctctgtttccctgactggagtgcaatgatgcaacctctgcctcctgggttcaagcgattttcctgcctcagcctcctgagtagctgggattacaggtgctcgccaccacatccagctaatttttatatttttagtggagatggggtttcaccatgttgccaggctggtctcaaactcctgaccacaagtaatctcccacctcggcctcccaaagttctgggattacaggcatgagccaccatgcccagccccttgccttttttttaaaaaaaatacacttatgtggctgggtgcagtggctcatgcctgtaatcccagcactttgggaggctgaggtgggaggattgcttaagcccaggagtttgagaccagccctggcaacatagcaagactctgtttctacaaaaaaaaaaaaaaaaaaaaaaaagaattgatcattcttaattgatgtaaaaatctttgcatcttttttctttttcagttccttgtctgtcttgatggtcaacatatcttctttaatatcacgacattttcaacaacaactggtgaacaaaacagaacttctttttgacaccatagattcttctgaggtcaacgttgcaaaaagcatagcaaagtttyttcgaaatgttaratatcgttatcaaccactattagaaagatgtaataacgtatttttaagtaatgtggaccaccttgatttggattccatcagtaaaatacttagtgtatacaaatttctacartttaatagttttgaatttattataatggctaaaaagaagctaactgaaatgattcctctgtgtaatcatcctgctagctttgtaaaattgtttgtagcattgggacccattgcaggacctgaagaaaagaaacagtaagttcagtttaaaatgcattactttttttgttgtgaatacgtggagccttcaagcttaggtctccttgcagctytggaaggtacaaatatcaccctattaggttgtggaagggaaaataatctcttatgctctgctccttgattctttttctgattattctaatttacatctcaaactcttagtctgttgctgtgttctgaaaggtaaacctctgatactgggccaacatgaaaaaaaatgaggggaaacgccatgtgtttttattctcccttttgtgctacatgactggatttacacatataagactcccccacccagtgtaagtctgtggaatatttagaattatagtagtcatagcagagggccattttatgctttgctgtcttcatcacaataatcatcaaagcatttattatgcactgggcatatgttcccatgtcaggtttgagcaaattttgtgtggcgcctctcatttaggaatttccagttttgctagataytgatgtaggtagtaatatttgaaatataatgatgagcaaatattaaattaacatacaaatacggttaatagataagagtttctcttcctaggccatgtgactggatttatactagacataaacttcccccacccagcataattgtatgaaatatttagaattacaagctgggcacggcgttgcacgcctttaatcccatcactttgggaggccgaggcaggtggatccctggatcccaggaatttgagaccagcctaggcaagatgatgaaaccttgtctgtacaaaaaaatacaaaattagccagatgtggtggtgcccacctagattcccagctactcatgaggatcacctgagcccaaggaggttgagcctgcagtgaactgacattgcgccattgaattccagcctgggcacagaatgaaaccttgtctcaaaagaaaaaataaaagaaaaaaataagaattttatataatagtcctaacacataagtatgattagtagattcacttaagcaggggttccaagacttgcacaataggggaatctgtatcattactctgttagggaaaactttacggagaaagttttattttttaagagtactttgtggctgggtgcggtggatcatgcctgtaatcccagcactttgggaggccaaggcaggtggatcacctgaggtcgggagttcaagaccacccagaccaacatggaggaaccccgtctctactaaaaatacaagataagtcgggcatgatggcagcgcctgtagtcccagctactcgggaggctgaggcaggagaatcgcttgaacccgggaggtgcaggttgcagtaagccaagatcgcgccattacactccagcctgggcaacaagagcgaaactctgactcaaaaaaaaaaaaaaagtactttgaattatatgaaaaaatttaagagcacatcttaagactatatcaagatggaaacaaggtgattattaaaaaaaactattggggcccagcacggtggttcacacctgtaatctcagcactttgggaggccaatgctggcagatcacttgaagtcgggagtttgagaccagcctggccaacatggtgaaaccccgactctactaaaaatacaaaaaaaaagggccgggtgtggtggctcatgcctgttatcccagcaccttgggaggctgaggcggttggatcacttgaggtcaggagttcgagaccagcctggccaacatggtgaaaccccgtttctagtaaaaatataaaaaattagccgggcgtggtggtgggcacctgtaatctcagctacttgggaggctgaggcaggagaatcgcttgaacctgggagactgaggttgcagtgagccaggattgcgccattgcactccagcctgggcaacaggagcgaaactctgtctcaaaaaacaaacaaaaaaatacaaaaaataattagccgggagtgatggcaggtgcaatggtgggcatctctaatcccagctactctggaggctgaggcaggagaatcgcttgaacctgggaggcggaggttgcagtgagctatcatgctcctgcactccagcctgggcaacagagtgagactccatctcaaaacagacgaagaaacacacacacgaacaaactttattggaaccgttttttgtcaccaagtactgttaaaatctcagtgctaaagcaataaaacagttgggtttaactgagtctgtcttcaaggaatttatattgcaattgagargatagatataattgaaatatgtaaatactgtaacaacatagtttatgaagaaacaataaaattagtgatatggatagtgctgtgagcagacagaagtgagagaaaaatatagactgaagtggttgggaaaagtttgtggagaaactgggtttgaaacctttgaaaaggttggtggaaaggatggcatggagttatccatgtgaatagacaattagtttatcctatcagatgtcacgtttcgagcttgctttctaaatgattctaaaaaatacacgtatcatggtacttaacattactgcactactttggatagttcaaatgacaactaatcatagtcaaaatggaccagctttgttaattttcagtttatactgttatatcaagtgcttagtatatgagatttctgataatatgcaggtttattgactcctagatgttcctattcagttttaaaacatttgggaaattgtcagaatatcaactgttcatttcttagctctctagtattgaataatttcactgaatcatagtattttataaccattataaccttgtattatttgaaaatcttaaaatatcttttacctgtatttttcaaacagtttaagattggattataatgaggcctgaatttcattgaagaagacaatatatttttctttattcagtaatattttatattcgagtaatgtggggagaacactagaattatatattggattcagtttttgtttatattttttttcctatttgttacccaagaactgttatttaaaaaaaattgcaagctaattttcagtctttcaaccaaaaacttttttttttttgcttctagacttaaatcaactatgttattgatgtcagaggacctaactggcgagcaagccctggcagtgttgggagcaatgggagatatggaaagcagaaactcatgtctgattaaaaggtatcttttctgaaatttacgacgttaagtttgttgtcattcacaagcacctatttttttctaaggaaaaatggttttcttctttaatctaccagwtgttttgaagaaataaggaattaatgcttaagccactgtttatgttctactttgtttttcttttctttttttttttgtttttttgagacagagtctcactctgttgcccaggctggagtgcagtggcactatctctgcttactgcaacctctgcttccctggttcaagcaattctcttgcctcagcctcctgagtagctgggactacaggcgcccaccaccatgccccagctaattttgtttgtttgtttgtttgtttgtttttgagacagagtcttgctctgttgcccaggcttgagtgcagtggtgccatctcggctcactgcaacctctgccccagacgggttcaagcgattctcctgtctcagcctcctgagtagcccggattacaggcgtgtgccaccacgcctggctaatttttgtattttttagtagaagcggggtttcactgtgttggccaggctggtctggagctcctgacctcaagtgatccacccacctcaacctcccagagtgctgggattacaggcctgagccaccgcacccagccctccaggctggtcttgaactcctgacctcaagtgatccgttcacttcggcatcccaaagtgttgagccactgtgcctggccgtttttttttttgttttttttttttgagacagggtatggctctgttgctgaggctagagtgcagtggtgccatcacaactcactgcaccctccacctcccaggctcaattgatcctctcatctcagcctcctgagtacctgggactacaggcacgtgtcgccatgcccactaatttttgtattttttgtagacatggtgttttgccatgttacccaggctggtctccaactcctgggctcaaggaatccatccgcctcagcctcccaaagtgctggtttgtttttcaaagtagaaatgacaattgtttatagctttttcattttatttgtgctattacactcaagcagagcatcataaccttgtaaaatagagagcataaagaccctccttttatttttttcttttctttttgttttcttacttttctttcttagttttaaaattttttgtagagatagggtcttactattttgcccagtctgatcttgaactcctgggctcaagcagttctcccaaaattaccaccaaggctgtaattttcaaaaggaaagtttctgcagcacagtcaatgtctatatgaacttgaattgtctcacaccacaatgttaccttgaagtcatactgccatttgttggctttttggtaacttgagatttcagaagaaaaaatatatacttacatttttacatatgcttaattgtacatgcctaatttttcatgacctattatatgttcctttattttaatatttctttgtcccatttttttccaacttactgcctcttagcatttccctttgcttttaagcatcttcatttgagggccagtggatttacggaagaaaattaaattagttttgctaattattggtaactcttggtaaagattttgttatggggaggatgtggaagttgatgctgtgtgagatttgtttaactgaggaagaaaaactatgcttttctcttcttgtactattgataagtgaatgttatttcattcacacttaattgattgcttttacttcattctgttttagttgtttacatttctagagccaccttgagacatttcttcaagaatagagaatctcatctcattcattgccgtttctccagcacagaacggagtgtctggtgtgaaagcaccatartaaatgtgtaataaatgaatgaactggttataatatatgctctrtcctttttagagttacttcagttctgcataaacatttggatggctataaaccattagagttgttgaagataactcaasaattracttttctgcatttccaaaggaaggagttttttgcgaaacttagagaattactgcttaggtaagattaaaatagaaattttgtttagtgtttcattttctagccacaatatttgttttgtttaactatgtacagtggtgctagaagttatggaggcaaaattgtgaagcttattagtaaaaatgttaagacactatctccctccgtgkccattctgccagtgcccatgctgggtatattttgaaacggaaatgaggccagcagggtgatgagttccctaggggaggaatggcaataaactgatgaatagcaaagccattctcctttcctgcaaaatggagtcaccatgaaaagattgggactgctgacgaaagttaaactccatttgggagcattcatatttagggcctttcggtcttgcattcatgcctattttaaggcttattaaatttttgagaataagacataatggtgatgttggggaaaaagtgttttattttcttttcctctttttttttttgagatggagtctcactttgttgcccaggctggagtgcagtgagccaagattgcacttgtgaaatccccagtgagatgggatttcactgtattggtcaggctggtttcgaactcctgacctcaggtgatccacctgcctgagcctcccaaagtgttgggattacagatgtgagccaccatgcccagcgaaaaagtgttttcatgtagaattttccctttataatttaaaatcaccttattttctacagatgtatctttttttttttttttttttttttttttttagagacagggtctcactctgtcccctgggctggagtgcagtggtgcaatcatagctcacggcagccaatcataacttgctgtagcctcgaagtcctgggctgaagtgatcctcccgcctcagcctcccaagtagtagtgctaccaaacttgrctaattttttttttttttgtagagatgggggtctcactttgttgcccaagctggagtgcagtggcatgatcatagcttaccacatcttcaaactcacgggctcaagcaatcctaccacctcagcctcctgagtagctggttttacaggcttgaaccagcatgcccatctagtttgatttcttaccgttatttatttattttttttgagatggagtctcgctstgtcgcccaggctggagtgcagtggcacgatctcagctcactgcaagctctgccacccgggttcacgccattctcctgcctcagcctcctgagcagctgggactacaggtgcccgccgccacacccggctaattttttgtattttttttttagtagagatggggtttcactgtgttagccaggatggtctcgatcttctgaccccgtggtctgcccgcctcagcctcccaaagtgccgggattacaggcrtgagccactgcgcccggcctgattttttactgtgatttctgaaagaccaagcatatagttgaaaatgatttttattataataaagtgatatgccattatggttaaaaaggttttgaactgagtaatatgaaataacatgttatcagatgagaatttagcgtattaggatgttataagaaagtttatctttttcttgaaaaataattttcttcttaagatggtaagatgataagatgcttattgtttcttcaccctttccatatttagtccagaatttcacatagactacctctcaattatgaattttatgttctaaattagaaatgatacactagcccaggcatgatttatgtctgcacagtgggtttttttttttttttttttgcatgcttttaaaaaattttctatatttttatgtttttatttatttttatttttgtatttgttgttttttgagatgcagtctcgccctgtcacccaggctgcagtagagcatgatctcggctcactgcaacctccgcctcccaggttcaagcgattttcctgtcagcctcccaagtagctgagattacaggcatgaggcaccatgcctggctaatttttgtatttttggtagagactaggtttcaccatgttggccaggcttatcttgatctcctgacctcaagtgatccgcctgctttggcctccgaaagtgctgggattacaagcatgagccactgcacctggcctatgttttatgtttttaagaaatatttcagtagcttttggggtacaagtggttttttgttacatggatgaattgtatagtggtgaattctgagattttaagtgcacctrtcacctgagtaatgtacttagtacctaatgtgttgtttttttgtccctagcttgcctaccaacctcycttttctgagtctctaacgtccattatatatcactctgtatgcctttgcgtactyatagcttagctcccacttgtaagtgaaagtatacaattttttattttcccctcctgtgttacttcacttagtataatggccttcagctccacccaagttgctgaaaagacattattgtgttccttttaatggctgattaaaggtgtattaaatatacaccatgatatccatggtgtatatttaccacattttctttatgcacttattagtcaatgggcatttaggttggttaacatctttgcagttgtcaattgtgctgctgtaaacatacattgcagtgttttttaaaaaaattaaattattcagtactgatgaatacttctaggtatgttaacagaaaaataagagcaggagtgggagcatcaaagaagatttcattttcctgtaatgttttgttgcttttatgaaaagacttgaagcacgtatgataatgttaaagcttattaaattctgagtaaggagagcctttatgtatctctgtagtttaaaattatatcaaaagtgtttgagttactaacatttgaaagtttggtgttgttatataaaaatcataggcacttcatgtttcagaattaccttcttccacttcagtgcagataatctgaagtagatattagaaggaatgtagtctatttgaactaataatttacataaattcttatgtaaataggtcctaggtcctgaaacagctcaaagaacccagagttttcatgtactggaataatgtctgttgttgttttttaacttattgaaatataatctacataaaatatacatttgccttcctcattaccctgtcctcacctccaagattaactatctctatttgtaactgcatggattggttttgcctttatactttatataaatggaatcattagtatgatttcctttattttttgagatagggtctcattcgttttcccaggctggagtacagtggcgtgatctcggctcactgcaacctcaagtgacctcaagtgaccctcctgcctcagcctcctgagtagctgggactacaggcacgtgctaccacacccagctactttttgtatttttagtagagatggggttttgccatgttgcccaggctggtcccaaactcctgtgctcaagtaatctgcctgccttggcctccygaagtgctggggttacaggcatgagccactgcgcctggtcagtgtgatttcttttgtgtcaggcttcttttgctcaatactaagtttatgagatttgtttatgcttttgtcttatagtattctcttgtaagaatataacaaaatttatttatttattctattgttgatggatattcgatttatttccagtttttggttattatcagcagtactgtttatgaacaaattcatgtatattttttagtgaacatacatattcatttctgtgtgccagcgagtgtaatcattggttcatagggtatgcatgtcctcatcttcagtagatgctgctgaacattttctaaagtggttttaccaatccctactcccactaacagaatgtacacattcctattgctccatatccgtgccaacactcgatatttttttactttttttcccctataacccaggacagtgctcatgctttttaatttgagctgttctggtgggtatgttgtggtattataaataaatatacgcaaatatctaagctttgacaattgaggaggtatcacaaggaaaaacaccaagtggaggttggagaaattgtatctgttgggggtttatttgtagaaaagtatctcaagattggtagctccacaatgatgcagctttttgaaggctttcatttcttaatataaaatagtgtattaattttttgtggttataagaataaaatatgcagtactaactaagtgcctggttgtgtcaggcactgggccaaatatataaaaatcattttgaaaattttggaaaacagaaaaaagtatatttgagaggctgaggcaggaggatcatttgaggccaggaattcaagaccggtgtgttcaacatagcaagcctctgtctctacaaaaaactaaagaattagcagggtgtagtagttcatgcctgtagtcctagctactcaggaggctgaggcgggaggatcacttgagcccaggacctcaagcttacagtgaactatgatcatgccacagcactccagcctgggctatagagtgagaccctatctctaaaaaagaaaagaaaggaaaaaaatataaagaagaaaataaaaattattcataaactcattcatccactgtcaacaatatagtttatttccttgttgtatactacatatatgtattttttttcctagttgaccatacaattttgtttgtttgtttttggccattttaccttgtacatcattaagaactacatcattaagaactttttgtaaatcttttataatggctggttgatacccatcatatgactgtaccataattcacttattactattccccctcattatttagattgttttcacattttagccatgtaaaaaatatgataaggcatggtggtgtgcacctgtatcccagctacacccagctatgtttgggaagccgaggcaggaggatcacttgagcccaagagttggagatcagcctgggaaacatcgtaagactccctcttaaaagaaaaaaaaagatgaataacaacacacatcttttacctggattttatattagtttattaggttagtttcccagacagggattgaccatgtcaaatgataaaattaaaatacttttaaagttttcaaagccgtactgctaaattactttccaggaagttacaccaactttttaagtttactaatagtgaatgagaatgcctgtatcagtacacccttgctaacactgagtattaatattacgattattttagtatgctaatttaaatattttaaatggccaggcatagtggctcatgcttgtaatcccaggactttgggagactgagctgggaggattgtttgagcccaggagttcaagaccagcctgggcaataaagcaagaccctgtctccacaacaaaaaacaaaaaattagctgggcgtggtggcatgtacctatatccccagtgtgtagagaggctgaggcaggaggagtacttgagcccaggaggtcaaggctgcaatgagctatattacgccactgccctctagcctgggcaacagagtgagaccctgtctccagaaaaaaattaatttaaaaaatattttaaaagtaactcaatgtatttatttatttatttttatttttaatttttttttgagatggagtttcgctcttgttgcccaggctggagtgcagtggcacaatctcggctcaccgcaacctccgcctcccaggttcaaccgattctcctgcctcagccgcccgagtagctgggattacagcgcattacatgcgccaccccacctggctaacttttttgtatttttagtagagacggggtttttccatgttggttaggctggtctcgaactcccgacctcaggtaatccgcccacctcggcctcccaaagggatgggattacaggcgtgagccaccacgcccagctatttatttaattttttgagatggagtctcgctctgtcgcccaggctggagtgcagtggtgccatctcggctcactgcaagctccgcctcccgggttcacgccattctcctgtctcagcctcctgagtagctgggactacaggcacccaccaccatgcccggctaacttttttttgtatttttagtagagacggtgtttcaccatgttagccagaatggtctcgatctcctgacctcgtgatctgcccgccttggcctcccaaagtgctgggattacaggagtgagctaccgcgcccagcctcaattttgttttaatttagattgtattattccttccactacttctatacctaaagtttttttttttttttttttttttttgaggcggagtcttgctctgtcacccaggctggagtgcagtggcgtgatctcggctcactgcaacctccgcctcccgggttcaagcgattctcatgccttagcctccccagtagctaggattacaggcatgtgccaccacgcccggctaattttttgtattttcagtagagatggggtttcattatgttggccaggctagtctcgaacttctgagctcaagctatcccccgccttggcctctcaaaatgctggaattaaaggtgtgagccaccatgcccggccccagtttttcaatttttttttttttttttaacarttattgtcctggtggtgggactcttgccatggggatttcggaatgaagtagagaatgaggtcaactatgtcctgtttcttttgttgttgtttgtttattcatttgttttaaatgttggactgtgtatcggaaacaaaaaaggaaccaattttattacgtgatcactgcatgccagggcctgacaggtgatatcagaaattgaacccaagttctttcttcagcgacagcactggaaacattgttctgacatggaccttttgtttccctgggactgtggttttatttttgaataaaaaattttggcctgtgcttcagaacaggtcttcctgttttattcctttattccttccactatttctatacttaaagatttttttttcttttcttttctttttgtttttgttttgtttttttttttttgagacggagggcatcaggaagtcttaggctttcctgaataatcctttatggacctgtcatctttgaatttatcaaactcytttttttttttttttttttttttttttttttgagatggagtcttcctctgtcgcccaggctggagtgcagtggcacgatctyggctcactgcaacctccacctccctggttcaagagattcccctgcctcaacctcctgagtagctgggattacaggtgcacatcaccatgcctggctaagctaatttttttgtgtttttagtagagacagcgtttcaccatgttggccagactggtctcgaacccctgtccttggcctcccaaagtgctgggattacagacatgagccaccgtgcctggcctatctaactcttcttaaattaacttgtattatgcccacctgtgatgttatatatattggcttttgtcctagttactagttcataacttctatagctcttgctatagccttttgttaacaatgttgggtatgttaggcctctggaaagagaatctctctcctgccccaaagcaggactctaatctccctccacctttctgatcgtgggtcttaagacgctcccctgagagatcccaccctacaccctgtgtgaggaaatgttgatgtcacgaagctcataaaaacccaagaagactgggtttggactgcttccggatagccgaacacgtggaggttcctggagggtggcatggtcagggagggcatggaagctctgcaccccttcccgcatacctcaccctactgtcccttcatctgcattctttataatatcatttataataaacctgtaaacataaacaactgcttccctgagttctgtgaatcactccagcaaattaatcaaacccaaagaggaggtcatgggaaacccaacttgaagccggttgctcagaagttctggaggcctacttttgcaagtggagtctggggtttttgtgggagaggttagtcttagagaccaagttcccaacctgtgggatctgacactgtccccaggtagattgtgtcagaactgaattggacacccagttggtrtccgctgcttggaagaactcccacacatttggtcacagaagtcttctgtggttgatgattgttgtggtttgagattagaggagaaacatagtttgaaagaggtttttttgaatcatcatcttacctattaattgtactcatatgtattcatattttaatacatatatattttgggtttgttgctgatgtattcttttcatttttcattttgcagttatttgaaaaatagtttcataccaactgaggtgtctgttctggtccgtgctatttccctgctcccttctcctcacttggacgaagtggggatatcccgaattgaagcygttttaccacagkgtgacctaaataacctgagtagttttgccacatctgttttaagatggattcagcatgatcacrtgtatttggataatatgactgcgaaacaactgaaactacttcaaaaattagatcactatggtcgtcagagactacaacacagcaacagtttggatctgttacggaaggaacttaaatctctcaaaggaaacacgtttcctgagtcacttcttgaagaaatgattgctactttacagcatttcatggatgatattaattacataaatgttggggagattgcatcttttatttctagtactgattacctcagtrctttgctactagataggatagcctcrgtggctgttcagcagattgaaaaggtgaaatttaaatggtagacrttaattttatagagttgtcaacttctgcaagcataatttttatcataggcactttgagaacttggattggaatttgaggtttaaaaattaaataaattctgggtcagatgtggtagctcaagcctgtaattccagcggttgggaggctgaggtgggaggattggttgagcccaggaattaaggctcagtgagctatgattgcaccactgcactccagcctgkgtgacagagtgagaccctgtctcttaagaaaaacaaagaaaactctggtttctatttcagcgatttgttgttcctctccttaaagtcactttctcattccggcattgtagatttggaaagatcagcaatcattctttggttcattacagtattaagattagtaatcaattctttgaggatactcatgttaggacagtggagtatgaatgatttttggttttactttttcttatttctgtaatcgtgtggtattatttttaccatttaaaarcaattatattcaaaagtgtgagataagcttgaaaactgagaaaattataaggtatccattggcaactatattcttaaactgtcattgcatcttcttgcagatttatttctgggacttgtaaaatgccgctttatggattatgtgagaagcagctcacttacaaaatcactatcataaatatatcagggcaaggcctttatttaaaagacagtgtttctcacaaatgaaaataaaaagtttgtcttaacttgcttagtatagtgcctggaagtcattaagtattggatgaatgagtgaaaaatgaaataaaaaagcaaatgaaagaaaaataaatgctagtgattataatttaagaaacttctttaattatgattattctataaaatgtactgattatcatggaaattgctgatactgtttcctattcaatttagtgactaatgaattctgaaacagaatttatttacttattttaaatttaaataaagacagggtctcactatgttgccctgactaatctcgaactcctggcctcaagcartcctcccacctcagccatccaaagtgttgggatgacaggcatgagccaccactcccagccagaacagaattttacacctaacaaaataaatttgtaaattatctgatttacttcttttttgttacattaacacttttggggttattaataatgttggtggggttaaataaattatagcaggatggaaaaattaataagcagggtgatacatttattatttaactgtagcgatgataggaaaagatttctcctaaaaaataattaggttaaaattttgtcttattttcctaaagtttaaactataaattttttgttctttttatacagatccatccttttacaatccctgctattattcgtccattcagcgtattgaactatgatccacctcaaagggatgaatttttgggaacttgcgtgcaacatcttaattcttacttaggtaggtatattgtttggtaatacattgagtgaataagtcagaggatacttgttgctgctgagctaggagatgtccctcatttaaagggtaaccataatagacatgaattatctacctaaaaaaaggttttttgtttgtttgtttgtttttgagacagagtcttgctctgtcgcccaggctggagtrtagtggtgcgatcttggctcattgcaacctctgtctcctgggttcaagtgattctcctgcctcagtcaccccagtagcttggactataagcatgtgccaccacacccggctaattttttgcatttttagtacagacagggtttcaccatgttggccagggtggtcaggaactcctgacctcaggtgatccacccgccaaggcttcccaaagtgttgggattacaggtgtgagccactgcgcccggccctataaaaactttgtatccattttaattatgaaaaatgtcaaacttgtataaagaattaaacaaagaacacatatatactcaccgtgtagwttcaataatgttaacattttacagtgtttgccttatccgtttgtttctctgactctcttatttttttctgagccatttcaaagttgtagtcattgtgaccctccatccctaattactttagcatacatctcctaagaataatgacattcttctgtaccaccacaatactgttgccacacctaagaaacttaatcatagtcccctaatatctaatacacagttcatgtttcagtctccctaagtgttaccaaaatacattttagagtagttgttttgcacccagtattcactcattgtgtttggttgttatctcttcagtctcttatagtttagaattttgtttcctttttttcttttcttggcattgacttggtttttttttttcttaactttttgttatccaggttttcaaatatacagaaaaattgaacaatacaacaaacatctgtataataataaactgtataataatgaactgtagccccacagtcgtgattgagtattgattaacatttgccacatttgctctgtgtatgtgcacaagcgcgtatgcgtatgatgaaccttccagttgtcagctctgtgtacttcaggttataaggacgttctcctatgtaactacaatactggtatcattaccagtaccaaagaaaatgaacaagtaccatctactacctagtccgtaatcaaattttcccgagtcaccaaattatcttttataacttttttttttgagacagagttttgctcttgttgcccaggctggagtgtaatggcacaatctcggctcactgcaacctccgcctcccaggttcaagcgattctcctgcctcagtctcccgagtagctgggattacaggcatgcgccactacgcccagctaattttgtatttttagtagagacggggtttctccatgttggtcaggctggtctcgaactcccgactttaggtgatccacccacctcagcctcccaaagtgctgggattacagatgtgagccaccgtgcctggctataacttttttttaaacaaccagcattgagtagttatgtcttttcctccatcttttttgcttgatatttatttttataaaatgattggccatttcttataaattgtgccacattctggatttgtctgattgttttcctgtaacttgcttctccatctcctgcatttgtagtaaactagaaattaggtatagatgcttggttaggttcagattaaacatttgcagcaaaaataacttgtatgtagtgctgtataccttatatttagatcacatctggaggcacataatgtctgattgtttctgtctatttagattttggttttctttttgagacggagtcttgccagattgttttttaaaagtaaaaaaatgtttcttaagaaccttaatagatgtttgtaaattgtttgaagggttgctgctcttatgctgattattttgcatctcttaaaaaggtctttaaaaaaattatcttttaaatttagagatggggtcttgctacgttgcccaggctgatatcaaatgcctgggctcaagcggtcctcccaccttagcctcccaagtgctggaattacaggcgtgtgccaccacacctggccagaaaagtcttttggtaatatttcagtactagaaaaaagtagaatagaaatagtccttcctgctgttagccttagcagaagcaatatgtgaggacagcagagacaggaaattactttttctttttccttttccttttcctttttattttgggtcctgagttgtgtttggaacagtttgaccttgaaggattagagctttatgagacttttcttctcagactcacactatgtacttgtcagtatgatatagaagctttagaggagaaatgctcagtaaccgttccttttcagtcaacactttccatgtacttactgtcaggtattcttctaggcgctggagatacaggagagagtaaaaacagataaactaccatgatcgagtttactttctgttagggggagattgacataaacaataaacaaggctctaaggtcagatggtgataagtaccttcaagaacattagagcagggtaagtgtgtaggctggagcatcatggtaagtgtgagatggagtgctattttggataagggattcagggactgcctctctgaggagatgtcatttaaccatggattaaatgaattgagagagtgatgcatgtcaagagttagggaagagagtcccaggatgaaagaaagggaactggaaagggccctcgggtgagagcatgtttggtttttttccaggaacagtggattcagtgtggcaggagtagatgagggagaccgagttggtaggagataaagttggagagacagccagagactggtttcctcagatctttttgctctgcctggagagtaagaattacccagttatctaccaagcaacagatactgagagcttccatatccagcataacatgttaggctctacattagggatttatatagatctttagacctctggtgaagctggtatgaagcaagtataaatatattaattgtgtctgcatcatgctaatggactttgctacatttttgtgggatctatgggccagacagcatctaaccatgtctgatactactgtgtcacagcctacaacgtgaggctgggatatatgtatgtatatatgtatatgaatgtgttgcatgtatggtatacatttatacccctttttagtaacacaactatatgtagaaagatgagactttaaattgagacttagactgtattctcctggttgttcagtcatgtgttgacaaccagaaggaaatgaaagtgcatctcttcccaggttctccaaatagagtcttagaaattagaaaattttgttgctaaagagtataaggaaagaaagattgagaagtacagctttgagtttttaaaacttaatcagagaaagttttaaaaattcctagggaactttataagtaaaattttaaataactaatggagtaataattttcattgttttgagtaaagacgaattttgacagattagttttgctggtagaaatcatcactattaacttcatttatgatctggtctttctttattaaataaacttagaaaaaattgaaaaggaaagatttaatgttgtctcttctgtccttagtaagaatacctatgccagtcaggcattttaggtgaccctttccgccacattagaaatgtctcttggatgaggcaaatcaggtaaatagttgaagccttatactgtggggcatctgccatgctgctgggtgacaagtaaaggagcaggtgctaggcaagacctcagcctcaaacatgtgtacactctgcttggagatctgagattcccagagagcagcatagtataataatccaggctccagagctggacattctgggttaaaccctactctccgctgccaactctgatcttgggcaagtcatttaacctctctgcttcctaatgcttatttataaagtggagataattgtttctactgatataagatataagtgagttaatatatctaaagtgtttagaatggtatgtaacatattctgaacactattgtattattatcatcaacactgggatcacttctttttacatgcaccactgtccttttgttttggattctttttccaaggctatttttaaaacttcttactaaagtgtaataacaaatgttcgtataactttagtataatactgtgaatttattcaaattgaatcacctagggaatcagtactgagatcaagacacagcgtattatcacagtacccttctcctcttgtccccttttcctacttggctcacacccaaaggtaaccacttaaccattatcctgtcttgtaacagtgtagattagttttgtcaaggctgtgtatcttttttttaaaaacctgggtttgcctgaataaattataartgtatatataagtgaggcagctrtayctttaaaaaaatcttaattttcttttaggtatattggatccttttatattagtgtttcttggtttctctttggccacacttgaatattttccagaagatctgctaaaggcaatttttaacatcaaattcttagctagattggattctcaacttgaaagtatgtatctatcttttaatttatttaattatctgttgtactttatatccaagtctcaggtctatctatactgaagaattttaatgttaataacttttttctgtttctaatagtattcatgcttattgtagaaatttggaaaacacaggaataaaatagaaaataaaaawttacccatcttactaacaagtaaaactaccacttttaatgttttggartatttcttttttgtctttctccttctcctatgtgaatgattatatatctgtgtttttttgttttgttttgagacagggtctcactctgttgcccaggctggagtgcagtggtgcagtcatagctcactgaagccttggactccaggatcaagtgatcctcccacctcagccttccaagtagctgggaccacaggcgtgtgtcaccatgcccagctaattttttttttttaagagctgggatctcactgtattgcccaggctggtctcaaactcttgagctcaagtgattctccctccttggcctcccagatgctgcgattataggtgtgagcccccacacccagcctgtatttaattttaatttgttaaattttttatttttatattttgagacagagttttgctatgttgcccaggctggtctctaactcctggcctcaagtgatcctcttgccttggcctcccaaagtgttgggattacaggcatgagccactgtacccagtccctataagacttattttattttacatttctttctttttctttttctttttttttttgagatggagtcttgctctgtttcccaggctggagtgcagtggctcaatcttagctcactgcaacctccaccttcccatttcaagtgattgatcctcctgcttcagcctctcgagtagcggggattataagtatgtgccaccatgcccggctaatttttctgttttcagtagagacgaggtttcaccatgttggccaggttggtgttgaactcctgacctcaagtgatctgcccaccttggcctcacaaagtggtaggattacaggcatgagcccccacacctggcccctatatgaattttaaaacaaaatttggattatttatatattcacttttatatgctgcctttttccatctaactatattttgagcaattttccatattattaaatattttttgatgtctttttttattggctacataatatcctgttacatggatataataaaatttgtcacagattgtttccaattcctcatcattgtaagtaatgatttgttatacatgaatcattgtttmcttaggataaaatcctaagtgtggaatattaggtgaatgaaaaatcttgggagtattttttttttttttttttttttgagacggagttttgctcttgttgcccaggctggagtgcaatggcatgatcttggttacccaaaaccccaccttctggattcaagcgattctcctgccttggcctcctgagtagctgggattacaggcatgcaccaccatgcctggctaattttgtacctttagtatagacggggtttctccatgttggtcaggctggtcttgaactcccgacctcaggtgatccgcccacctcagcctcccaaagtgttgggattacaggcatgagccaccgtgccctgctgggagtattttttaaatgtacttttaacrttcatgattaatgagaacagtgcaggagttggtcctaatcatgtcactgaatgtaataatttaaaaayataaagcatacatttgtaaattagaaatgtaaacagttctaaatactgttagaataaaagcatctactaatagtggggataaatgaatgtgaaaaaaatgggttgtctttcctaggtctcagctatcaaaattcattagtattttattaatttcagttttatctccatctcgaagtgcaagagtccagtttcatcttatggagttaaatagatcagtctgcttggaatgccctgagtttcagattccatggtttcatgaccgcttctgtcaacaatataataaaggtttgagttttcttttagtcagatagcaaagtttgwttytaaagtaaattattmggtagtacattgttaatcttgttatacttaaacatgacacgagccttcccaagagtgccatgacctgtttaatattttatatgagatattgtaggtgaaacattataagaatttcttcatatttgggacataaccctcctagttgagagcaaagaacttgtattgaatttagtgtcattatataagacactacattgaagctcttattgaaattattaatctttatttttcagtttgtagaactgggatgattttcattaaaaaactgattaagtccgggcgcggtggctcacacctgtaatcccagcactttgggaggctgaaaggcgggcagatcacctgaggtcaggagttcgagaccagcctgaccaacatggagaaaccccatctctaacaaaaatacaaaattagctgggcgtggtggcacatgcctgtaatcccagctacttgggaggctgaggcaggagaattgcttgaactggggaggcagaggttgcagtgagctgagatcgcgccgttgcattccagcctgggcaacaagagcgaaaactccgtctcaaaggaaaaaaaaaaagaaaaaaaagattaagtagactaattatttatttttttataaaggtattggtggcatggatggaacacaacagcagatttttaaaatgttagcagaggtactaggaggaatcaattgtgtaaaagcctcggttcttacgccttattaccacaaagtaggtaagttattgggtaggttattagttactttcagaaaatcaaactaatttgaatagaatcatcttatcagttggaattttttaaagttttttgaatttttttcaagttgttattattattaaaattttcaaacggagatagaaagagcaatagaataaatcctcaagttcccgtggcccagtgttgataaccaagagcgttttctattctttagaaaaaaaaaaaaaaaaattaaggtcagtcctccaccaattctaagtaaaacccagattcagattcactgaacatttctggatcttcaaaagattctgtcctctccattcagtgtgtgaaaataagggaaatgactctttaatttctatttcattgttttaagttcatctgaaaaactaagttggtctatcagcctggataaagatttccaaagatactgtgcttgatgctaacctgattaatcttgtttctcaactggtctarttgtagaatgcattctgattgaattgtggatcacataaagctggtggactagcttacgttgatggcaatataaaattttcaaagatattgccacattcaagtggtgatcttaaatgaaaaagataaaatttcaagataattaacataaactttctaaatttaggtttagaaaacctctgcatatacaggatatttaaaaggattataaacttggtataaactaacagtgtaaatggtagccaaaaatcaaatactatttaaactatattgttaataataacaaaaaagttggtaatcccattgtattctattttttagacaccttaatatatatatatatattttttgcatgttrtcctttttaagagacagtgacaattagggtctagaaacaaaggaggacagatagtgaaggatcttgtctaatcatgtcgtagacagaactagagaggactaggattgcatggatttcaatccttgagcaagttcttctgaaccttgttaacttcttcatcagtgaaatggggataataatgcctacttgataggattaactgagatattgcatgtaaagcatttaacactatccttggaacatagtaagtgctcaatgaatttatttttattttaatttttttatagagacagggtctcactatgttgctggtctcaaactcctgggctcaagcgatcctcctgcctcagcttagcctcccaaagtgttgggattacaggtgtgagccactgtgcccagcccaataaatcttacttgaaaaaaaaaaaaaggatgtttagtctgaaaaatagaagtcttatggggaccataatgttttaaaatgtttgaaggattgttaagtagaagaactagatatctctatctcaaagatgaacaaaatggtaaaaatgaaaggaagcagactttaacttggtataatgagaattattgactgctttctgaagaagtaatgttgaggcagaggctgagtattcagatgatagatgtgtgtgatttttgcactgggcaggaaggtgaactagataatcattaatgctctcatcttgtgctataaaacacaactttcctttgattttatgttaatcaggattgagttgggtatgagtgacaaaaatccataaattggctgggcacagtggctcatgctcatacacatagtctcagcactttgggaggctgaggtggaaggatagcttgagctcaggagtttgagaccagcctgggcaatgtagttagaccctgtctctaaataaataaataaacaaataawwaataaataaataaataaataaatagcaggcatggtggtatgcccctctagtcccattgctcaggagtttgagaccagcctgggcaatatagtaagaccctgtctctaaataaataaataattatcaggcatggtggcatgcccctgtagtcccattaggaggctgaggtgggagaatctcttgaacccaggagttgagtctacagtgagttacagtcacgctactgcactctagcctcagtgacagagcaagactctgtctctaaaacaaaacaaaacaaaacaaaacaaaaaacaaacattgaagctgggcatggtagtgcaagcctgtaatcctagctactttgagagacagaggtaggaggatcacttgagcccagaagtttgataccagcctgggcaatatagtgagaagccatctctttttaatatttttctttttttcttcagaacaatatgaatataaccccatctcttaaaaaaaaattacatgagacatgcttaacatagaaaaactagaaaaggaagataacaaaaaagaaaaattacccatgatatagccgctgtttgcttttggtgtctgttttcctaacttaaaaaaaaaaaagacaaaaaggttttcttctgtagtgtttgtgttttagtccttttctgctgctacaacaaaatacctgagactggttaatttataaacaacagaaatttggccgggcgcagtggcacacgcctgtaatcccagcactttgggagacagaggcgggcggattacctgaggttgggagttcgagatcagcctggctaacatggtgaaaccccatctctactaaatatacaaaattagctgggcgtggtggcgcacgcctgtaatcccagctactcctgaggctgaggcaggagaatcgcttgaacccgggagacggaggttgcagtgagccgggatcgtgccactgcactccaacctgagcgacagtgagactctgtatcaaaaaaaaaaaaaaaagaaaaaaaaaaaacaacagaaatttatttttcacagttctggaggctaggaagtccaagctcgagataccaacaggtttggtatctactaaggacctagcctctgcttccaagatggtactttgaatgctgtgtcctcccatggcagaagggacaggaaggcaacagaggatgctcttttatagggtcactaatcttattaatgagggctctgccctcatgacttaatcgtctcctaaaggttctgcctctttttttttttttttttttttttttttttgagaaagggtcttgttctgtcacccaggttggagtgcagtgcaggagtgcagtggcatgatcacggttcattgcaacctctgcctccagagctcaagtgattctcccacctcagcctcctgagtagctgggtctacaggcacacaccaccacaccaggctaatttttgtgttttttgtagagatggggtttcaccatgttgcacaggctggtcttaaactcctgagctcaagcagtcctcctgcctctgcctcctaaagtgctaggataacaggtgtgagctaccacgcctggcctaaggtcccactattattattaacacattgatgattatgtttcaacagatgaattttgggggacacatttagatcatagcagtttataactttatatgttgtgaatatttttctatgccaacagatatgcttatacaacatcttttttagttactgcatatttcattgagtatgctatgatttaatcaatctgtaagatttttttgctggtatgtccatctgtcaaacaatgctgcaatttcatataacaacaataataggtttatttttatatattgcttattatgtgttagacaccattttaagtacttcgtaagtacttgtgtgtgtgtatgcatatagtaaacttatatccctatgaagtatgtaaattatttgcagatgaggagactaaagtccacaaacattattgattgcccaaggttatatacctggcaaatgacagagccaggatttgagcttggcattctggctctagaattcattctcttaatgaattctatatatttcatctttcataattaatttaaagatggttcagtgcctgagtttttcaccagagttccatctgattcttttcaaatcacagacatcatttcaggaagtatatttaaaagataagaatgacttaaaaaacataacaacaatatcatctttatcatcctataaccattaataataatttcttaatatcttttaagaaatgttcagcaatatgggaaatttaacgtaagtagacagatgggaaattttagataaaatttaacattttattgaaatgttagatttggcatactataatgaactcaatgatcaaggattgaaggtagtagaattatgggaaatgtcacataagtagagagatatgggaaattttagataaaattgaacatttatgggaattatgggaaatgtaacataagtagggagatatgggaaattttagataaaatttaacattttatcgaaatgttagatttggcctactataatgaactcaatggtgaaggattgaaggcagtggaacctattcctcatacgtctcatgcactgcacccctatacctttgcttttcctgttttaagtgtcttttatgtttattttatagtttgtttgtccaaattgggatcttaacattccacttggttggtttgcagtttttggttcaacttttcctttcctacttctttttttaacttaaaatttgagaataagttttttttttccacatttcgaacttttctaattgcagccctgtgataacatttaaaatgtcatctgatagtttttaatgtttttactgtaaacctgggtttgctgtaaaccattagtgatatctagagatttgattagattttaggttttttttttaggtttttctttttggccaaaaacttcataagtggcttgtacttctttctgcatcctctcaggaggcacacaaggctggttgtctttttctttttctttctttccttttttttttttttgtctggctctgctgcctaggctgaggtgcagtggcacaagcatggcttactgcagccttgacctcctaggttcaagggatccgcccacctcagcctcctcagccggagtagctaccactacacctggcttattttttaagttttttgtagagattgggttttgccatgttgcccaggctggtctggaactcctgagctcaagcaatctgcctgcctcggcctcccaaaatgctgggattacaggtgtgagccactgtgcctggcctggttgtcttttatacattaagactcatcagtgggttcgtatgttgtcagctgattcattcaacagaaagttcccctgtcagcttttcacctgctgattttagcagttattaatgatcactcattgcctaaatccatcattcagaggggtggtaaagtagcgatattctacatctatcatgccttctacatttattagctggaatttgtctaaaaaggactttcccatatcaactgtttagttactcttatgtacaattcatgtagaaaagacaggataaatgcttgtatctttttctttattaattttcagatgagttggtttagctttctccaaatgtaatcaagagccttaaagagattgaaactctttaatgtgatttggcctagcccagcgctaaatgtagcctagtacttaatattgttttgtaattcttctggttgatttttttattgattgatttccaaagagaggtgccattggaccagatcttataaaaataacttggataatctgagaggttcgtcattcttttgtgagtgtgtgtgtgtacaaatattatatgcatatatatttcaaatatatcttaaacttttatctgtaagactttacctaattcatactaccagtttctatgcttccttaagattttgagtgtatcttggataaaagaaaaaaacctcttccgtatggaagccataatatagcattgggacaactaccagaaatgccctgggaatcaaatatcgaaatagttggatsaaggctgccaccaggggctgaaaggtaatttatttcttagttttagattgtattaatatctaaatgttaaatttggtgtactatactgaagtcagtgatcaaggattgaaggtagtggaatctgttcctcatatgtcatgcattccacctttgtaactttgcttttcctctcctttctgctttaatgttctcccttcttctgtccaaagcctagcaatctccctaactaaagtgctaaaagaattgtcctccactggaagtaaaatagtatcttcttttgcgctcccatacctctctacttttctcatagcacttagccacttcctacactgcattacagtaacttactatacatcatgtgttctctgttagactataagctgtgttgcttcatatttgtacccctcacagtggtttacatgtagtaggcatgtgtaaatatatattggaccaaaaaaatggatgaaagcagacaaatatttacaataattttgtgtaactaaataggtttgtcatcaattactaatttcttagtagaaacataacttgatatactcatttatattcattggcttttgttagtttataaagatgcaatcttgtttctgaaaagcttgtaattattcagtttcttattctgattttaggagtaaatatttttttattttatgtaggattgctttggaatttttggattcaaaagcactttgtagaaatatccctcacatgaaaggaaaatctgctatgaaaaaacgacatttggaaattctggggtatcgtgtaattcaggtatgaaatactcatgtaattcagcctctaaaaagcccagagacactagctgtacatgtgcttccttttaatgtgaaagttccagaattacctttttaaatatattttttaaaatgtatcactcaaacaggccagatacaatagctcatgcctgtagctacttgggtggctgaggtgggaggattgcttgatcctaggagattgaggctgcagtgagccgtgatcatcccactgcactccagcctgggtgacagagcaagaccctgtctcataaaaataaataaataaaagttgtcatttattttattgtctttagaatatccatatcttatgatttctatatcttacaaaggagagaggcactgtagagatggatagagttatcagaggaaacaactaggtatgaatatagaagactrtgtaggaaaaaatgtccatcattggtattgtaggaaaaggaggatgaaaggagcagaaaaaagtattctaggcaatgtcagaaggacccacttggcttccagtagaggttcacaggctatccttatgtaaactaatttcataggattcctacagctttgatcagtagtgcttatatgtcttcctcaatgttttttgttgttgctttaaaactttcattcaaacaacattacttattttcagatttcccagtttgaatggaactctatggcactgtcaacaaaggatgctcggatggactacctgagagaatgtatatttggagaagtcaagtcatgtttgtagtttttatttaaaatgaatgttatcgtgtgttacatttggayctattttaataaagtggcctgtctcaattaaaaaataggtacaaatgtcctaaggtgggaacatgcctggcatgtttgagaataacaaaggatccagtgtggctggagcagaacaagtggggagtggggtgggagtgtataagagaaaagataagagataacagagtcaaatacaacctcttggctactctgagcgagatgagaagccattgggggcttttcaagtaaggaatgatatgaattcacattttaactgcgttactttggctaccttgttgagataagaaaagactacgatgaggcaaatgtgtaagaaagaaaactctttacgaggtcattgcaataatccagacaacaatggatggtggcttggagagagtggtagcagtggaggtaataagaagtagtcagattttttggatgtatgttgaagataaaggcaacagaatttgctcactgattggatatgaggtatgagacaaataggagtcaaggataattctaagtttttgtcctaagcaactaagaggatgtcattagcattaactaagatggggatagtctataggaagagcaagatggggggcaggtggtgggggttgatcacaagtttgttttagatatgttgagtttgtgatgtcttttaaacatctaagtggatatatcaaatagagaattcagtaaatgagcttggaggtcagggaagaggtccaggccccagatataaatgtataaatgtcagcagtattcaatgccatgagagtagatgaaatcgcttaaaatgagattagagaagagtgtgaatggaggagaggtctgaggactgagttttcaagtgccccaacattaaaagattaagaggaagaggaggaatcaggaaaggagactgagcagggatggccaatgaggtaggaggaaggaaggtaagtaatacttcctagaagccaagtggataaagcatttcaagggggaggtgagtagttgtatcagatgctgctgataggtcaggaaagatgacaaatgggaaatggctattaaatttagcaacatgaaaatcattagtactttgaaaatagtcgttttgaagtggtgcatgtgaaagcctgactggttcaagagaaaatgggaggagatacattttctcctaaatggaagcaaagaaatggggtagtagctgagtggaccatcttgacctggtgtaatcctacacattgagggaataatggcttctccctgtcttacaacacatttattcaataaaatggttactaagggcctactgtgtgatataatccccaacccttcctctaagagtgatggttttgtgctcagcaggccacagcctaactactctcagttacgccacctggtggtggtggaggtaattgaccatctgaaccgtggctatcttctgactccatgaccttctcaattcatactatctcaaaataagttggtagctggagtgccttcaatcataagcatagctttaaaatttgtgtcttgcatgtaaattgcttcactgatgtttggcttaggcttagttgaagtacatgtttaaaatatccaatgactttgcatgatttgaactccaatacttaatgattttgtggaatattaacttcacaaaacgttttgtgaaaaacaaaatcagaatagtaagtgaaagatttctcattgtctcttcctctttctgaatttcctcatagtcatattagtggaaatgctaaattcagtgtttaatttccatgaaatgtgttccatttctcaagcaagtgataacaagaactagaccattgaataggttaaaatattttactatgcaactttagaataaaatgattaggctgatgagggttataaagggtttcctttggatataaatcattaaaaatttagtcattatatacttgtggtacatggaaatcttgattgaataaccctggtatactttcactagttgttacacatgatctaactttttacctgtcacatctcctactctctctaggccagcagtccctaacctttttgcggaagacagttcttccatggacagcagttgggggatggtatgatttcaggatgaaactgttccccctcagatcatcaggcattagttagagtctcataaggagcatgcaacttagttccctcgcatgtacagttcacaatagggtttgtccccctatgagaatctaaggtagctgctgatctgacaggaggtggagctcaagtggtaatgctcacttgcctgcccactgttcacctcttgctatgtggcccaggtggggacccttgctctaggctatctgattcaaatggttttctttatatagatactcttattttttgattgatgatttttctatctaaataacttagattgttataaacaaaagcattttttattgagatataaatcccatactataaaattcaccctttaaaagtgtataattcagtggtttttagtatatttgtgcaaccatcacccatatctgattccagaacatcatcatcctcaaaccctggaagaagcattatttttacaacttaattttacatctatgtagattggcattctctccctaaaattaacctcaatcctgattttatagtaagtacttcttacagttttatcacccagatgtacatttccggacaccattatccctgtggccccctcttcctctacacttttgagtctgtctttataagtgccccttcctcttcctaacagtttatttgttgaagaacctgtaggattttccactttgggaatttcatgattctgtattcatgctataatttaagaaaagtatttttcaatatagaaaagtaatcaggattctactttaaatacccaaaataaaacttgtttctgttaaatatatttctgtatttatggtagagaaaaaaaggtgtatggacacttagatctgttctttatgcaactccttgacaaataatcatgaatgttccaaattagtcccaagtcaggtttttcagaaaataatatgggtaaggatagaagtcaaatatatgtctatgaaagctatgtgagactcataagttggtgtgtggctaaaagtgatgattaattgatgacttgcacagagttgaatgtgatggttatgagcagattgaggagtcaacttactatatgcactaagaaggaacagtgaatggaggatatcacatcccagaaaatgaaataatacagtcaccttccttgctgtcagaaatttagcaaataggtagccctttcatggagtgtagccaaaatttaaaccagtgaatacacttcctcctccacatcacccactgaccccaactgctgtcccagcagtttaaagaatcaatccatttcctaagggtgctccctcaccctcctgccacagatgctgtagttaatggcttgaagactgtgatttactggttttaaattaaaattttaaaaatttgatttggaaaccacaaataatacgccagtgtcgcaaaaagaatggagagaaaaggccatttgaatttgactacttttacttacaagagacttttccccatcaaacgatttccccatccatttattacacttctgaagtaggatttctgaagtcatcttatggcatgtaattcttagtataatgcacaggattcctgtcattttgaagcacgaggagaggtttttgatatcttaaacatttttttagtgtagatgcacatattctccacttccaattgtaatagaaaatcagtttaaggataccctaatgatgcaaatgaaatgattagcaaacaactcaaatttaggagccttctttacaatccattgagtgaaacagattcacaaaataatttgttcaactgaagatttaatttattattagaaaatggttttaaactctgatcattacattgaagagtcaatgactgaggttttcttacctactgctcatctcttagacaataacttcttgaataatttctacatgagtgtctgtacaagcttttaaaaaacagaataaattaaagccccattcaccaaacaaaccacctcccaatctattatgttttgtcaccttgttcacagtttagacagtttgaagagatttaaacgtgttgctaggcaactagctcctgaagcataacgtatttccttcaacatcccagcccattcttttttatcatcttcatacctgatggaggaaaaaaaaagtaatcaataagcagctttagttccataggtttccctgtgttcagaatacaaatgtggatctttgaaaaaaccctagtggctcttactcagaagaagatgcacctgcctggtagaacagaacttaaatatctcccaaatatgcattgtctggatgagcatgtgcctgaactactgccacagtatttaatctggatgcctaggcagttcagcattctctgggaatcaaagactgcagagaagaggaataaatagctaagcagttaaacattcattcacctttgaattgatgaagatggctggtctctgagtcaaagtaagcagactcttgcttaagagaaagaactgaggaagagcagggactatcggtagacttaattatgccttcaattgttcctatacactagtgcctagcatggcacctgatacacagctgtcactttatgaaaatttgttccccttcccctttattgttctgtttgaggactactcttagactttgcacttgacttaggtaagaactggtcttcatctctgaatattcaaggttataaagatacagataacttgaattcccttgtacgatgtgtgctgaacatgtctgctctgcctggtgcctggaatattttctttgtgtgggaagcttctaaatgccgccttctctctgaaacctttctcaccttccttaagcacagtttgttgctttctctttctcatatcatcctttatatggtattatagcaattatcactccattttaattcccccccccatatcaatgtcctcaagcctcaaaggcatctgaggacaaataatatattaatatctctccacaaattgtcaagacctggcacaagacaaccccaaatcagccaggtgtggtggcttacacctgtgatcccagcactttgggaggccgaggggggcaggtcacctgagatcaggagtttgagaccagcccggccaatatggcaaaaccccgtctctactaaaaatataaaaattagccaggcatggtagtgtgcgtctgtaatcctagctactccggaggctgaggcaagagaactgcttgaacccgggaggcggaggttgcagtgagtcaagattgcacagcaagactccatctcaaaaaaaaaaaaaaaaaaaaaagatttaccccaaatcattctgtgatgaatggagatttaaaataattattaaaattagcttgtacctacataagacatgctctgacttaatttcatcaatgttccaaattagttctcaataattgtaccatgcactgatttttatgtagaggaaagcatacaaaaaatattttgctactaataaagggaataaccttaattacataaaattcagggcaacaaattaagagataaataatagttttaaatgacctaaagaaagtgaccacatttaaacaatatgaggttaaggttaaatgaggtttaaaaatgtttgcttcctggcagttatatttactttcagcttggtcaatcctaaataatggaatgatttcaagaaaaaaatacaagaatggaattttttttttacgtatagtaagagggtctatgttgagaatgttgtatactgagagttttcacctctgcatgtgtggttagggaggttcactaggaaattgagggcaaataggcagccacgtttctctagatcggcggccttcaactttaacacacatctaagtcacctggagggtttgtgcaaacacagatcgctggccctatcacccccagagtttctaatttaacagatttgaagtgagacctgagaatctgcctttctgataagtacccaggtga

SEQ ID NO: 96176 - DNA, 249293 bp, Homo sapiens
  misc_feature (1)...(249293): n = A,T,C or G
gtagaagatatacgcttattaaataatcataattcagctgcgcatggtggcatgtgcctgtagacgcagctactcgggagactgaggtgggaggatctctcgagtccaggaattcaatgctgcagtgaactataattgcaccactgcactttagcctgggcaacagagtgagaacctgtctctaaaaataaataaataaataaataaataaaaaagaatattcctattcaaaaaataaaactcacttaagtccaggaggttaaggctgtagtaagccatgatcatactactgcactccagcctgagtaacagagaaagaccctgtctcaaaaaaaaaaaaaaaaatcataatcaaattacataagtactctaaggtatagaagaagactgaagagacagggcaagtcaggcaaggtgttaaagtggggtggagcttttgagttttgctaaaaatcataacccttgatttatggtaaggtaacatcactggtcagggcatggatgcttttatttcatttgagctgagacttgaaggatggggagggaatcccaaagaagaaagcaagcttggctctcacctaccactttatctcctgagcctcagtttcttcatctttaaaatgagtaaagtagtcccctcttatccatggagaatgtattccaagaccccagtggatgcgtgaaactgcatatagtatcaaactctatatatattgttttcctatacacatacctatgataaagcttaatttataaattgtacacagtaagagatgaacaaaaataactaataataaaatagatcaattgtggtctctctctctcctctctctgtcaaaatatcttattgtaccatactcaccccccaggttttttttttttttttttttgagatggctcgctctgtcaccaaggctggaatgcagtggtgcaatcttggctctctgcaacctctgccttctgggttcaagcgattctcctgcctcagcctcccgagtagctgggattacaggcacgtgccaccacaccctgctgatttttatatttttagtagagaccaggtttcaccatgttggccaggctggtcttgaacacctgacctcaggtgatctgccctcctcggcatcccaaagtgctgggattacaggtgtgagccactgcacccgaaccccatagtcacctatttttggacagaagttgacctcaggtcaacatggggaccaccgtgtagcccctgttttatctagcagagcttctgtgaggaagagatgagataatacatgtgaaaactcttgcaaacagtggaatagaggcataagaattagttaatccaatttgatttagccaacatcttcagaacatctaagcaaggccctaagattaatgcaagggagatatactgcataggtataaaaagagagatggggagaaagctctctgtttcctcctgaagcttacaatatgttgagggggtcctttctttttttttttttttaaacagatttttgctctatcacctgggctggagtgcagtggcaatcacagctcactgcagcctcgacctcctgggctcaagccatcctcctggctcagccccctgagtagctgggactacggggacacaccaccatgccaagttaatgtttgtatttttttgtagagacagagtctcactatgttgcctaggctggtctcaaactcctgggctctagtgatcctcccatctcagcctcccaaagtgctaggattttaggtgtgagccctagtacatacctgggttcttgcaagggtcacacttttagaaggacgaagcataggggcttatagagatgagggtcacagattctgatcaggtttcagaatttttttattttgtagaatattaaagctgcactgggtcaataatctggtagctgaccagtttatagttggggagactgaaattcagaggggaactgacttttctagtgtcacatcgtgatcttggaggcagagaagacaccagaagtttcttcctgttgcccaggctgtggctttggctcccaggtaccatttatttgttattttattttatttttgagatggagtctcactttgtcacccacgctggagtccggtggcgtgatcttggctcactgcaacctctgcctcccagattcaagtgattctcctgcctcagcctcctgagtaactggggttacaggcacacgccaccacgcccagctaatttttgtattcttagtagatacggggtttcatcatgttggccaggctgttttcaaatcactgacctcaagtgatctgccggccttggcctcccaaagtgttgggattacaggtgtgagccacggcgcctggtcatttatttgtatttttaattgtggttaaaaaatacataacatacattttgccagcttaatttttttttttttttttttgagacagagtcttgctctgttgcccaggctggagtgcagtggcgcgatctcggctcactgcaagctccaccttccaagttcatgccattctcctgcctcagcctcctgattagctgggactacaggtgcccgccaccatgcccggctaattttttgtatttttagtagagacaggatttcaccgtgttagccaggatggtctcgatctcctgacctcgtgatctgcctgccttggcctcttaaagtgctgggattacaggcgtgagccaccgcgcccggcctcatgttaatcatttttaagtgtacagtttagtcatgttaggtacattcgcattgttgtgcagccaatctccaaaacttttttcatcttgtaaaattgaaactattcccagctttcccctctccccagtctctggcaaccactactctactttctgtctctatgaatttgactgttttaggtacattcatataaatgaaatcacagtgtttatccttttgtgactggtttatttcacttagctggctgtcttcaaggttcatccatgttgtagcatggtcaggatttccttcttgcttaaggctgtgtactatttaattgtacgtatgtaccatattttgtttatccattcatctatccatgaacaacttcggttgctttcaccttgtggctgttgtgaataatgctgttatgaacatgggtgtacaattttcaagaccctgcttacattttctgggtgtacacccaccattgaaattggtgcatcatagtaactattgttagttcttagacaccattttagcgtcacaggaaattcgacagcttccaagaggtttaaggtcttggtgtaaattggtaacagaccctggcttcctgcctccaagatctgtttgttgtaccaaatagataagcacccataaccccgaagaaatcatatggtggtgaaaagaaatgctgtagtcgagtttgaaggaaattgtgttaaacatgctttactttgctcatttctttcatgttctcttaggcaaatgagtgcacaggcaggagagctggcttaggtagaaatgatcaactgtcagtctgagtgattaatctgggctgcagacatgttttctgtggcctatataaggttttatccttttaaacgaattgctaatatttttttaaaaaggatatgtcatatgaaagtccagatttccatcttctctctctctctttttttttttttttaattgagacagggtcttgctctgttgcccaggctggagtgcaatggtgtgatcatggctcactgcagccttgagctcctggatttaagcgatcatcccccctcagcctgctgagtagctgggaccacagaagccagataccactcatggctaattaaaaaaattttttttgtagagatgggggtcccactgtgtttcccaggctggtcttgaactcatgggctcaagtaatcctcccactttggcctcccagagtgctgggattagagatatgagtcactgcacccagccccatcttctcttaatgacactccagcaatactaggcccatctttctgcctgctctccacagtccccaccactccgtattactcctacctacttttcttaattgaattacctacctgcccattttgccatttgaatttaagacccctggctcagagaataggtctaggagaacctaggtagggtttcaactgttctggtcaattttccaatattccggtattagtttttagtatctgagtgttcaagtgaattaactcatgtaatccagcttttacagagaacttactatgtgcagggtctatggctgggtcctagtgtcacagagatgaataaggcacagtctctgacctgaaaagtggcaatcactatctgttgggggaggggcagacagatgtaatggtccaattttggccacagactgattttgaaggggtgggcagagtaaaagtttctaaggagacacattgagctgtatctggaagagtaagagaccagctacatgaggaactgggagcaggcgagagtgtttcatgcagaagcaacagcagatacaaaggctgtgaggtggctgagtttgacgtggttaggaacttaacgaaggctagtgtgacaggagcttaacagagccgggagagtggtagtaggttacattagccatgtatttttatatcaacggcctaacccttaagccaggcagctgttgggcaaattcgtgttcccagtcttcaggggccttgctcagaacaggtagctggtttagcactgtcagtcagaggagggactgggcctgatcctttcccctgcgtctggtgccaaggacagggtagggcacagaggtttcagtcaagatctgctgacagcacgcttgagaagagaacaggaagtgcaggctttgttgaaggaggctcaggcgtggctctgtcttctttggcgcactcattctcaagtcgctgacacctcctccaccagagaggtagctgggagaatgagatgcagggaggaagcatttacaggccccaccgaaaaaccttaaagggctgagagcttgagggcaggtaggaaaaagggctgtgagagctaagggagggcatcccacttagcttggaggggaagggaggcggggtcgggaaagcagatggcaccctttagcccagactcaaggaatgtgtaggggaattttagctagagtggtttggacatttcattttgctttctggcatcatcatttcctcagaaaacactcgcaggccccagtggccctcgtgggcctcccccggggcgggtcttagcttcactcggcaaccctctgcaaaagagcaggccctcccaggagcgccgagtcctgtctgcagtttgctgattttcccaccaggggccgctgcgcatgggcgacgaagcgcgcgggttcccaagccgcagagaggcggaagccgattggttgtcaggcgaggcgcgagggcggagcctgggaactggccgggagttgggggctgggagctcgcccccgggccgagccgggtcgggctgttgtcgcctcaggcagctcctgggaggctaacgtcgtgtcctgggcctctgtttagacagctctagaactgaggcgagtggagcagcaccaaggcccggagatcggggcagggcagctgctgtcgccgccgccgcaggcctgagttacctgagtaactgcgggtcagggacccgcccgacggcccgcggttggcgctggagactctcggtggggaaagggaagctgggacttgatcctttgcgcgggatcctggcaaagactagcgcgggccgggggtccgggagagcccgctaggggcggggattccggggagccgtcttcaccggttattccgggatccagctgggcgctggggctggcccgggcttcgctggggaccgggctcgccggggggggcggctccccggggtccccgcccctggcgggcactcccgggcccccgggccgcgctagtacnnnnnnnnnnnnnnnnnnnnnnnnnnnnnnnnnnnnnnnnnnnnnnnnnnnnnnnncgcccgcgccctcaggaccctgcgggtcgcacgccctccccagcttttgctgctcgccgctcttcggcagggcgaggtcaggtgcccccttctcgcctctcttctcttctcttctcttcctcctccacttctgtgcccgcggagactccggccgcccccttccgcaggggtgtagtaatctgcggagctgacagcagccccgcagccaccctgcccgaagtctccggaagcggcacgagctcaggccgccgcagccccggcggacccactgttggacctgaggagccagccctcctcccgcacccaaacttggagcacttgacctttggctgttggagggggcaggctcgcgggtggctggacagctgcggagccgcgagggcatcttgcctggagaccgtcggctgcactcccgggctcctggctttgcctctgggatcccgaggtgtccacatcagacgcatgttgactgagacctagagtcatggatgtatgcgtccgtcttgccctgtggctcctctggggactcctcctgcaccagggccagagcctcagccatagtcacagtgagaaggcgacaggaaccagctcgggggccaactctgaggagtccactgcagcaggtaaggccttgctgcgggctggactggrctggaggctttggctcaggactgagtggcccgaagtgggcaagttgaaatctaggtttgtacatgtgaggttcatggaggattcacacatggcactgcctgttccaagtagttcaagaagttctttctggtcagtagtcatsgcaaatgcctgtatctttcctgaacaactttcctcatcccccgcactcaggattttttttgttggcagtaagaagaagcctttggggcaacttgaccttttagatcagcaaggaaagaccccatcttaggcctacttgtctggaagaatggcctggtgagatgataagttcattgctcctattcggttttagtactgagcagcatgggggaggttggggccacttatgttggaaagggaaagttaaggctgggccacctctgttgcctgaaagcctggtgttcaggtgtgcctattccaacaaccgtgggaaccctagtcccacccttcccttaggtagtcttgtctctttgctgtgcgcatttgaaatatccaggyggtttyttagatggaatcctatttacmactagggtgttaaatggccttttcttgacatagacatgatataattcctgggaccacttgttgacttattctgtttcttctgactgatgagggtgggaattccatgctacaggtttttttttttttttttttttttttttccctgagtctgcttgctagggaaaccatgctasttttgatctgtcatggtttttcctatgcagttgtgaaggcttatcaggcagcaggagccctggtatacttttgcagtagaaaggaacacttttatgttttgttttgtttttttgagacagggtcttgatctgtcgtccaagctggaatgcagtagtgtgatcacagctcactacagcctcaaactcctgggttcaagtgatcctcctgcctcagcctcccggtagctgggactaaacacaagagccactgggcctggctaactttttttttctttctatttttaattttttgaacagacactgtctctctgtgttgtgcagggatccctcccaaagtgctgggattacaggtgtgagccactgtacccatcaaggaactctattaaaatccagtcattttacataaggcttacgagatcagttctcttttcccatttctctcaccctttggctgtgatctgcccaaagctgtgacctgcagtgtggggagagtttatagatgagttgtttctgagcataagcaagttcaaatgagggaatggctcagtgggcacctgctgatacaagtcagaaaaggaaatataggtcatgrtggctggggagtttcatggatggatccagaagctggctttggtggtagaccctttattgggcaatacccttttaagttccagatgttccaagaggtctggtttccaaatgaggccagggttgcccatgtgtaagtaggatacctggctgttgctttctagatagatcctttttgcctattaatcctgtctctccatagagagtctccttgacctttgagacctggctgaaagcttggttcttattgggctatgaagggaaagactagtgggcaaatgtagattgaactgtgaagtagacctaattatcatctcttcctgtccctgtgacattcctatttataactgataatatgtcttttttcactccaaaatatgagtgcctgacataagatgaatattttttggagagtgggtgttctatattttagacataagctaaagggatgaaattttgaatgtagacattggctggctattaggaaggttttttttkttttgttttktttttttcgcctgaagtaaaaggcattctagccttcctcaggaccaccccatgacttgagcttttggagacaattcttcacacaacatatatttcagaggcctggctatgctgattataccacttaggcctactcatgctcagtttagaaactggtttctgttgtcacaataatagtgaattccagggaggaaagtctcagagagaccctaggtgctgtgaatgcctaaggtttgtggaaacctggaggttctagcactattgttgtggtaggttttccccttgggtctacctggggttttgtctttgactcagtcagggacttgtttttgcaaagaggtggttcatatagactgggatctgcaaaagagtttggagagaaacttyctatgcaactaggaactcttgcatcctttccagcctctctgtatccccagaacacaggaggagctttacttgctcttaaaactactacttttaaaaatcagattcaacatacccagtcaatttgtgtgttctctgcagtttgtattttacaattacatagctgtttttccaacagagtctcacaatagccctgttacaatgcagggcaagtggtattgtccccatttttatgggtgaagaaacctggtcctgtgcttggtctttcttataggcaggtcttctgatgcttaagtcttggatttcttccatcttctcaggtcctgccctgttaaaggagtgctaggcagggctggagaatgttgctttccttctgacaattaggcaggccttggtgactctgtagctgagagccaagaaaagggctgtactttttttctgctctggagagtcttttgcaggggcccagagaatttgattttttctcttttggatgtatatacccatctgtctctttttagttagttaaaatatttgatcctaagattgatttagttaaaatgcttatggctttagcatgcatacaataaacactatgaaagcctgatcctgcagtgaaggcaggtgctctacaaggaggatctctcactgggccgtggagaggccattcctgtcaccctttggctctttaatacctgtacacccagccatgctaggtcactttctcagtaaagatctgtgcctgcctgtgctactctggggcttgcgtttctgaagctggcctgatacggatgcttggaaccgtccttagactctagaaaacaacaatggtttctgtagaatgtgcatgagggacctcaggtggagtctggagttatggctgccagtgttggaggtattgagggcctctaatcaggaactgtggtttagttcagtgtagctaggacagggccttggaggataggcatctaggcagtgtgcagagtgcaggctggcttctcaatcaacctctgatggagtggcaggccagaaccctgcctccctcccccagctagttgctgctgcctccaaggctataaatggcctggccatcttggtagctatgctaattttagctgagggtggctcccggaactgggctggggccaagagcaggtaggtggggcttggctgaagctaatactggggcctggggagagggayacactaagcctggggtagccaggatataatctgctcccaggcctcagctttgacaatcacccttagctaggttaattgattcagcaaacattgaacaatgccagctcatgtggtatttattaaacaagtattaatatttgagtgccttctctgggctaggtcatatgttcctgtggggatttaaggatgaacaaaacagacatgttccttccctcatggaagttacagtcttgttgatgagacagataataaacacataaataaatatattatcttgtggaaaatgtcatggaagaaataaacaggatgctatcatggagaatgagaggggaacagagatctagttaaagcctgaacctaattgtaggacagattaatacaataacatcaatgataataatagcaactaacttttttagagcttactatatgtcaggcactatttaaacattttgttttattaaattcttattaccatcctgtgttatattgtccccattttatagatgagaaaattaaatcatagagaggttaaataacttgcccatgtttacacagataacaaggaagccagagtttgaatccaggcagtctgattcttctctctacctctactttagccactctcaaaactttgtgataaatctgcaatagaggtattatatatacatgcagaaagctgtgggaagcccagaggagtaagtgactaaccctgcctgggagagctgggggaggccttacagtttctttgtaatttttctcagatcttgagatgaaaagcggctgcctaattcaaaggttacgagatagaaacatcagttagttcatcccacctatttttacatatgaggaaactggcatccagagaggcattagaggtttcatggtgggttattagtagaactagactaggaaatttgagtcagggaccttaacttaaatcagtttttcattttataagtgaaaataatgggtgctcactgcttgcttttcactgtggaaggaacttagggctactgaagaagtctacgttttgtagggccacatgtatttagggaatattaaatacaacataatgtacaggcttaatgatgtgcaaaatcaggcagtatagacattgtaggctaagggttaaaagcgatctgtgtgggctgggctagactaggtggctgcagagggcttcctggaaaggaggggttgggtggaggcagaagagaacaggagagagtagtctgacttggggaggttggaggaaaggaggcattgtaaatatctggtttcactgtttggtagctggatgatcattaggcagagttgcttcattgttggctagctacctcacatgagcacccataggtaggaagattgcagtcatgtgtgatctagtagtggttctattttttttttttttttgagatggagtcttgctctgttgcccaggctggagtgcagtggcccgatctcagctcactgcaagctccacctcccaggttcatgccattctcctgcctcagcctcccaagtggctgggactacaggcrtccgccaccacgcctggctaattgttttgtatttttagtagagacagggtttcaccttgttagccaggatggtcttgatcycctgacttcgtgatctgcctgcctcggcctcccaaagtgygggattacaggcgtgagccaccgcgcctggcctctattttttaccgtaatttagaagtaatgatgagtgtaaataatactttgagatatctgtagcaatgtaatgtgatatgaaaacatctgttgatttctattgatgacaaaatcacagttattgctaatattattgtggttggttgctccatatgtaattgaaggaaatgctaactttcagtaagagaatattgaaaacaaagatgtaatttcattcccatccaaattcacaggcctcctgaattctatctatgggccccttagggatatggggccttcgtgttaagaacagctctttggcaaggaagtgatgagatcttgtggaggggagtagtttcctaggtctctacaggacttgagtttcagacccaaggggcccctctggtttcctgctgggtaacctttgatatacattgctgagtggctttgtgggcatgctgtggtacatttccctttgtggaaaatgattctttgggaaactcagcaggtttggttgttgtcaggcttttagggagaaaaaaagagaccaaactgggcctccagagctttgttgttgctgttgttgttactgttgattaaaaaaatcatgaaatattaagatatacaacaaagtataaataataataaattgaataccctgaaatgactttgaaaaaaattgtggactaaaagcaggaaatcatcccaagaccttgtcttaccctaaattccccctaaaaagtaagacctgggataggaacttgcagagagtttatttcggagaagtgacttcaagaaatgaggggtgggagttgtgaagaatgaaacagggaatggacaggtgtactatggagctaacaccactgtgagcatctgaggctcagtgtcacttagagaccctctgagaagccttgtagaatgctctgtagaattgcattctacaggtgatagaggaggggagtatttatccaccacctcaccttcactcgccaagggttatcccaggaggtgctacctcttctgtactccagagttgcatatgcatcagaatgaccgagcaggttcctttaagtactgcatattggccatcacacccggctaattttttgtatttttagtagaggcagggtttcactgtgttagccaggatggtctcgatctcctgacctcgtgatctgtccgccttggcctcccaaagtgtttggattacagacgtgagccaccgtgcccagccaagtagtcccctcttatctgtggtttcagttacctgaggtcaactgaggtctgggggtaaaaaaagtatatatgtgtgtataagatacatacttatacatatataagtatatctgtaagtacacacacacacacgcacacacacacacacacacatatttttttgaggtagagtttcgctcttgtcacccaggctggagtgcaatggcgccatctcggctcactgcaaactccacctcctgggtttaagcaattcttctgtctcagcctcccaagtagctgggattacaggtgcccgccaccacacctggctaatttttgtattttttagtagaaacagggtttcactgtgttggccaggctggtcctgaactcctgacctcagataatccacctgtctcagcctcccaaagtgttgggattacaggcgtgagccaccacgcctggccacacacgtatatatttgagacaatgcatgtgtgtgtgtgtgtgtgtgtgtgtgtgtgtgtgtgtgtgtgkatgtatttgagacagggtctcactctgtcacctaggctggattgcagtggtgtgatcatggctcactgttgcctcgaccttcctgggctcaggtgatcctcccacctcagcctcccaagtagctgggactgcaggcatgtgccaccatgcctggctactttttctatttttttgaagagacgaggtttttccgtgttgcccaggctggtcttgaactgttggactcaagggatcttcccagcttggcttcccaaagtgctgggattacaggcatgagccactgtgccccagccaaatctgaaaatattaagtggaaaattccagaaataattcataagttttaaattgcacaccattttgagtagcatgatgaaatctcatgctgtcctgctctgtcctgcccaggatgttaatcaacccctttgtccagcgtattcrtgtaccataggctacctgtgctttagtcacttagtagccatcttagggatcagatcgactgtcttggtgtcacagtgcttgcgttcaagtaatccttattttacttcataatggccccaaagtgcaagagtgattgctgacatattgttacaattattccgctttattaatagttattgttgttaacatcttactaatttatgagttaaactgtatcataggtacgtatgtgtaggaaaaaacatagtgggtataggtttggtgctatccgctgggagtcttagcatgcatcccccgagaataaaggagggctgctgtagtttcattgtctcacttcggctatacccagccatcatgcgtaactctggtgtggccaaaccaggcttttattcaaggcttactgtgggccatggggagactgttaataaagtctgggtgctaatatttgacctcagctccagctgtactctcttattgagtataaccacctccctagcttcacctgcagtcttgaaatggctgagcaaatgggcctggtccccactgtattggttacttattggtgtataacaaattakgccaaaacagagagggctaaaataataagtatttattatctcatagattctgtgcatcgggagtctggatatagcttgactgggtacctctggctcagagtctctcatgagatggcagtcaaactgttggctggggctgaagactctatttggggggagagtgtttgcttttaagctaattcacatggttgttggcaggccttggttccttgccatatgggcctctacactgggctatactggacatgatgattggtttcccctagaacaagtggtccaagagagcgcaagagagagtgcctaagatagatacctccatctttttatcatctaatcttggaattgataggccatcacttcttctatattgtgtttgttagtaagtccagcccatcctcaaggtgagggaattacataagggcatgaacactaggagggcaaggaccgctagggatcatcttaaaggatgcctctgagattgcccaagggccatgctctggggaacaatcacttctaggttctgtggccttttagtttttctttgacttcctttgcttacgacctagagtcttgtggagtctttttatactcccttttatgttgtgtctcttggttcatgcattacttcattgctttgacatgacctatccttttttccttctccccggactcctgggctccaattagaaactagctttttatcctaggctgtagtcctgcctaccaactttttttgtttcataccttctattctggagcccattgtacagccactgactttggagcctttactactccaacttggcttctgagagttagatttgtagatggcattgaattgggactcacaatgacagatgaaaaacttcattctgactttttaggccattggtgttaggtgctaggactgaaatcctagtatgtgaaagctggaaggggttttagagaccatctctcccaaacttcttatttacatatcagaagaacaaacttacccaaggttttggtaagccagggctagaatataattttctctgattctcattcatatgttgttctcactctgttgtggagcctgtctaccctaatggagcctgtttgggttgttaggaggtctgggacctacacagaggagaaccaggaagcagttcacaatattatattatgttcaccgaaattggtctgggtacaattagggatatacaaagtcaaatgtcaagtgctgcttctttggacctatccagctagaragcttttttattaggcacagaaaaagaagcccagcaatatctgtttcctatggtgcctaatatatgcaccctataccactctcttgacaatatctgttcagagcaatgaggaatctgtttgctgggatgtacagtataggcatctgaaggagacaggtcagagccttatgttgtatgtctcaccactgagctgttcagctggctccattatggatttggggcctccacaggcagggtaaatgtattaaaaactttgtggggttactcgtggccacctggaaagtgccaaggggaggttctctgggcattgagaatttgacaactttgcctgtgttgatacaacttgctagagcaggcaagacttgaagagggatggctgtggtcctgtcatgtttatcagagtggagcagatttsttttgtgtgagaagtcatgcaagaaaaatccggaaatgagccaacagcacttaaacttttgttttctgctggggagcatggaatagagaaggtgcaggttctaaaatttctgtatgggtggtggttgctttcctgacacagagttccagccccagaccactttactcacttcatctccctctgttccccttgctgcattcttggcaagccaagcatttttctttgttctgatctgcagaacaaacttttatttatactgcttcacttttgtttttacttatgtcatttaacttccttcagaatgtctttattacctgtccttctttatttctacttccagtcctctatgaagtctttcctgacactaattctagctgtgagatactgctgacctgtgaacaaactctggtagcacttactatctgcagtgctctctgtgcacttcacaccctgcttacgccacaagaggcagcttgctatgtctttttttttttttttttgtgacagagtcttgctctgtcccctggctggagtgcagtggcgtaatcttggctcactgcaacttccgcctcctgggttccggtgattctcctgcatcagcctcctgagtagctgggattacaggtgcgtgccaccatgcccagctaatttttgtatatttagtagggacggggtttcaccatgttgatcaggctggtcttgaactcctgaccttgcgatccgcctgcctcggcctctcaagatatgtcttttacagcaagccagtacctaagagcactgggcattggtttgagttcttggtgacagtatgacagtgtgatccaaactgtcaaatgacagtttcctcacttgaaaaatggagttatcagcaccataagagagggtaaagaaagaaagaaaagaaaagtaaaaaagaaattaraactgtgctttatttattattattattatttttgaatrtttccttgtctcttaagggcaagagccatgtctggtttgttggctgtagtacatatcctcagtacctatgagagtgctggtcagagagtatgtgcccartagatatttgttgaccaaatgaataacaatgaattgatctttggattgagtaggtggggagggagaataccaagtacttgacatcagttcctgtaaaactgttagatgagcatgccctgggattgggatagaattcacatggtgagttttctgaggagttctgtagggattatttttctgcctgacctagtacttcatccctatttactaagcacctactgaagctgtgctcagtgacagttatcagtcataatgagggatgrtttggctattgactttggttggcagtttttgtttgccacagcaatgactaccctgagcaggtggctgcagtaggagtggagaactgtgcttgaagaggacatgaaacctgtaggcaaggccttcttgggtcttcctgctccctgtctttggttccatggcccacatgggtttacctcaggtcaaatttgaggcagctgaatgaacagaatgaactttcactactttgctgagactagcttgtggaacggaggaggaaacctttcatggttcccactcctgggcttgttgtgcagcagagagataggatagtcctgtgaagattgctggctttttaaatgttatctctgatgctgagaactccagcctgagcaggcatcacatcagctttccttcaagacgctggggaggggcctcttgggagatgtgatggaggagacaaaagaataaaagtaactgtgctgtcagcacggcccagtaagggcttatctgaccctttcctcggttggccatatacacagagcccctggctgccttgtgttgatctctggcctaggtaatgaccagaaatctcactggcaggcaggcaggcaggcaggcaggcvggcaggctttcaaatctcatgtgcctctaattttctcagtgtgattcagtagctctgctcctgtttggcctctctgggttatctcaggcctctcaggaagctctcagaactctcgtcactacagtgtatgttcgaacaaatgtgtctgtgcttgccaagttcccagagctggcttctgaaatacagcagccaggggagatgggtggccttcaggtgtaacacacacacacaggttagaaagcagtgtgtgtctgtgtgtgtatttgttgctgggtggtygaatttgtggaggtcttgtttcaagaaacttttgctgacaagagcaaaggtcactggaactcacacttcatatctctgaagagataaatatgtaattaagacaactgaaataacttcgatggtaagaatgatgatgacagctactatttattgagcacctttgtaggtgttttacatctgcaaaacaactcttaagggtggatatagctctcattttactgatgaagaaattgtaactgagaacttaaggtyattttcccaaggtggcggagccaggatttgaaattagctttatctgatcccaagaccaaaattgtttctatttttgtttaataacttggtgtggggtggggtggcggggaagaaacagctatctgagtttagaatttaggtggagataggcattttgattaaaaattatacaatttataggactgttaagtggtgttagtttattctatcacccaagtggcctgggaaactaggattagaggtgggatgggagatggaaagagaggctgtattttacttatgaattctgagtaggtagtacctagctacagagtggtgtatattcagtttatattttccaaaactatcaccctggttcaactgttctgaatttaagccttggggtaggggctgtgtctttgtagttagtgttctttatctcttyagtcaacatttagcatgtttattatgtgttataagacaatccctgcccagtagaaggactcaatatagcaggagaattaagatgtatggtcacattttatattataataagagcttctatttattgagtacctattcttttctctctctttttttttttgaccragtctcactctgtcgcccaggctggagtgcagtggcgccatcttggctcattgcaagccctgcctccygggttcatgccattctcctgcctcagcctcccgagtagcggggactacaggcgccagccaccatgctcggttaatttttttgtatttttagtagagatgggttttcaccgtgttagccagaatggtcttgatctcctgacctcgtgatccgcccgcctccacttcccaaagtgctaggtttataggcgtgagccaccgcacctggcctgagtactattctttatcaggactgggctaggtactttcacatgcattattttagttaatcctcacatcgggtctctcactttatagctttttgtacaaggcaatcttggttcagtgccctgtgattgatactgatagtcttgttggcagttgtgatcttctctgctgagggagatcagagaagctttgtagaggaggtagcagcttagtgggtcttcagatacttcaggtagaaatataagggaatttgtgggaagtattccagtcataggaaatgttatgagtaaaggtctggagtgggaaaaagtaaagagtctttggggggcagtagtttagattggctggagagtggtarctgtgccagagagtaccataaaaagatcaaggagggcctaaattgtcaggctacttgattccatagggaataaatagtccttgcacgttttgacaaggggagagacmtgacctgagttttgctttagcaaggttaatctcacagaatatgcacagtacattggtaaaggtgagattggaggcaatgagcctagataggagactttgcaactgttcatgagcagaagacatcagggtctgcattgtggaggtaaaatcagtaggactcagagtttaaatgtaggaagggaaggaaagaaagaaaagagtcaaagatacaccagtgttttgagtgtgggtcatgaagagactggtggtgccattagcagaaaatatatggcagtcagaaggagggtcagtgctaggggatgattagtggtggggtagctgaacttatttgaagtgctgggcaaggggctacactccacaggacttcaggaaccaaataattctttctatgcttatttcacattgctacattttacaaakgagttttctggggtccaaagaaatgaaatgatttgcctaaagtcatacagtaactccatggtggaatctaagtctgagaacccaagtctctttgctttttagctattaaacttcctaacaaagctgagccttgactctaggaaaatcagagacagtcttggagacagacaaacctgacttcaattccagatcttgccagttttctgtttgtaagatcgtaacaagattgcttttcctctctgagcctcatattcccttttgtccacatttgcaaaaaagggaatattaatttttacctcatggaggcattggaagtaaatatgctttctataatactctttttacttttttttggttttgttctgagacagggtctcattctgtcgcccacactggagtgcagtggcaccatcacagcccactgcagcctccacctcccaggctcaggcgatcctcccatctcggcccaacaagtagctggtactacaggtgtgtaccaccatgcctggctagtttttatattttttgtagagatgggggtctcaccatgttgcccaggctggtctggaactcctgagctcaagcaatccacccacctcagcctcccaaagtgctgggattataggcatcagccactgtgcctggctacatctccgattttctagtgggatatggagtggctgacagaacaccgagtgaccatatcctatcagctactcttttttttttttttttttttttgagatgaagtcttgctctgtcgccaggctggagtgcagtggygcgatctcggctcactgcaacctctgcctcctgggttcaagcgattctcccacctcagcctcccaagtagctgggattacaggcgcctgccaccactcccaactaatttttgtatttttagtagagacggggtttcaccatgttagctaggatggtatctcttgacctcatgatctgcttgcttcggcctcccaaagtgttgggattacaggcgtgagccacgacgcccggcctcctatcagctactcctgaccagagagaagatgattaatatccccttccctcagggtcttctgccaaccttcatgtgggctcaaagtggaggcaaagtgatagctgaatttaggctatgcttggtgagaacttcctctagactagggtaagtcctggcttgggacagaggaaccagggtggacttgctgatcagagtgcttggagtccttatctggtcgtctctttggtttagtacacaagttcctaagttcttctcagaggggaagtcagctgctctagtaggggtattgttaggtagtagggctgtggttatgtcagctctgtgtcatgggggcaggcctgaaactagctgttttgtccaatatctagtcacatactctgagtgagtggaggaggaatacaagattttctaattttaaaaaacaactggttactattttgtagcttctgtcttaatgccttttctttccattgttttcttgaaacttttttcattttcttccctcttcctaggttggttctcttgagtgttcacagctttctttagggaaaatctggtttaataaaaagaccatgagactaagaattaggtaggcttagtttagcctgggttctgttactcttgacttttctgggcttaaatttcctcatcccaggtattgtggggataacagaatctatcttacaaggttgatgtgtgcagatcttatgaaataatgtgataggcatttattcatacacaaatttgagtaatttatcattactgtattggtttttctcctctgaattgtctgatgatctgttctttgcaattctttggtttatccctctctctttagtaccctgttctcctaggttctcactcttccttataatcttgttttctaactctcgtttttttttgaaacagagtctacctctgtcgcccaggctgaagcacagtggtgtgatctcggcccattgcaacctccgcctcctgggttcaagcgattcctgtacctcagcctcccaagtagctgggactataggcgtgtgccaccacgcccggctaagttttgtatttttagtagagacagggtttcaccatgttggccaggctcatgttgaactcctgacctcaggtgatctgcccgccttggcctcccaaagtgctgggattacagacgtgatccactgcacccggccttgttttctaactcttaatgacaacaggaaaagtgtggctacactggcattacaccagttggaagggagtgggtctgagctcttggggaaatgtaaaagttcattggcttttgagtacaatatgttgtcattaacttgaacaagtctctttgcctccattttctttttttcttttttttttttttttgagatggagtctcgctctgttgcccaggctggagtgcagtggcgcaatctcggctcactgcaagctccggctcccgggttcatgccattctcctgcctcagcctcccgagtagctgggactataggcgcccaccaccacgcccggctaattttttgtatttttagtacagacagtgtttcactgtgttagccaggatggtctctatctcctgacctcatgatcctcccacctcagcctctcaaagtgctaggattacaggcgtgagccaccgtgtctggctctttacctccattttcatatgtgccatctggtttaccattatagctcaattcttttgattctcaaagtcacttccatttctgaaaactcccctttaatgcacaagtattactgtgtttatgttactcccactttttttttttttttgagacagaatctcactgtgttgcccaggcaggagtgcagtggcatgatcatagttcactgtaacctccaactcctgggcgtaaatgatcctcctacctcagccttccaagctgggactatacgcaggtgccaccacactccactgatttttaaaaattaaaaaacttggccgggtgcggtggctcacgtctgtaatcccggcactttgggaggccaaggcgggtggatcacctgaggtagggagttcgagagcagcctgaccaacatggagaaaccccgtctttactaaaaatacaaaaaaattagctgagcgtggtggcgcatgtctgtaatcccagctacttgggaggctgaggcaggagaatcgcttgaacccgggaggcgtaggttgcagtgagccgagattgcgccattgcactccagcctgggcaacaagagcaaagctccatttcaaaaaaaaaaaaaaaaaaattaaaaacttttttttttttgtggagatggatttgcccaggctgktcttgaactcttggcctgaagcgatcctcgcacctcggcctcccaaagtgctaggattacaggtgtgagctactgtgtctggccatgtgtttacctctgaactgaggaccaaaactagctttttagtatggattaggttcagtatagccactggggaatggattgcattctggagtgaggggtggagcctggcaagagggcagttctgttagctcagtttacctacgcaggaagggtgttagggcctccaggcatacttatgctgcttctgttatagctgacacctaactgctcctcctgagctgagcgtatgcttgtactcttagccagaagtcagagcttggtgaggcctgattccccaaagaattcagtgataaaaattagggcacttgagcatatctaattggctgaactgtgtgaagggcagaggctttccctgggggctccttttaatctctgtggttatagtcttttaaggttggactaattaaaatgtgttgacagttggactcactactttccttgcactaggtcctgctccggcctcctagagtaccagaagttggcacagagctatttttcctggggagctgaggagtgggtttccatttcctaatctactaaatctacagtgatgtaatgtttgtccaaaatggactgccaaacattttatggtggggagaaatttaggctgggacttggatgtggcctgggtttctgcacttcttaaggtgtcttttcaggttgattgtctgttctagtagccctcaaatggccttgctctgtgagctggcaagtcatttctattgccctggagtatccttctctggtatgtgttcctcttctaaccagaaaaagggataaggaaaagatatttaagtcccaccatttgccagatcagggctagtgttttacacacctatcttttgaggtatgcttcataatgcccattttgcaggtgaagaaatagattcagaaaaggaaaataatttgcttgattgtcattacaggctgtaagcaactaaatcagtattcaaatccaggtctctccctagcttcaggttactttcctaaggtagcacaaatgatttcatgtcctcttatccttttaagccgctaagttctcatatccagagagtcttcttcggttcctttagccagaatgacttcttgccctgctttttcagactactctgcctctcgctaatctgtctgatatttaagtcactgaggcatgaatctacctccctcatctgactattcccgctcctgcaagatttggtactcagggtgtatttgttaaagaacagaatgaagttatagtgctggaatttcaggtgttatgatagactggcaagggtaagggttttgggcaaagccttggctagtttttcaaataaggccccctgtgtctttctgatttgcccagaatgtgctgttattttcctggacatctggctttagagtttgtatctttttttttttttaatttttattttctcctcctcttcctcttcttttattgtttgtttgtttgtttgtgtttttcttgtagttggtttgcaacctacagagctaggcttaatgctccctggactggagtgatatgacaaaccctcagcttcgtcttggttgctggaatatgcctgttgaccatggtgcttggattttgtttgtttggttggttttttgcaaagagcatgccaagatactaaccttgcatttggggcttatactttctgcaacctctgcctaccagtgtatgtcacttcacaggataaaggctttcctggcaaaggcaaacacatgtaaaggcatccctataagttgaattatttttctcactgacttgaaaacaattgaaaaactatctcagacctttttctgtgcatatagtgtatacttcgtgtttaacataaaaagttaaacttcaatggcaaattggaacataacaaaatataggccaggcacagtggctcatgcttgtaatcccagcactttgggaggccgaggcaggcagatcgcttgagctcaggagcttgagaccagcctgggcaacatggtgaaaccctgtctctacaaaaaatacaaaaaattagccaggagtggtagtgtgtgcttgtaatcccagctacttgggggtagaggcaggaggattgcttgagcctgggaggccgaggctaaattgagccaagatcatgccactgcactccagcctgggtgacaaagtgagaccctgtctcaaaaaaaaaaaacccctaaaaacaacaacaaaaaaatcaaaccaacaacaaaatatagttaaaacgcctttagtggaagaactcataaaatattaataatcaaaataaatactgcaataggatgaaacatgcatttttgctttgtattgttttgataacataggcaacctgaaatagcttagtcaaatatattgaactaaataaggacgcaacattccttttggtttctgtgctatggagaatagatatgaaatgttcttaggagaaggggcaaataatgcattctgggactaggaagaactgtgctgtggctcagttcctctactcagtggtgaaactaagctttctggttgtctgttcccctatgtgttaaagggaataatacctatcttgtttaattttatgagggttaagtrataatgtatgtgaaagtcttttgtaaactatgaaatactattattgtcatacttagtgggtggctggagccaatttgctagcactgtaaggaagcttttggtttaagatatggctagacctaggtaggaagaaggatgcaaaattaatggataaacagacctaggtaggaagaaggatgcaaaattaatggataaacagttgaatgctgtttgggtagcagctgagaggaattcctgtgagttgagggaaaggactacattcatttcttttgtttttgggagacagggtctcactctgttactccagctagagtgctatggtatgatcgtggttcactgcaaccttgagctcttgggctcaagcaatcctcctgcttcagcctcctgattagttgggactacaggcacatgccactacacctgactgattttatttttattttttgtagaggcagggtttcactgtgttgcccaggctggtctcgaactcctgggctcaagtgatcctcctgcctccatctcccaaagtgatggaattatgggccactgggtctggccttcaatacatgtttattgagtcctgcctggttgaagataaagaaatactgatatctacctactaaatacatgatgtggtaaaatatggaggcagtttggtttagaatgaaaaccccataaagatagggttcttgtctgtctcatgcactgttatgtattcaccaggagtagtgcctggcatgtagtaggctctcaaaaaatatttgttgaaagaaagtttacgatttggaatcagacagaccaggttcatatttgggttctgcccagcccctttactgagtgcgttgctcagtttcttcatttataaataaaataggactaggattagctggttattgggagagttgtttaaaaaaaagattaaaaccttttctataaggctttacagtaagcgcttaaggaaagatagtttctttcatttccccttgatggtttgcaaagtgtgatgggagtgcaggggaaaaagcagttagagctacctgggggagtctagacaatggcttcacaggcttgatctgttagtgtcttcctacagaacaacattattattattattattattatttcctcacaaaaggaactccctgggattaagcaagcatcttggaattggtatgccttgcttctctacatttcccatggtcttcatgggagggctggctcttgtctttctagcaaggtcacatttacactgtaggtttgttcagaggttgttgttccagaagaagcagctttcagtggagactctggacttagctgatttgcatgggcttttgtagccagccgtcaatcccctatccccaccctgccaaatacctcaataattgttagttatagctttgaaaacgtgtactcagcttgacttctgttccggatcagttgtaaattctcacataaggtagagcagagtgtgtttgcttgggttaatcaggtatttataagttgacctttactagtgaatacctaatttttccctcatgcctaagtaactctagcaggccgagggccttgttctcaggcattcccagaactgttgggagttgcagcaggtttgcctgcccttgtcatatatgcacaagggccagtaggatttatctgtctcccagcaagggtgcccaggacctctccttttatcctatcattctaaagcactgggaataccagtctcctctctctgatcagcattttagacactgatgctttctcttctagttagtttcttgggagaatgagtaagcagggaggaattgtttggctttcaggtaaaaaggacttcttgcttgtgaattgaagtcactaggcgagaagtgagtaaagaacatgttcctggataggagtggtcaagcgttggtaagttagacttggtttggggttaaatgggcctggtgctctctaggagtggaatcagtaagggtcctggctgtgtcctcattgccctccttcgggagctgagcattgctgtaggggagatctcacatatggtctggggagaagggaaaggaggagggttaaggaacgaagagacagagggaagaaaagggaacttttgctgagctgtttctctaggctaggtgctttacaccaataattttctttaatcttcacaacaactttgtgaggtagctataattagtcttgttttacatatgatgaaactgaggcccagagaggttaagcaacttacccaaggtcacaaagctagttaatgataataagttattatttatcatgtgcctgaaaagcacatatgaagtttctttttttttttgatcctatgaaagataattattacttcttcaatgcaaatgaggaaactgggaattaaagagctttggttacttgtggaaggtcactcatctggcagtgtcagtgcagggatttgaaaccaggtctgtctcattacagaatgtgttcccttgatgtccatgttgctctgcaaatggaagagctgggattcaaatgcagagtcatgagagcagggcttatgtcttacctatctttgtgtcaccattccctatgacagtgcttaccatgttgttagtgcccaataaatgcttgctgtaaaatctagctctgccctccccatagctcatgttagctgcagtgggttcctattgctagctgcgtcctgccccagctgctcggctgcctatcttccccygacagtttggccttatcgtgcctacccattgtggcctccytgacatcccaacacacagcatctcctctagtactgttgctttcctcttcttcatacctctttttttttttgagacggagtctcgccctgtcacccaggctggagtgcagtggcgtgatcttggctcactgcaacctccgcctcccgggttcaagcrattctcctgcctcagcctcccgagtagctgggactacaggtgcacaccgccacacccagctaatttttgtatttttartagagacggggtttcaccatgttggccaggctggtctcgaactcctgacctcaggtgatccacatgcctcagcctcccaaagtgctgggattacaggaatgagccactgcgtccagcctttcatacctcttttccctagctatacattttcctctggctatggctttccaaaaccctccaatcctgttcattcttttctctgtagtttttctgacttattccagggacttccctttctagattataatcttcttagtctgtaccatataatttgtcacctaattatctactgtttcactttctgttggtttcgtggacattaatcttctccccagccaactgatggtagtcatattataataactccccagattggtttgtgctctgcactttacaaatcactccactgtttaagacctgtctttttgcttatcatgcccacagctgctctgtgaggtgggacaggaggggattgttatctccatattattgtaaacaaattcaaagaaagcaggtgacttcccaatgtcatatatgtaattaggggcagaacagaaactatatctcaggtttactaatttctggcttagaattttatctgcaggctcttctacatttgtttttttccttaccatttcccctcttgccttcaagggtcactcaaggcagaacatctaccttgtgggtttttaggaggtttggttggtgacccagtgaatggtaaagtagcccagatatcaatcttaggtacttctcagtggcatcagtgttctgggttgctattgccgagagaattctctttctgtggctattaggattaatgttgaactaagaagcattagattattatgaatggtcagaacacactctcatggagatccaggaagcaggacaggatgtgtggtgctggscacttttgtgttgtggcaatggcatgagtttgcaagcagtcaggccagagtttgaaatctggctttgctgttgtttgctggcctcatgacccttagtaaatcattaatctctctgagccttagggccactgagagaatgtatttaagggccacataatggcctgtgaaaacagtatttgttgttggtttttattgccaatactactttaagtttaaggtgcctgaagggcattagaagcctgctagcacctgtgacccttgcaggttacttctcgtgtcttgatttccaagcattagtgatgactaccttggaagctattggctgatagaggatgagcttgaatgctgttcccaaagtctcccgtctcccaagtttccagtgccttctcagggcaatgaaaatagtttgtggacagctgggggatggtttcagtgtcaaactttgggagtaaaatctttcatgtttttctgaagaactttggcattagaattgttggttctggaaagtcaagaacacagttgttattgagagattttagttatttctgaaaccagatattgctccaaagctgtttgttaaatacttccctactcttcctaaacccctgcccctccccaaaagaaaaataaatcatattcagaccatcgtgcgatggttatatctctggcctccctggtcacccagcctctagctctctgctagcaccactccaaattgctgcttcaaaagaggtcagtcagcccctttcccttactcctcaaccatgacctggtctgtctggaaagaggatgagatacatggaccaatacatcctatttaaaagggagcttgctttctcactagggactttagactgcctgacacacaggaaatgactagaaaatctgaccagtggagcataactcattgctaaaatggcaggtttggacggctgcaggatgggagagcaggcttcctgaagaggcaggaaggggcagctggatgggaaaacagtgacttttgagtttttccttttagagtatggtgacgtaggccgtttattaaaaaaaaaaaaaaaaaggaaaatcacataacataaaattaatcattttaaagtgtacaattcagtgggatttagtactatcataaatgtagttcaaaactatttcatcaaccctaaggaaatccatacctgttaagcagttgttcctaattccccctctccctttcccctggcagccatcaatctgtgtatctgtgttttgtctgtatagatttacctattctggatatttcatataaatggaatcatatgatctattgatcatatgattattttattttatttatttattttttcaagatggagtctctctctgttgcccaggctggagtgcagtggcatgatctcggctcactgccagctccgcctcccgggttcatgccattctcctgcctgagcctcccgattagctgggactacaggtgcccgccacagcacccggctaatttttttgtatttttagtggagatggggtttcaccctgttagccaggatggtctccatctcctgacctcatgatctgcccatctcagcctcccaaagtgctgggattacaggcgtgagccaccgtgcccggccgattattttatttttatttatttatttttttgagatggaatctcgctctgtagcccaggctggagtgcagtggtgtgctttctgctcactgcagcctccgactcctgggttgaagtgattctcctgcctgtagctgggattgcaggcatgtactaccacacctggctaatttttgtatttttactagagacggggttcgccaygttggccaagctggtctcgaactcctgacctcaggtgatccacctgccttagcctcccaaagtgctgggattacagatgtgagccacggcgcccggccttgatcatatgattataatgggatcatatgatgtattgtgtctggcttctttcacttagcataagggaaagtaagttttagaggttcatctatattgtagcatgtatcagcacttcattccttttttttttttttttttttttttgagacagagtttcgctcttgttgcccaggctggagtgcaatggtgcgatcttggctcaccgcaacctctgtctcctgggttcaagcgattctcctacctcagcctcccgagtagctgggattacaggcgtgcgccaccacgcccagctaattttgcagttttagtagagacggggtttctccatgttggccaggctggtcttgaactcccgacctcaggtgattcgcccacctcagcctcccaaagtgctgggattacaggtgtgagccaccatgcctggccactccattcctttttatggctgtgtaatatttcattgtatgtttatacaataatttgtttatctattcatccacacgtgggcaatttgggctgtttccaccttttggctcttgtggatagtgctgttaagaatttgtgtgcaccgtttacctatgtaccaaacctacacatcctgcatatgtaccccggaacttaaaataaaaagaaaaaagaatatgtgtgtacatgtacctgtttgagtacctgtttccagttcttttgggtacatacctaggagtggaattgctaggttatatggtaattctgtttagtttttgaggaaccaacaaactctttttcacagcagctgaaccactttttacttataccagcaatggactaaagttctagtttctctacatcttcaccaaagtttgttattttttttattataaccattcttgtggatatgaaatagtgcctcactgtggttatgaaatagtacctcattgtggttttgmcatgcatttctctaatctctaatgatattgatcatcttttcatgtacttgttggttagttgtatatcttctttggagaaatgtctaagttctttgtctattttttaaaactaagttgtttgtttttttgttattgtaagakttctttatatattctggatactagacatttatcttttttaaaaacattttggggcaaacctttcttgacttaaaaatcacccactagcctttaamtatacctagctctttcatgtctcagcctgtgctcatgcttttctctttgtctagaatatccttcttttctctggtggttgaaattataattgttcctcaagactcagctcaaatgtcacttcctccgagaagctctcttaattggtttctcctccttcttccactagttaggtgctcccttctatgaacatctctataatgggacaccattttttttgtttgtttgtttttgttttttgagacagagtttcactcttgttgcccaggctggagtgcaatggcatgatcttggctcactgcaacctctgcctcccgttcaagcagttctcctgcctcagcctcccgagtagctgggattacaggcatgcgccaccacgcccagctaattttgtatttttagtagcgatggggttttaccatgttggtcaggctggtctcgaactcctgacctcaggtgatccacctgcctcagcctcccaaagtgttgggattacaggcatgaggcaccacacccagccaatgggacaattttttattgtctgcttcaaaccactaagttatattttctagagtcagggattatatttgattcatttctgtctttagcatttagcatatgacctgacatttagtggatgttaataaatgctaaatgaaacttgagtatagactgaagacttacttgatagtaatgacaccagacaccatcactgtaggagggatcagttgcgggctgtactagatgtattcatataataaatatttaagaccctactgtgtgccagaaactctgcttggtatgcagtaaagaataatagtccctattgttttatattcaggtaggaagataggcaataaacaaggagataagtaatataatgcttggtaatcataagtgctaaaaaacaaagtaagcagggcaaaggattagagagtgatgggggtgctattttaggtagaggggtggggaaggcctctcattggatggcccttaaaatcacctcacaagggtctggatcaggaatcagaagtcttgggttcttcttctatctctgtgctttgttacttagcaaaattacttaacatttcaaggttggagtttctttgtctataaaatgggtacaagagtccctgccctggtattgtgkgagtgttgtaaggattcagtgagttaatggacattgaaagtgctttgttgtatggtgaacagcatgatgtttggctttccctttcccaagttgagaggatgagtgagcagtgtgggagccagccagatgtttccagcactttgaagacaaaaggaactggtttctgctgggagctgtcatgctagcttgcctgggacactgacttatgcagtcctgatccaggggctgagagtgaaacccatgccccaagtggttctccatgtacactggcaaaagggaatagccttgggaacttggggcctgttctgtttagccctccaggaggtagactgtggagaccactctttctctcagttcagccttatttcttgctatgtctgaacctaacccaagggagtaataattagcagtccccaagaagcttgggaggtggaggttgtggtgagctgagattgcgccactgcactccaccatgggtgacagagccagaccccatctcaaaaaaaaaaaarggggtatgtttgtataatggaatcttatttagccattaaatggagttaagtgttgatagatgccacaacatggataaaccttgaaaacattatgctaagtgaaaaggctacatattgtatgattccatttacatgaaatgtccagaataggcaaatctatagagacagaaagtagattagtggttgccagggtgtggggggagagggtaatgagaagttacttctaatggatatggggtttctttttggggtaatgaaaatattctgaaaaattagattgtggtgatgatgggacaaccttatagatatattaaaaatcactgaattataaaatctaagaggattaattatatgtcatgtgaattatatttcaatataaacatagataatttttttttttttgagacagtatctcactctgtcatctagactggagtgcagtggtgcagtcatggctcactgcagccttgacctcccgggctcaaccaatccttccacttcagcctcccaagtagctggggctatagacgtgtgctagcctggccaatttttgtattattattattattttttgtagagacagggttttgccatgttgcctaggctggtcttgaacccctgggctcaagtgatctgcctgccttggcctcccaaagtttgggattacaggcatgacccatagtgctctgccaaacatacataatttgagtttgctragaactattggtttaacacaattgtagataattataattttcttttctgattggaagtcttctcccggtacttcagctcacaaaggtggacacattccagttttattttattttattttatttattttatcattttatttttgagacagggactcgctctgttgtataggaggctgaaatatggtggcacaatcatggctcactgtagccttgacctccttggctcaagtgattctctcacgtcagcctgctgagtagctgggactgcaggcatgagcaaccacacctggctaatttctctattttttgtgtagacaaagtcttactgtgttgcccacgctggtgtcaaactcctgggctcaagcagtcctcccgcctcagcctctgtaagtgttgggattacaggcgtgagccactgtgcgtggccccattccagttttcgatgtgagtttgagcatgatcgtaggcaagggcccatcaatgaaggtgttgaggatatagcattgtcctgctttggctcaaggggacttttcctgcctttgattaaggattrgcatgggtgagtcatttcccatagtctgagggatgtgggatataaagaatgaattgttatctccgatgatatcttgaatatcacayattataggccaaatataggtgctaaaccatttggcttgaattctttatagaaaattcactgggaacccaatgataaaatagagaaagacggataacctaagagggaggagcaatctggtgagacattcttttcaccttttcacacatgagcaattaaaaacttgagggaagttgattttttttttaactctgtaaatagctactggtataattccttgaggctggtattgtattttgtgctataagaagagagacttggctgggcgcggtggctcacgcctgtcatcccagcactttgggaggccaaggcaggcagatcacgaggtcaggagatcgagaccaccctggataacatggtgaaaccctgtctctactaaaaatacaagaaattagccgggtgtgktggcaggcacctgtagtcccagctactcgggaggctgaggcaggagaatggcgtgaacctgggaagtggagcttgcagtgagcagacatcacgccacctcactccagcctgggtgacagagcgagactctgtgtcaaaaaaaaaaaaaaaaaaaaaaaaggtcttatttggccgggtgcggtggctcatgcctgtaattccagcactttgggaggccgaggcgggcggattacgaggtcaggagatcgagatcwtcctggataacatggtgaaaccccgtctttactaaaatacaaaaaattagccaggtgtggtggcgggtgcctgtaatcctagctactcaggaggctgaggcagkagaatcacttttcactcaggaggcggaggttgcagtgagccgagatcgcaccactgcactccagcctggcgacagagcaagactctgtctcaaagaaaaaaaaaaagaagagagacgggccatatactcaaggagtttccaaatatatccagaggtgaaacaaacatctaggatgaaaagggtccagggactagtattgtacacagtcagaggaggtagagggctgtgagtttggtaataagagaggaggcttgggaaacccagcctgagtctaggtccagagggcagcatgcactgggtgagggcctctagggagagtaaagcaggatacattcttgtccttatacttccttccctgtttctgtacctgctcacttttgcyctgcaacaaataaacctttaagcatctgttctcagcctggccttgcactgggcaaaactggaaacatgggcattatgaaacctgggccatacatctagaagtgcttaatatattgtgagaggtgaacctggaaacaatggactgtaatggcatgggtcaaggtatgtaatagacagagatggatttgatatatcagagtgccgacctactgactctgtcttgggattaggtaaacctacctttaaaaaggcattgagacagggcctggttagagaaacctgttaaggttattgccagaagatgaagcggaggtacagaatgctacttttggggtatggctgctttagggcctttcatttcgttttcagatttgatgaaagaatagggcatctgtggccaggcgcaatggctcacaccagtaatcctagcactttgggaggccgagacgggcggatcacgaggtcaggagattgagaccatcctggctaacatggtgaaaccctgcctctactaaaaatacaaaaaattagccggacgtggtggcatgcacctgtagtyccagctacttgagaggctgaggcaggagaatcgcttcaacccgggaggcacggaggttgcaatgagtggagatcgyaccactgcactccagcctgggtgacagagtgagactctgtctcaaaaaaaaaaaaaaaaaataggacatctgtgtccaggaatctttttatctccccaccacccctcaagcagtgctgggctgactgcaraaggctcttccctgttctgcacttgttccatttctgtttttgaaagatgaagcctgggaggtgccagagctatgccagctgctatggggccagaaacaggtgaggcttttaggtctgcttgagttaaggagtgaggggtttgtcctcttcagctagcttaaggtctctgctatgaaactagataagtattcacatagcttgtttttcatttggggctattttcagccttggaggccagcaaggtgaatgattgagatgcttttatggggttcaagcttttgctagatcctatttgccaggataggtgctcagccattttccaggacatcagcttttctgaacaagcagcactgaaaggaagaagcacttcccttttctttcagggggcagtataggaaatgtgagggtgggtggtcagtttaatattataacccaggttttaagtagagaggctgtatagtttggaacattgccatatastctttttttttgaatttttgagacagagtctccctctgttgcccaggctagtgtgcagtggtgtgctttctgctcactgcagcctccacctcccagattcaagggattttcctgcctaagcctggagattacaggtgcacaccacctgggattacaggtgtgcaccaccatacccagctgactttttgtatttttagtagagacggggtttcaccatgttggccaggctggtcttgaactcctgacctcaagtgatccgcccgtgtcggcttcccaaagtgctgggattacaggtgttagccaccatgcccggccgccgtgtagtctttaatgcagttttgagggactcatctgaattgttcttgtgtttttcttgtcatcttgactgccaggctttactatgggggtggagctctgtaaatgtatagatctgctgctgtccagagacttgatctcttttgtgcttgcacacctctagggctaacaaagcagatggagtggcctgtacaaagaggtgatgcatcagtggtctgtatccaggagtgttcttgggagttccctgtttagtgagtgcttactatgtgccaggcagctgtggcaacagcagtcatcatactagatgctgaggttttatcagagatacctaaggcaagatcattatcttatccctgaggcccaacaaataaatatttgttgtttaataaatgttgatccaaggaataaactatattttaaaggaacccagacacagggggtgtgagaaggaagctagcagtcattgaatgcctactatgtgccaagtactgtgttaagtgctttcacagatatttaatttttttttttttttttgagatagagtctcgctttgtcgcccaggctggagagcaatggcacgattttggctcactgcaaccttcacctcctgggtccaagcgattctcttacctcagcctccagagtagctgggattacaggcacacgccaccacatctggctaatttttttatttttattttttagtagagatggagtttcaccgtggatacttaatttttaatacggtcttctgagattgttaatgttattgatatctttgagatggacaaaataagaggttaaattacttgttaaagtcactttctattagccgtatctaggcgcttttttgagggtctggcctctaggtttggtagatgcctaacagggtaaccttgtttttagtattgttgggtgagtggggctagtctgagtcttttcaaagttgcaggagatgcagttttctaggcttggtgctgaaaatatagataaggataatataaggtacataaactggaagaattactattgagtggggagacaggtaaataggcattacagggtagtaaatattaagcaaagacgggcctttttactttgtgagaggtacattgggcagggacttttactctgagacttcaactcttgtccttctttccatacctgtagctcctcattgggatctcccttattccctgaccatgtgtttcgacagtttcatgagtgttactttttcatcaagattgcttactccttgagactagatattctttttttctttcttactgcctcttagatatctgacctaggccatcacgcttaccctctctggaccttagtggcattatctgtaaaacaagcctaatgataggtgttttgcaatctgagagcaggggccagtccaagtggtgatctctggaggttcatctagtttttccaaatctgtgatttctgtgatcatcctcttttggtccttatatagagctggatatccaagaggctttaagtttgtcacagagattgctgaaggtaatttatggtacctcagaagtcttaagaacttttctgtatcacccctgttagagctacatacccagtagcactgacagagactcatggcttctcctggccagtcccttggactgaaccagttttctcagcctggtatggaagatttgactgaagttttaagctcaaaaggatattgtggccgggcatggtggcacacgcctgtaatcccagctactcaggaggctgaggcaggagaatcgcttgaacctgggaggtggaggttgcagtgagccgagatcacgccactgcactccagcctgggtgatggagcaagactctattgcaaaaaaaaagaaaagcatattgtatttaagtgtattttctagtatggcttatctcattatcagctaggtcaactagaggtagtgctttcctgattttgcttctagaaggcattctttgagcagtgggataggaccccatccttaggactttcacctctccaggtattgggccagaagtctaaagctccatgaaatactgtttatgtacaataccagcttgagctctaaacttgtaaaagaatcaactttgatatgacttagggtcccatgggacctaccaggaagtcacaggaactctgagccacagcgaagtccaccactaattagacagttaataataatgctaattgttatgataagaaatgtatgttgaatacttatatgtcaggtacaattacatatttatttaattctcacagcagtcaatgacatagatattgttattattctcattttgtagatgaagaatctaaagtcatgtgtctagtaattggtgcaagtaggacttaaacctaattagaaatttcatgttctaattccaaactctattttttttattgttttaaataaaaaaaattttatttttcatgttttttttttgagacagagtctcgctgtgttgcccaggctggagtgcagtggcacgatctcggctcactgcaacctctgcctcctgggttcaagtgattctcctgcctcagcctcctcagtaactgggactactacaggcacatgccaccatatccggctaatttttagtggagacagggtttcaacatgttggccaggctggtctcaaactcctgacttcaggcgatcttctcacctcagccacccaaagtgctaggattacaggtgtgagccactgtgcaggctcactattgtattttaattatttactttgatatcctcctaccagattttaaattgccagaaggcaggggctgttactcttcatttcattaaaaaaagaagtattgagttatggcttacatacaataaaatgaattaaatgcttgatgaatttttaccaatgtgtttatctatgtaaccaccacctagatcaagatacatttctgcatctttctagagtgtagcatagagatgagcaaacattttctgtggagggccagagagtgaatattttaggcttgatgggctataccgcaagttgtagcaggaaaacagccatagataatatttaaatggacatgtgtagctgtgtctaagaaaactttgtttacaaaaacaaggtgtttgggctagatttggcctgagggcctcagtttgctgatcccttgtctagcagagtgtctaaggacaaaatagaaattyggtaaatgtttgttgaattgtagacaaagaccttgatttcagaaatctcttcttgattttctagcagtggggcagcttgtatctccatggtagggctgtactttgtttttatttattttttatgttttatttatttatttttgttatttagtgtttatttcataatcataaacttaactctgcaatccagctagtcatggaagaaaacagagaaaacatggagcccaaagggaactgcagcaagagcacaaagattcaaggatactgcgagcaaatggggtggaggggtgctctcctgacctacagaaggaatggtctggtggctaagataaaacacaagtcaaacttattaagagttgtccacagtcagcagtggtgatcttcttgctgktcttgccattcctggacccaaagtgctctatggcctccacaatattcatgccttctttcrccttgccaaagaccrcatgcttgccatccaaccactcagtcttggcagtgcagatgaaaaactgggaactgtttgtgttgggtccagcatttgccatggacaagatgccaggacctgtatgctttaggatgaagttckcatcatcaaatttctccccgtagatggacttgctgctagtgccattatggtgtgtgaagtcaccaccctgacacataaaccctggaataattctgtgaaagcaggaacccttataaccaaatcctttctctccagtgctcagagcacgaaagttttctgctgtctttggaamcttgtctgcaaatagcttgaaggagacatggcccaagggctcgctgttgacagcaatgtcgaagaacacggtggggttaaccacggctgatagtacggggctcccggcagcagcagcatctgcaaagacttttatgttttatttttaatagagatggggttttgccatgttgcccaggctggtcttgaactcctgagctcaagcaatccacccacttcgtcctcccaaaatgctagggctataatgttgagaggttctttgtggaacaggctgccttttgataagttgtttgtgttcataagggaataaaaatgtcatcccttccagtactctcccaattttgttggtgcaaggtcttcagaatatttgggatccatgaaaacaatatagagggatgtttgtatgaatcccctaaggctattatgtgttatttattttgtccttggtgcctagccagcatagatggacagggatgctcagtaaatatttgtttttgaatgaataaatgaatttaaattgctttcagtattttaacaagcctaatggaaattgtacatttacctacaataaaagtgtctttgattttggtttcaattatacaagttttgtgtgaacactagtttgctcatgccgattagttctttgactggcagttgatggcatcataggacataaacctacccagtgagtgaatgaccttggacacaagtacacagccaaaataaccaactggtagcagagcctggtgcatgaatatctacatgtttacttccactttcttgctcattagcaatattatttgtatatggttgataattgtatatggttggttaaaatctgggtcaacatttttttttttttttgagacagagtctcgctctgtagcccagtcacccaggctggagtgcagtggcgcaatcgcagctcactgcaacctctkcctcccgggttcaagtgattctcctgcctcagcctcccaagtagctgggattacaggcatgtgccaccatgcctggctaatatttttattttttgtagagatggggtcaatatcaatatccaaataaggtctacatcatgttgattgatctaaaccttcagtctcttctgggactacaggcacgtaccaccatgcctagctaacttttgtattttttgtagagatggggttttgccatgttgcctaggatggtcttgaactccggagctcaagcgatctgcccacctcccgaaatgttgggactagaggtgtgagccaccacgccaggccaatttgaactatatttgaaaaagagggttccattgtttaaaaataagtcttggaaactatagtattgtagctgttctctaacagcaccaattatgacaggaaccaggaactatgaagtggggacagtgactgtgactaacttgtaatatgttttaaacttttttttacttcctcatatttgttgtttttggcttacattctttctcaacccaacagttaaactcttacaacaaaaagggccccgtatgttttcacttttgaagggagagattggtggactgtcttaccctagagccaggcttcaggcttgggggcgggagtcccaaggggtggagtggggggttctgctttgatgagcaaaggaagtggttaagtccctggggcctgtgcagcctgaacaagagcccaaaagtgaccttgggagcatctaagactagacgctcttagcagagcatgggtcccttttccttaccccttattccatagcctacaggttctctttcagttgtccaaagggcctggctggtcaggctttagttgagtcacatccgacatgttccagacccagggtcctggtagctgtgtttagggctgattcctaggaatcatgagctgataacctcaggacaaagaatgaagggtatcttgtttttaaccgtgttcttttttcttttcttttttttgagacagggtctcgatttgttgcccaggctggagtacagtggcacagtctcagctcactgcaacctccgccttccgggttcaagcaattctcctgcctcagcctcccaagtatctggcattacaggcatgtgccaccacgcctggctaatttttttttttttttttttttttagtagagacagggttttgccatgttggccaggctggtctcaaactcctgacctcaggtgatccacccgcttcggcctcccaaagtgctgggattacaggcgtgagccaccgcgcccggccgaccctgttctaaggaaggccaagggcaggaacctcttagcaatagctttggctgatccttggccagcaatacatttgtcactctggccaagagaagagctgctgtggagcacttggtgttctctagcctttgtggaggtcacaggcaaacagggcaggggagcaaggccttaattacttagggactcctggagcaaagccacttggcagtgtctcagcttcwtggtrggactggctccttctcctagtgacagtgcaaatactccttccctttatagcttttaaacctccaagagattggtcttcttccttgagcttcaagacatttctatgcagtgtggttcagggctgattttaaaagccggataggtggaatgacaaaaattccttccatctgtgtagcactttttggtcacttacccacattttatttagtttcaaaccaacggtcctgtgagttgtaaatgaagagattaaagcccagaaaggagatgcacttaaccaagtttatatagctaattcggctctgggttccgggaatagtgttctttctttctctctctttctttctttctttctttctttctttctttctttctttctttctttctttctttctttctttccttccttccttctttctttctttctttctttctttctttctttctttctttctttctttctttttctttcttccttccttccttccttccttccttccttccttccttccttccttccttccttccttcctttctttccttccttctttcttttctttctttctttctctttctttctttctctctctctctctttcttttcttttctttcttttctttctttctttctttcttctttctttttttttgagatggagtcttgctctgttgcccaggctggagtgtagtggcgcgatctcggctcactgcaagctccgcctcccgggttcacgccattctcctgcctcagcctcccgagtacctgggactacaggcgcccaccaccacacccggctaattttttgtatttttagtagagacggggtttcaccatgttagccaggacggtcttgatctcctgatctcgtgatccgcccacctcggccttccaaagtgctgggattacaggcgtgagccactgcacctggccggaatagtgctctctctctaccattatatgtgggacaaggggaaaggagaatggtaaatacagttattttatgtactaggcaatgggtaaggtgcttagtttagttttctcacattttgtggtaatttattttttaatctctattttaatgttagggaagctgagcttcagagtagttgacttactcacgatcatagagctaagtggctgagcctggattcagatctaagtctatttgacttcagaacccatgtcttttcatcattatactatattcctcgatagttgtttattctgaaacatcttgattgagctgccgatgcaacactaggtagtgtcacaagggatgcaaggaagcataagatttagtaatttcttccctcatggaatacgtaatttggtgatactgctatggcagagacaatggtgcatagggatagatagagacatggggcagtgggagtttagggagccccccaaataattggtggtgggggaaattgtcagagaaggctttccagaaaagttggtaccttagcttctctagcgataaagagcatgggtccttggggtcagcttgcctgggtctcatcactatagtactatatgctagctatagtgctttggggaagttacttaatgtctctgagcctgcttcctcatctataacatggaaattattataaaatcaatctcatagagctgtgcgaagattaagatgagataatctatgttgaataattagcagccagcttgacacataataagctctcattaagtgttaaccattataattatcactgtctaatctgtttttctcccatatcctgctcaagtggggacaaatgtaggctctcttagggcctgttattgtcaataaagtagaggttttgtctagagtgatttcaaaatatttctttcaggcccaagattctgtcaaagtaaaaactactaagttaattgtttccaggagggcagctgtcaagttactttgtatcttgtggcaaccaaatctggcttgagttccataaagccagctctggtgagttgctggaaatgctacctgataaaggctcttctttcctctgctgcctcttcattggattgactgaaagctggcctcttggaatactggtctatttctcttctcttcctccaagcttattgygatggagaagatgatgtaattttagtagtccaggtattctctactacttttgggtcctgtctattctgggtaactgtggaatagcagtacctttatatatttgtacagtgctttttgtttgtttgtttgtttttatttttttattttattattattatactttaagttttagggtwcatgtgtacaatgtgcaggttagttacatatgtatacctgtgccatgctggtgtgctgcacccattaactcgtcatttagcattaggtatatctcctaaagctatccctccccccgccacgcccaccccacaacagtccccagagtgtgatgttccccttcctgtgtccatgtgttctcattgttcaattcccacctatgagtgagaatatgtggtgtttggttttttgttcttgcgatagtttactgagaatgatgatttccaatttcatccatgtccctacaaaggacacgaactcatcattttttatggctgcatagtattccatggtgtatatgtgycacattttcttagtccagtctatcattgttggacatttgggttggttccaagtctttgctgttgtgaataatgccgcaataaacatacgtgtgcatgtgtctttatagcagcatgatttatagtcctttgggttatacccagtaatgggatggctgggtcaaatggtatttctagttctagatccttgaggaatcgccacactgacttccacaatggttgaactagtttatagtcccaccaacagtgtaagagtgttcctrtttctccacatcctctccagcacctgttgtttcctgactttttaatgattgccattctaactggtgtgagatggtatctcattgtggttttgatttgcatttctctgatggccagtgatggtgagcattttttcatgtgtcttttggctgcataaatgtcttcttttgagaagtgtctgttcatgtcctttgcccactttttgatggggttgtttgtttttttcttgtaaatttgtttgagttcattgtagattctggatattagccctttgtcagatgagtaggttgtgaaaattttctcccattttgtcagttgcctgttcactctgatggtagtttcttttgctgtgcagaagctctttagtttaattagatcccatttgtcaattttggcttttgttgccattgcttttggtgttttagacatgaagtccttgcccatgcctatgtcctgaatggtaatgcctaggttttcttctagggtttttatgattttaggtctaacgtttaagtctttaatccatgttgaattaatttttgtataaggtgtaaggaagggatccagtttcagctttctacatatggctagccagttttcccagcaccatttattaaatagggaatcctttccccattgcttgtttttctcaggtttgtcaaagatcagatagttgtagatatgcggcgttatttctgagggctctgttctgttccattgatctatatctctgttttggtaccagtaccatgctgttttggttactgtagctttgtagtatagtttgaagtcaggtagcgtgatgcctccagctttgttcttttggcttaggactgacttggcgatgtgggctcttttttggttccacatgaactttaaagtagttttttccaattctgtgaagaaagtcattggtagtttgatggggatggcattgaatctataaattaccttgggcagcatggccattttcacgatattgattcttcctacccatgagcatggaatgttcttccatttgtttgtatcctcttttatttcactgagcagtggtttgtagttctccttgaagaggtccttcacrtcccttgtaagttggattcctaggtattttactctctttgaagcaattgtgaatgggagttcactcatgatttggctctctgtttgtctgttattggtgtataagaatgcttgtgatttttgtacattgattttgtatcctgagagtttgctgaagttgcttatcagcttaaggagattttgggctgasacaatggggttttctagatatacaatcatgtcatctgcaaacagggacaatttgacttcctcttttcctaatcgaatacccttwatttccttctcctgcctaattgccctggccagaacttccaacactatgttgaataggagtggtgagagagggcatccctgtcttgtgccagttttcaaaggsaatgcttccagtttttgtccattcagtatgatattggctgtgggtttgtcatagatagctcttattattttgagatacatcccatcaatacctaatttattgagagtttttagcatgaarsgytgttgaattttgtcaaaggccttttctgcatctattgagataatcatgtggtttttgtctttggctctgtttatatgctggattacatttattgatttgtgtatattgaaccagccttgcatcccagggatgaagcccacttgatcatggtggataagctttttgatgtgctactggattcggtttgccagtattttattgaggatttttgcatcaatgttcatcaaggatattggtctaaaattctcttttttggttgtgtctctgcccagctttggtatcaggatgatgctggcctcataaattgagttagggaggattccctctttttctattgattggaatagtttcagaaggaatggtaccagttcctccttgtacctctgcctaagcaagcctgggcaatggcagacgaycctcccccagcctcactgctgccttgcagtttgatctcagactgctgtgctagcaatcagcaagactccctgggcgtatgaccctccgagccaggtgcgggatacaatctcctggtgcgctgttttttaagcccgtgggaaaagcgcagtattgrggtgggagtgacccgattttccaggtgccgtctgtcgyccctttctttgactaggaaagggaactccctgaccccttgcacttcccgagtgaggcaatgcctcgccctgcttcggctcgtgcacggtgcgcygcacccactgtcctgcacccactgtctggcactccccagtgagatgaacccggtacctcacatggaartgcagaaatcaccatcttctgcagcgctcatgctgggagctgtaggccagagctgttcctattcggccatcttggctcccgacctgtttgtttgttttttgagacagagtctttccctctattgcccaggctagagtgcaggtttgcgatcacagctcactgcagccttctgggcacaaatgatcctcccacctcagcctcccaagtatctgggactacaggcacaccccgccatgcctggctaatatattttttgtagagatgggttctcactctgttgcctaagctggtcttgaactcctggactcaagcagtcttcccacsttggcttcccaaagtgttgggattacaggcatgagccactgtggctggcccaatgcattgttttaagatataatgagtgtastggctaggcacggtggctcacacctgtaatcccagcactttgggaggctgaggcagtcggatcacttgaggtcaggagttcaagactagcctggccaacatggcgaaaccctgtctctattaaaaatacaaaaattagccgggcatggtggtgtgcgcttgtagtcccatctgctctggaggttgaggcaggagaattgcttgaacccaggaggcggaggctgcagtcacaccactgcactccagcctgggcgacagagagagactcagcctcaaaaaaataaataaaataagtgttcttcagaatgtcagtatcaggtgaaatggcattattattattactcagtaaaagacctttgagattaagttaggaaaagctaggaggctttaatatgataaggaaaggtatacagggttttctatgtttttctgaacatgtaatctttttttatcctcaaaaaccacctattgacattttgttagataccagtgttccacagaacaccattaggtaaatgaacacagtgtggtcccctgcttttctattagtatgacttggagaagtagtatggccagctgtcctttagttgacaaggtacctccatggctccttttcaaagagaaaatgagatacttaatgacagcttatgtgtcagaaaatctcctaagtgtttaacatagattacatctttgtgttcacaatagctctatgagattgctgatatagttttctccatgttgttgttgtagaaaggtatagatcttggttaatccaccagtccctggttatgtctcagactcagtggtaggagatttagctaactgagcttttattgtttgcctaagccttcttcatttttttcttttgagatagcatctcgctctgttgcccaggctggagtacactccagcagtgcagccacagctcactgcacccttgacttcctgggctcaggtgatcctcctgccccaggctccagtctcctgagtagctgaaactacaggcacgtgccacgatgcccagctaatttttgtattttttgtagagacggggttttgccatattgcccaggctggtctcgaactcgtgagctcaagcaatcttcctgccttggtcccccaaagtgctgggattacaggcatgagccaatgtggctggcccccaacatttcttaaacatttattgttcttgggtaatggagatgtagtgatggaaaaccagacactgcctcatggaacttaatctaatagagatgattagatatgagtgtggaagtataagttacacattgggactttagaggttaagggaaggcagatatttttatgagttactgtagcttcctgggatggtgtgacttaactaatccctaaaactctgtttaagtttatatactgcagaagcttgggaggcatttagattggaaaatgacytgagtgaaaataggagtgagcagagagcagcgatccccaatctttttggcaccagggatcggtttcatgcaagataatttttccacagaccagggtgcggggtggggatgattttgggatgaaactgtttcacttcagatcatcaggcattagattctcataaggagcacgcaacctagattcctcgcatgtgcagttcacaataggctttgcactcctgtgagaacctaatgctgccactgatatgacaggaggcggagctcaggcagtaatgctcgcttgcctgccgctcacctcctgctgtgtggcctggttcctaacaaggcacggactggtacrgtctgcagcctgagggttggggacccttggcatagggaatagaatgctcaggagaaggtggtatcctgtactgctcttaggcatgacaccacctgtgagactgctgaaggcgttaatttctggccagctgaaggtagcattgccagaaggaggagctgggcagattgcaattggtgttgtggatagaggcaaaggatcataaatgatcgtcagaagggagctggtggattatggaatgtgaaatgggacagggcaacatttcatatctcaggctatgaatgacagagggacttggaacctgaacatgtttatatataatttattaagttcttaccatgtgccaggtactattctttgcatttttaatgctaagcttatttaatttttattagtagtttattcagattagcttatttaatctttgtaccaaccctatgaaagtaggtactattattttactgttttaaagatgggaaaactgaggcctagagaactgaaataatttgcccaaactcacatggctaataagtggtagaggtgggattcgggcccaggtaatatgttttcagtgtgcttgttcctaatcactctggtttacagttttaagcaatgagaagtcattatagatttctgcctagtgaagcaacttgtttgtaagtattgtgatgcagggcaatttcccaagccttgatggaaggcaagaagaccagccacagggtgttgtagcaaccatcccagttgctttggaagatgtataaaggtcttggagttatttcacaaattacttcctgagatggctctgtcagttggcagtcctacctgtcagctcagcccattttagaaatcattttccaaagaattttaaccttaaggaagctctcctctttctattgaacaggctgtaccaggcataggggccccaggaaccaggtaggaaatagctcttgtggggtcagtccatctggaagcatttgcaagaggggaagttgaaactattgagacttcctgttgtcattagaatttgctctcctgctatagggggagtatcccctgttaggactgatagtctggttgcttatcttgagaggctgggcaagtgggttggggtgcagagatgtgaaagacatagtctgtgtccatgaacaacctgcaggttactgagacacccataaacaagtgcactctgtacagtgtcacaagtgctacaatagaggtacatagaaaatgtcctgggaaaggctgggcttggtggctcacgcctgtaatcccagcactttgggaggctgaggcgggtagatcacgaggtcagcagttcgagaccagcctgaccaatatggtgaaaccccatctctactaaaaatacaaaaattagctgggtgtggtggtatgtgcctgtaatctcagctagacaggaggctgaggcaggagaattgcttgaacccgggaggcagaggttgcagtgagccgagatcgctccactgtactccagcctgggtgacagagtgagactctgtctcaaaaaaaaaaaaaaaaaaaaaaagaaaatatactgggagagaaaggaaggagggtctaaatacttagcaatatcaaagatgccaccctgtaaggatgaccagggttgtgccagacagagtgccctggagcatattctgggcagtgtgactgtggaagtgcatggcatattcagtgaatgacgagttgttccctgaactggagtgttggactacttggagggagtggcacgagatgaagctgggtgtgtgtgaagggccagatcccgaatgaccttgtattttatggtaaagagcttaaatcctattggagttaagctttaccgtcgatatttaagatgggtgtgacatggccagagtgttttttttaggaagacctcttatatgcctgtgcttagaatgtatagattataactagaggcagggaaggcagccagaagatttgcagtagcagatgatgaggctggaacaagggtagtggtcatgggggttgatttaaattgtgtgacggaaggatgaaggaggcagtgttaggtgactgggcattactgtgatgctgttaacacatggaatacaagagagagagccrgggaagttaatgctgctcttgagatggttatgggtgatatccatgagaaaatatctggtagttgggggagaagacatgagttttggagttcctgagagaggtaggaatagacatgagagaatcatgaactctaagaaatagtagagactgtagaagtagatgagatcacctgagtaaaatttataaaatggggaaagaaagggggttaaggatagagcagagaggaactctgatatgtgtggacagaaaagttagggagggagcctgaggaggggcaatcagagaggcaagagaaagtactgtctgggaagccaggaatgagaaaagtttctaaaagaaagcaatagtgtctgttgcagcagagaacaggtagggtgagcctgaaatgaggctactgagtcattggtgaccatggtgacagcagtttcagtggaggggtggggacagaagctagactgctgtggcttagggagtcagtatgaggcaaagatgtagaacaaaagacttttttgagaaatatagttgcgagggaaggaaggaaagagggtggtattttgaagaggcagcagaggaggcaggttcaaagatttttttttttttttaaaggtggaggggtggagtggagacctgagctggtataggttgtggggagaagagattgagaaatgtagccagtgaaggtgccacatctccctgaatacttcatactattgtgggagtcttaaactgtgctgctctgctgaagcctgcggtcactagagcatggggcagacaagggagaccttgtcattcataagtaatcattgcaccatttattgagtaaccgctgcatgccaggcatttttctagatacattagacacatctctgatgctcaccacagttcccagaagtgagtattgtccctattttccaaatgcagaaacagatgagttaagaaacattcagctagttagtggtggagccagtttcagccaggtttctggaactgcatgatgtattctttctgcttcccagtgctattttttttccattaaatggagcttaatgttgaaactctaaagagggcccttgcagggggcagggtgggtggcctagagggacaaaggtagagttctggggctagtgctagcctggagggaacatgacttaatatctgggatgagggaggagggtcttggtctggccttgctctaccttttctttacttaccagtggctctggtggtttcaggcttttactctatttttctgcatctttctgtaacttcttaccagggcccctgaggccctagctgctgtgtgctatggactgttacagaggaaaaaaagaatcagcttccaggcccagaggggcttatcctttttgacaaactactcgtgaggaattgctgagctgtaggatgcactctctttggcacagtggtaggcttcttcctaagtatttttatttgagttgaataattttgattcagtggaaagagcaaaacactgagaattagaagacatgatttccagtctaagagatgaactaggttacctcaggcgagtcattctccctttgcatatttacttgatgtaaggtagggactgtgttttactcatccttgtatcctgagcagctagcatatgccctgactgaataggtgtcctgaataagtttattatggagctagttaatctgctcttctattaaatgagaaaattggaccttttgatttccaaagatttgccaattctaaagcgtattgttctgtgagggcttatgatgttttaattataaaataatatatactgtcacttagcacctactatttgctaggcattgtgtgaggttctttacatatttattttatttaggtgatttaaaaaaatttaaattttgtctaggtgctttagaaatactatggtcccttaggctataagctccatgaggatagtaccagtgcctgttcactgctgtaaccctaatgctgagcacagtgctaggcatgtaatggatgctcagtaagtttttgttgaataaagcaataagtagatgtcttaccatcgataagataacaatcttttaagataggtactattagtaccatcgtatagataagaaaattgagggtaaaaggtcacagaactagtaaatggctgagagagagaagattcaaacctaaatccaactctaaaattggtacctttactacttaacaccagcgtgccttcacttatctgatgttttaattgcaaatttgaaaagaaggacaacagtaaagaaggatacaagatcagaaaatcaaatttttcttgaggggtggggacagggttagaggttgggcactgaagtttagaagttggcaattatctccaataccttaagaataaaaaggggtttataagcttgggaagctgggggaaaaaacgaacaaaacggggttataatggcagttactattcactgggagctttgtttattgaatatctcatggcattaaaagtccacttacataattttaactatcatctatttattgacaactcaaatttgtgtttccagcttagatttctccctgaattttagacttgcatatctaacctcttaattaacattttagatatctaataggcattttaaatttaacaagtttcacttacatggaatctgtcagcatatcctgtcggttctacctttaaaacaaatccaacattcagatacttttcattacctctgcacctaccaccctgatccacgttaccatcgtctcttgcctggtgagataatagcctaactgattgccctgcttttgcccttgcctgtctacagtttattctaaacaggaagccggagtgatcctttcaaaacgtaaatccaaattatataactcttctgttcaaaattgttcagtggctttacatatctctcagggaaaaagccaaagcccttagagtggcccacaagatcacatatgacttggctcccagttactgtcttagcctcatttcctctccacctgctcaccctgccccactggctttcttaccattctttgaacaatagagacagacatactcttgcctcagggcctttgcattggttcttccttcttactctaactttctgcatggctcatgccttatttccttcagatcttttggtcaaatktcaactcagtgaggccttatccaatcattctatttaaaaatagcaatccctcccccaccacacactgcaacccctttctctatttttcattacagcatttatcaccatctggcatatttattggtcaggcctttcaccttgcacccccactccctgttagttccataagagcaggggtttttgttaatggctaaatcctcagtgctagaatactgactggtgcatatagcatatacttagtaaatatttgttgactgaatgaacaaatgattgaataacctttttgggcctggtatatttcttgatgctttatatatatttgtttacttttctgcacaacagtcttgcaggatactactattattcccattttatgaatggggaaagttatttgctggccaggcacggcggctcacgcctgtaatcccagcactttgggaggccaaggcaggtgaatcacgaggtcaggagattgagaccatcctggctaacccggtgaaaccctgtctctactaaaaacacaaaaaattagctgggcgtggtggcgggcgcctgtagtcccagctacctgggaggctgagacaggagaatggcatgaacctgggaggtggagcttgcagtaagctgagatcgagccactgcactccaggctgggtgacagagcgagactccatctcaaaaaaaaaaaaagttatttgccaagattgcatggctagaaagtttaaagcctaggtttattctgcttaatacattgtcaagctcaaataaaatgttatagaaagatggcttatggcttataaatattgttgctttgctgctgaatggagtttataaaccacaagcctagaaaccagaagaaagccgaagtctgaatttcctgaactggacattgctcattcactcacttgggagcaagctgatatttgtgactgtgacatacctggaagcctaaaatacacctggaaaaaggcctttgtgtgagttcttcctgtgcaccatttgacccatatttggcttgcatacacagaaagtgaggggggttttatgatgatttggaagtttttctcccctaccaccccagagaaagaccttctttccctagttggggatagtactagtgttactttgggccagttgcttcatgtcacttttctttcctgagttgagtgccagccaaggccagagtgcaaatcattcccaaggtatactggggtatgactttctctttggtatggtgactggggaggccaaggccagagctgatctcaaagtaagatgaaactggggtcagtgatgtctccagggtaaaatgagggtgggttcaagtgccgtcctaatagagctttgtcatttcaaggattctgtcagaaagaaggtgagagagaataaggtctggatccaactccccagctgattgggggtatgggtataacatatctccctcctaagtcccaggtaccagtaactttggggtgagggtcctggtgaagtcctgggcttatgagagacccaggcagaggaagcagaagcagatatattcagtaaggctattctcagtaatatgacagaagtagaatagtaggaggtggaaaaaaagtcatcttatggggctgggcgcagtggctcacgcctgtaatcccagcactttgagaggctgaggcgggcggatcacgaggtcaggagattgagaccatcctggctaacacggtgaaactccgtctctactaaaaatacaaraaattagcctggtgcggtggtgggcgcctgtgatcccagctacttgggaggctgaggcaggagaatggcatgatcctggcactgcactccagcctgggtgacagagcgagactccatctcaaagaaaaaaaaaaaagaaaaaaaaagtcatcttgtggtattatatggtcaataacatatgtaaagaagagtgaataatgaggtatggattagaatggcacccagagggaaatgagactggaatcagagcygttccgaggaaataatgaaaatatgagaactttccctagggtgagataagtctgtgggaaatgtgtatgaggtgacaaaatcattcccagggtgaaagaaaaaaatatgtttgagcagccatgagtaggaagggaagcataatgagagggaagaattttagggcaagatgtttaggagataaggctagggaaacaagcagatgccagattatagagagccttgtctatctgttaaggatttgcgactatattctttgggcaatgcagaaccactgaaaaatttaaaataagggatagacatggtcaaatttcctcctggtcataatgacctgtgttcctaggggagctgaggtcaggaaaggttagaaaagagtatggcagtttagggactctaggcagatgtttattgaaagccaaaagtatctggcgtatccatctgagcagagatgccagaggactggatgaarcctgacctgagtgaagtaagcagaggctttcctggacctcatcaaaaactaaggtccagctgggcatggtggcacctgcttgcagtcccagctactcaggagctgaggtgggaagattgcttgagtttaggagttcaagaccagcctaggcaacatacgacaccctgtctcttaaaacaaaaaaatttagaactaaaaacctctgtggatgcacaacactataaatgtactaaataccactgaattgttcacttaaaaatggtgaatgttatatgaatttcacctcaataaaagattaaaactaaaaacaggccgggcgaggtggctcatgcctgtaatgccagtactttgggaggccgaagtgggcggattacaagatcaggagttcgagaccagcctgaccaacatggtgaaacccctgtctctactaaaaaaaaaaaaaaaaaawtatccgggcgtggtggtgcctgcctataatcccagctactcaggaggctgaggcaggagaatcgcttgaatccaggaggcgaaggttgcaatgagctgagatcgcaccaccgcactccagcctgggcaacagagcgagacaaacagacaaacaaacaaacaagaaaactgaaaacaaactaacaaatctacaagtctcatcctgctggagtctgtgggatttggcctggatttgccttccttctgtaagggcttggtttatcagtggtagcattggggagataaggataggactaggcatagcagcaaggatgagactccaaagcatgtgtccttgtccatccttccagttggctgccagaatcttctaacaagtcaatctaactgtggcccacctctgctcagaagtctattgctttcctatttctcagagattctaaaatccaagcttctcaatctggtgttcctggcattctatgatctgggttctgcatattgtcttttcagcaaacatttttctatgctattattcatgttttccattttgcttggaatgtctccttaccatctttttaaaattgtttttgtttttttgagacagggtctcactctgttgcccaggctgcagagctcaacctcctgagctcaagtgatcctcccacctaaccctcttgagtagctcggactacaggcatataccaccatgcccggctaactttaaaattttttttgtagagacggggtctccttctgttgctcaagctgctctcaaactcctgggttcaagtgatcctcctgtcttggcctcccacagtgttgggtgtgagccaccacccctggcttgcttactcttttctatctagtaaactcctcatcttttagtacatagctccagtgtcaccactttttaagctttctctgtcctccttgcctgtaggcaggcagtctattctactgttactctcytatcatactttatatgtctcagttatcttgctgcattgtggttgctttgtatgtgattgccacacaagattggaagttttttaaagacagaaacactgctttgctgttgttgttgttgttgttttctataccacttggcctagtattgcacagagatagcacttactgattttttagagcaacttttatttccaccataaatactggtcacagaagttaaataagtaggctttgttggtattgttcagtctagtgaggctaatagggggcatctatccataactgtccttccattcccttctcctttcccttctccctaaccttctcccctcccatcccctctcctcccctcccttctcccctcccctctcctcctttctcccctcccctcccttctcccctaccttctcccctcccttctcccctcccctcccttatcccctcccttctctccttccctcccctcccctctcttcccctctcttctctctttctttttttccaagctagccatcaggtttcactgaacaataactgcaaacttcagtatagctgggtttgggaataaatttttttttttgagacggagtttcactttggtgcccaggctgtagtgcaatggtgcgatctcagctcactgcaacctccgcctcccagattcaagtgattctcctacctcagcctcccaagtagctgggattacaggtacccaccatgatgtccaactaattttttgtatttttagtagagatggggtttcgccatgttggccaggctgttcttgaactcctgacctcaagtgatccacccgccttggcctcccaaagtgttgggattacaggtgtgagccaccgtgtgcagccaaatcatttgtttaataagacaaaatataaaaaaaactgaggtaatatgaaagagattcttagatgcctttgccaatgtgggctctctcattctttatttaatgatagaacacctgagttttagcaggatgcatagctgctcagcttcctttgcaactaagtgtggccacatgtgtcagttctatctggggggtgaggatccaagtggaaatsttatgtgtaccacttctatatcaygtacttaaaaacagtatgtggtgcttctctttccctttttcccttcctgctagctggaatatggtgagatctacagcaccttttttggtcccagagatggaagcctcattttgagtgagaatggcaaagtcccactctcatttgagactgctcactgcttaactattatgagagagaaataaactttttgtttaatccactgtatttgagggtctcttagttacagcagctttatctgtatcctgaccagtacagtgaggcatcaaattgctgcagtatcaagttgcttttttttttcttttcttaggacagggtcttgctgtcgcccaggctgcaatgcagtggtgtcatcaccactcactgcagccttgatccctgggactcaagtgatcctcctacctcagcctcctgagtagctgggaccacagatgggcactaccatgcctggctatttttttttttctttctagaaatgaggtctcacgatgttacccaggccagtcttgaacacttgggctcaagtgatcctcccgcttcagccttccaaagtgctggagttacagggatcaaccactgtgcccagtttaagttgcttcttgctgctgttcatgggtatctcttagtcacactatgcaccgggttcctgactgtttcttgccatgccttgcttctaagccttaattcctgatgcctggatgattccctgaactctctcatatacttaaagacattttattgaggtgaaattcatagaacattaaccatttcgaattaaacaattcagtagcatttagtacattcacaatgttgtacagccaccacttctatctagcaccaaaacatttctgtcattccaaaggaaaaccccttacctattaagcagtttctccctattttccgctcccgctggcagccaccaataggatttacctattttggatatttcatatcaatgaaatcatataatatgtgaccttttgtatctggcttcttagaataatattttggagcttaatctacgttgtaacgtgtcggtactttctttttttattattttttttggtggtaaaatrtatataaccaaattttgtcattttattcattgataagtatacaatttaattacagtaattacactcacagtattgtgcaactttcaccactattttaaaacatttttcatcatcccaaacagaaactttgtacttrttaagcaataactccccattcctccctcctgctagcctttgttaacttccagtctactttttgtcttcgtgaatttgcctattctagatatttaattaagtggaatcatataatgtttgtctttttacgtcttgcttatttcacttagcataatgttttcaaggtccatctatgttgcaacatgcatcagaaaacttcattttttttttttactggctgaattatgtgtatatatacataccacaatttgtttattcatctgttgatgaatatttagactgctatgctatggacatgctagttacatgtacttgttccagtacctgttttcaatttttttatattttttgagacggagtctcactctgtcgccaggctggagtacagtggcgcagtctcagctcactgcaatctctgcctcttgggttcaaacaattctcctgtctcagcctcccgagtagctggaattacaggtgtgcaccgccacgcccggctgatttttgtatttttagtggagatggggtttcaccatrttggccaggatggtctcaatctcctgacctcgtgatccgcccgcctcggcctcccaaagtgctgggactacaggcgtgagctaccgcccctggcctgttttcaatttttgggagtgtatcataggagtggaattgtagaattgtatggtagctttatgtttaagtttttgaggaaccaccaaactgttttccatagcagctataccattttacattcccatcagcagtgtataaggggttccaatttttccacatctttgccagtacttcttttttttttcctttttggttttgtttttaattacaaccatcctagtgggtgtgacatgttatctcgttgtggtttgatttgtgtttccctagtgactaatgatgttgatcatcttctcatgtgcttattggccatttgtatgtcttctttggagaatgtgtatttaagtcctttgtccatttaaaattaggttgttttttgttgttgagttatgaaaattccttatatattctgaatactagacccttaatgagatgtatgatttgcaaatattttctcccattctataggttgatttttcactttcttgataatgtcttttgatacactgtagctttaaatttatttttattttttagagacgagattttgctatgttgcccaggtgcatctcgaattcccgggctcaagcaatacacctgcctcagccttgcagagtgttgggattaataggcctgagccactgtatccagtctagtttttaatttttttttttttttgagacggagccttgctctgtcgcccaggctggagtgcagtggtgccatctcggctcactgcaagctccgcctcccgggttcacgccattctcctgcctcagactcccgagtagctgggactacaggcgcccaccaacacgcctggctaattttttgtatttttagtagagacggggtttcacggtgttagccaggatggtctcgatctcctgaccttgtgatccacatgcctcagcctcccaaagtgctgggattataggcatgagccaccgtgcccggcctagtttttaatttttataggttttaatttatcttttgttgttgttgtttgtgcttttgtgttgtatctaaaaaagtttgactagcatggtggctcacatgtgtaatcccagaactttgggaggctgaggtgggcagatcacttcaggtcaggagtttgggaccagcctggccaacatggcaaaactctgtctctactaaaaatacaaaaagaattagccaggtttcgtgctgcatgcctgtaatcccagctacttgggagctgaggcaggagagtcactttaacccaggaagcagaggttgcagtgagctgagattgtgccactgcactccagcctgggccacagggtgatacatctcaaaataaataagtaaataaataagattaaaaaataaaaaatctgttttcaaagccaaggttatgaagatttactcctcagttttatgggtttgctcctatgttttacctcaaagagttttatggtttagcacttatatttaggtcattgatccactttgagttaacttttgggtgtagtgtgaatttcttgaactttaaacccttgaatgtgtgccaatccagtcagtaatgtttttttttttttaattgagacagagtctcgctttgttgcccaggctggagtgcagtggcgtgatcttggctcactgccaacctctgccacctgggttcaagcgattctcctgtctcagcctcctgagtagctaggactacaagcatgtgccaccacacccaatttttttttttttttttttgacgaagtctcactcttgtcccccagggtggagtgtaaatggggtgatctcggctcactgcaacctctgcctcctgggttcaagtgattctcctgcctcagcctcccgagtagctgggattacaggtgcctgccaccacacccagctaatttttgtatttttagtagagatggggtttcactgtgttgrccaggctggtctggaactcttgacctcaggtgatctgcctgcctcagcctcccaaagtgctgggattacaggtgtgagccactgcgcccggccatttttttgtatttttagtagagacrgggtttcgccatgttggccaggctgttctcgaactcctgacctcaggtgatctgtccaccttggcctcccaaagtgctgggattacaggcgtgagccaccactcccagccagtaatgatttttaaatctttaaatcccaatagctatggaaaggtggtttggcaatgttttagtggctgttggctgaagyttctttcaataggggcattttagaagacatttcctcctcctcggatctgatccactgatgtgcatttgataggtttaggggcaactttgagagtaaggccagtgactttcagggatgccagtcagttgagtgacacacccttatgtacgcgtagtgagatgctctgctattggcttgtctgtatctcagcctgtgaggagcagggtgaggcctaattgaaacaaggcacagctggcaggggtgaggggaacaatgtagtcaggtagcaagtctgtactgagcccaggcaggttcccagccctgggtatggcttcctgagaactgtgcaaaaacagtaatgattagtgagaagatcatatggagacagaggccttgatttcaagttggatgacttaagactcgtcacttctctctgaaccttaatgtctttgattacaaaaggtgaatgctgacttcacagggtttctgtttttttttttttttttgagacagggtctggctctgtcggccaggctggagtgcagtgacacgatcttggttcactgcaacctttacctcctgggttcaaacgwtcctcccacctcagcttctcaagtagctgggactacaggcgcatgccaccatgtctggataatttttgcattttttgtagagacaggattttgccatgttgcccaggctggtgttgaactcctggactcaaacgatcacctgccttggcctctcaaagtgttgggactgcaggtgtgagccaccgtacccagccttgttttgtttttgaagatgagctgaggttatcagtggaaaagtgatttggaaaccataaaatgagatttgggaatgtaatagagaatcaaggcgaagactaagttttctgggagtttttaaaaagattctttcgtgactgtgattctcagaaaaggtytgaggcttactgactagatagttgattttcaattttttattcaaataattttgcatttgttgtgactctttcttttgcaggtgacggaaatacaattcagacagacttaaccaagagagggactttattgactgagtaactagaaagcctagaagtagttctacttttagacacagctagacacagggaggtaaattatgtcattaggactcactctctccccctttggctctgcttttctttgtactggtgtcattcttaggcaggctttctcccatgtagtggcaaagaaagatatcagatttgggtatgcatcctaacagcttattgaaagatacaacaggcctggcatgttggttcaagcctataattctagcattttgggaggccaaggcaggtggatcacttgagcccaggagtttgagaccagcctgggtaacatgaggaaatcgcatctctacaaaaaatacaaaaattagctgggcgtggtggcttgtacctgtagtcctagctactcaggagacttgtacctgtagtcctagctactcaggagactgagcttgagcctgggaggtcaaggctgcagtgagccaagatcagaccactgcactccagcctgggagacagtcagacactgtctcaaaaaaaaaaagaaagaaagaaagaaagaaagaaagatacaacataatacctctctttcctgatggtgctggtggtcctgggtatgattttggcttgggtcctatgcccatcctaaagtaatcactgtggccaggagaatactggcctttaattggccaacagagttccattctactcatggaacccaggggtcagggtcagcttccctggaaccatgtggatcgagaacaggaaagaggtggttccttaagggaagaagatcaaggtacatttacagaaaggtaggtttgggaggtagggaaatagttttaagtcaacaaaattcgtagatgtttactacataattaagccatttttgttaaaaaaagtgtgtttccaatatttaaaactcaacaaaagtagaattctacttgaagtagatattgccaggagacttggacaggggagggaaggagaggaggagtctrtagagcataatttgaaaactgctagacagtttatccattaaatatttgcttgaggtgggatagtgcttgaatcctttctttgcatctttctgacattttataatagagattgtattttccttctaatcagggagagggaggtaagtagcagagccagtcattgtctggggctgaagatgccaaggacttttcttagccccaacaccaaactgtgtttttttgagatggagtttcgctcttactgcccaggctggagtgcaatggtgcgatctcggcttactgcaacctctgcctcccgggttcaagtgattctcctgcctcagcctcccgagtagctgggattacaggcatgcgccaccatgtccagctaattttgtatttttagtagagacggggtttcaccatcttggccaggctggtctcgaactcctgacctcaggtgatccacctgcctctgcctcccaaagtgctgggattacaggtgtgagccaccrtgcccagcctgaaactgagttttttttttagaagccatgagtctttcaaatttaaatagtgactcatagagaacaggaagaagttgctttataatgtgttggttaatgtaagtgatgaaatatattcgtatcctaagcatttggcaggggctctatatggtacggtgtataaagctgtgagctggatggattctgtattataaattgagtgaggatgaaagctgccctcacgtactatccagtttaccaggcagccaacaaccattcgattttttaaaaaattgaagtaaaaatcacataacagtttggtggtggtacaggcctgtaatccctgctacttgggatgctgaagtgggaggatccctttagtccaagggttcaagaccagcctggacaacatagcaagaatcagtctgcacaaaaaattaaaaaattagtctggcatggtggcatgcccctttagccctttctactcaggaggctaaggtgagaggattgcttgaacccaggagtttgaggctgcagtaagctatgattgygccagtgtactctagcctgagtagcagagcaagacccctgtttcttaaaaaaaaaattcacattccataaaacttattattttgaagtgtacaattttttttttttggtagagatggggtcttgccatattacccagactggtttcaaagtcctgccttcaagcagtctttctgcctcagcctcctaaagtgctgtgattacaggcatgagtcattgtgccccgcccaatttggtggttttcaacaattttgtgtaaccgttaccactatctaatttcagaacattttcatcaccctaaaaagaaacactgcacccattaagcagtcacactccctattctctatcctctggcaatcattagtctactttctgtctccatgaatttgcctattctgaacatttcatataaatggaatcatgtctggtttctttcacttagtatgattttaatatatatatttatcttgttacttttctgtgatactttttttgaagtagaattatcccacagacctaccaactggtcattttctctgtccccaagtgtataattgggattgacaaactcagcagttaaagatagcacccatactggatacttgacctgttgaataagaggtgtcatagtgggaaggctaagtggaagccttggaaactaccttctgctctcctggccaagatagtgaaccaaacccaataacaccttctgggacagatggtggagagtagtgctaccctgaagtatctttttttttttattttttttaattttttttttgagatggagccttgttctgtttcccaggctggagtgaaatggtgcagtcttggctcactacagcctccaccttctgggttcaagtgattctcctgcctcagcctcccaagtagctggcattataggcacccgccactacgcatggctaatttttgtatttttagtagagacggggtttcaccatgttgaccaggctggttttgaactcctgacctcaggtaatctgcccaccttggcttcccaaagtgctgggattacagacgtgagccactgcacccgacctacccttaagtatcttaagatgcaaggtggtggtctctatcctatctatatttaattcattagtctgcccctgtaaaactggattgatcagagaatgactggacttcagtaattttgatttagcatccccaaatgtggctgccatgatggatttgatatctttgctagagcaggttatacttcgatatttggccattgatttggcaaacgcattattttctgtttcagtcagaaaaaaggattaaaaactatttgtattcatggggaacatatcagtattcctttatagttttgcctagggatatgtaaacacttctactcttatactgtttgtcataatatagtcaaaagatacctggaccatctggccatagaacatcaccatgatatattacgttgacaacatcatgctaaccagacagcattagcacactggaggccttggtaagatgtgtgtgctccacagtgggtactgtcacattctttgccaaactggatatacttggttttaaaatatgtccacaaattctttgatactctttccatcaaggggtggagtctaattcctctccccttgagctggacctcactttctattctaacaaatagaataaagtgaacatgatagtgtacaacttcagaaatcaggtcataaaaggcactacagtttcctttttgctttctctctgtctcttaaattattcactctgcggaagtcccatcaatatattgtgaggacactcaagaagcatatggaaaaggccatgtggagaactagtgtttcctgacaacaatcagcatggacttgctgggaatgtgagtgagccaccatgaaagcaaatcctccagccccagtcaaaccatcagatggctattggccttttaaaacctaagagaccagagccatagccactcagttaagccacttccttgattcgtaaccctcagaaastgtatgaaataatgtttattgttttaagcaactaaattttgggggtaatttgttatgcaattatagatattaatatacattcctacaagcagaatatgagaattctagttgtctgaccttcttttcaacatctagtatttcccttttttattttagccattctagtgagtgctaacaccactgttatcacattgtggtttaatttgtttttccccagtgactaatgtatagagcatcttttgacatatgtatgaatatctatatagacatatagatatgtatatgtgtatttaatatctggatttattattttggtgattatctggattttattatttgttcaagcctttttgcccagttttccattgggctatctttttcttactgatttgtaggcgttctttatgtatgctggatataagtcctttgtcttatatgtgtattatgaatatcttttctcagtttatcaaccttttcctccatgtgtccttatccctttttgtgccctgtaagaaatctggcctcctgggatcccatctggaaagtgcttagtattctgcctgcttcacaaagggagggaaagcaaacgtggtgaggcaccctttccattccagcttgctcggtagctggtgattggaagacactctgtgacagcgttcagtccctgggcaggaaaacctcctttaaggattcttcttccttaactgggtctgcttctttcctaaagaaaaaaaaaatgagtaataaaaaaaaaaataactctttgcaggccaggtgcggtggctcatgcctgtattcccagcactttgggaggctgaggcgggcggatcacctgaggtcaggagatcgagaccatcctggttaacatggtgaaaccccatctctactaaaaatacaaaaaattagccaggcatggtagcgggcgcctgtggtcccagctactcgggaggctgaggcaggagaatggtgtgaacccgggaggcggagcttgcagtgagcagagatcggcgccactgcactccagcctgggagacagagcgagactccgtctcaaaaaaaaaaaaaaaacaaacactctttgcctattccaagttcataatgatttccccataattttttttatctaaaagttttattgtttcacctttcccgttagatctgcaatccatctgaaattgatatttttgtgtatggtgtgaagtaatgattctaggtacatttttttccttctgtgtataaccaattgatccaacaccatttattgaaaagatcattcctgggccgagcgcagtggctcatggctgtaatcccagcactatgggaggttgaagcaggtggatcacttgaggccaggagtttgagaccagcctgggcaacatgatgaaactctgtctctactaaaaatacaaaaatcatctgtgcatggtggtgtacgcctgtaatcccagctacttgggaggctgaggcatgagaattgcttgaagctgggaggcggaggttgcagtgggctgagatcgtgccactgtactccagcccaggcgacagagtgagaccctatctcaaaaaaaaaaaaaaaaaggtcattctttcctactgtaccataagtgttacctttctcataaggcagatatttgtgggtctgtttccacactctctattctaattgtcatttttgtatcctgcactagtaccacactgtgctaatttttattttaattattcttgatatttggaagtttaagtttatcaggttgttgttcttcagcagtgcttggctgtccttggtatttctatgtgaattttagaactggtttgtcaacttctgctaagaaaaacccctgttgggattttgattggctttgcattaaatctatagattgggagaactgacaaactatatgtagtctttcaactcatgaacatgatatgttcttccatttattcagtttatttatttatttatttattttttaaattagagtcagggtctcactatgttgcccaggctggtcttgaacttctgggctcaagtgattttcctgccacaggcttgagccaccatgcctggcctatttagaactttaaaattatwtttttttttctgtaagtctgtaagttgtcttgtagtggtcttatatatctttttttttcttttctttttttttttttgagatggagtctccctctgtcacccagtctggagtgcagtggcgcaatctcggctcactgcaagctctgcctcccgggttcacaccattctcctgcctcagccttccaagtagctgggactacaggcgcccaccaccacgcccggctaattttttgtatttttagcagaggcggggtttcaccatgttagctaggatggtctcgatctcctgacctcgtgatccacctgccttggtctcccaaagtgctgagattacaggcgtgagccactgtgcctggctttatatatcttttattagtttttttcccccctaagtatttgatgtatttttgatgcaatagtcaatagtattactgtattttaaaggtcttatttttataaaataaacaatttcaatgaagccttgtagtactcaacacttccagctttaatttctttgctgtaatagcttgcttatgaacaattcaggaaagaatttcatgtgcagtgctatttctttaatcttacccataatccttttaaaattccagttgaagcagctactttttcgtggttacacttaagtatttttaaaataaaactttattttctatcattttaaaaaaatcttatttcaactaagaaagtcttatgctatggaggatatttcttctcttgtacatttttcctttactgtcccttgaaagacagttccttttttatttcagaatttaacagaacatagcaaatacccttaactggcacatgaaagaaaacttgtatcttactttctagaaaatacctcatgctccataatttataataatatttgtttttcaaatcttaaacaatatttaatatatattttctaacagtatttgctgacaaaggaatgcagttttaaaaatattgctttccagctggctgcggtggctcacgcctgtaatcccagcactttgggaggccgatgcaggtggatcacaaggtcaatagatcgaaaccatcctggccaacatggtgacaccctgtctctacaaaaactataaaaattagctgggcatggtggcgcacgcctgtagtcccagctactcaggaggctgatgcaggagaatcgcttaaacctgggaggcggaggtttcagtaagccaagattgtgccactgcactccagcctggcgacagagtgagactccatctcaaaacaaacaaacaaacaatacaaacaaaatattgctttctttgtactatttaatccactttattactgcaataagaaagaataaatgttttaccaataatatgttcctgtttttcattattaagcaggacatgtataaagagacttcttagcactggattgaatatctttggactttaaacactacagaaaaattataaaagtttatcttcagatataatttttagatggtttttaatcatgatagctttattttatcattatttaatataatggtcaacaaattatgcctgcttgtataaataaagttttattggaacaaagccacattcatttgattaatgtaatcaataacaatgtaatgtaattgtggctacttttaaactacagtggcagagttaattagttataatagaggctgtaaaatattaactgtctggccctttacatgaaatgttttgctgacatctgatttaatatatcaggcccggtaaagatttagtttattgttaataataaatttaaatccatacagtattctaagtatcttttgataattttgaatttttttgccaacttattgtttgaaccaattagattgttttcgtcctgtaatatagctcwcagagagctcatattaggtatagaagggtcagctttgttacttgctatttatttttgtttgtaattttaatattatctttaacctatgggggttgtttttcatattcatttatttatttgcaaacatcccttaagatcatttgtgtggtaaagtttgatttagttgagaaaaaaatataaaccataatttataagtaccctgaaagcaaatgagtgactgcagatactgatgttcttccttgcacactggggagctcccatctctattctcaggaaaactcatatgtggtaagcgataccgaaatacatgacatacagacccagagagggcaccattgttagtcagtacagttaacattggtaaagcataattcttatattttaagattaaaaacaattataaaataagagttttaatttttctttttgtgcttcactggaaagtcttatgcattccactttggagaccactgtcttaatacatactgtttgtgtaaattctttcaaattctgaatgtaggcataatccctgaatataaataaaagtttgtagtatcataataattgagctttaagtccagcaaatactttgtgtggatagtactgccagcagctgcaattagagaatctgtgggctaagcaaagccttactcagatgctttatctgtttttatcctgtgtggacagtcatctctcttccaatagaattttgtatctgcagctaattaaatcaagaatttaaccttaggatggaggatagaggactatgtcttcctgccaataggtaacccaccagaaccactccagtgaggagagctaccaccttagaggcctcaataggtagggatttactttagggagttgacagatgcttaagtatggagtcatacagtctgggctcaaattctgggctcctcctattataagctgtgtattcctaggcaagttcatttaaccactttgtgtctcagtttcctcttatgttaaatagggagaatggcatctaacttttaaggttgctatgaaaaattagttaatccatattaagtgcttggcatactatctagcacatatgaagagctcaatgaatgttaatttttagttaactttctggcggttcagatttggtcagttcacagttcactgagaatatttatctttgagcagactcatattaacctttatttatctttgagcagacttatattaarttcttataaaactacaatgccaatttttaagtctacctcaggaagtagaactgtcacatatactggatgccctatgttgttaatgacctgtacattttctacctctggatggcaccatggaacacaaacatcctaatcacgaaggttatattgaacatagggtctgaattagggacattcattaggtgaatccagtgttttgtgtataatgccaaagtggctgaagtgaatatttattaccctttcctgtgtttaaggaatttctttacctaaaatgccagctacttacttgtaacctttttcgcagtttgccctaggctcttttggtcttagccactcatcatggactttgactctgaagagctgtgatgcaaagaagcagggtgcagtgatggtggtgcaggtagcaaattgagttcctggggcagcagggccrgttatattacagtggctagagatagtggaggttggcagtggaagcagaggcatcctgatcagattagttctgctacttagttttaggcgttgttctcggcatcaatccctggtttttcacttctccttgtaagtctgagttactcttttgataagttstttttctcctcaaactagccaaaatcagctgggttgctaaatttgcaatctaagttgttcttgcaactaagaaccctgtggatatagcagctacaatagcctgatgcatttgtcttgcaatacagatagaaaggtcatgggaaagcaaatgaagtatttaaactttgttggcttcttctccccttgtgggtgttaagatcaccctattcccagggcctagatttgtgcctgaaataaagtaagtgcttagtaaaccttttgtggaatgaaagaatgatgggtactgccaatatgtgtctgttactctgctttttctcagctttcatggttgactgatctccctaaggaaggacatattttttctttcgatatgttaatacagatgtaatcctgcgtaacagtccattttttttttttttttgagacagagtctcactttgtcgcccaggctggagtgcagtggtgcaatctcggctcagtgcaacctctgccactcaggttcacgtgattctcctgcttcagcctcctgagtagctgggactgcaggtgtgtgccaccacacccagttaattttttgtatttttagtggagacgaagtttcaccgtgttggccaggctggtcttgaactcctgacctcaggtgatccacccacctcggcctcccaaagtgctgggattacagatgtgagccacaacgctcggctgctattctgttttttaaactcacttggcgtatctttattctgtggattttgtagtttakcccggggatgtgtgtgtgtgtgcgcgtgtgtgcatgtgtatgcatcttatagagccccagaatgctgacaggaatcccttcctggtgtcacaaggcagtctaacatctttcctgggattctggaaggcatctcttgagtcttcctcaaggggcttgttgatggagtaaagaaaagaccatacacccacagaaaatttcatacattcatacacaaatgtagaactgtatttaaaccttctatctgccacctaacaactttatgattcttgttaaattttcttttctttttctttttcctcgagacagactctcactcactctgtagcccaggctggagcacattggagcaatctcggctcactgcagcctccgcctactgggttcaagcaattctcctgcctcagcctcccaaaaagtagctgggattacaggtgcgtgccacaacgcccaggacagggtttcaccatgttggccaggttggtctcgaactcctgatctcaagtgatctgctcgcctcagcctcccaaagtgctgggattacaggcatacatctggccgatgattcttgttaaattttctacagatgtcctgctttgcttttcctatgatggtatgctaagattgggaaaggcaggagatacaggtccttttttacttcctttttatgttaaagcaggtgaacttctgctctagatttgtgtgttaaggagctgtgggaactggcagttagyaccccacwttctggttccatgaagtcatttgcttgcatttacggagccccttgctgtatgctatgagataatggcattctgaggctggaggtgccaggattttgagagattggaatggcttgttgccagtttattattgcctctctcctggtggagtggctgaagctagtgccaagggtagtacacctgggatccctgtctttttgtttctagaacacagtgctttagacttgggcttataaatcagagctgggactttgagaagatttgtgagcaagttcatcaagatattggggtcatctggcctagtcttcttgagtttcacatgtagaaacaagcctagagaatactgtaacacaaagttagaagggttgaggagggcgagggaagggtcaacaccttaccgctgatcgctttgctttactcctgcattttttgttcagagtggaccccgttctgcaatcgttggtctgaaattcaacccagtcctaaattgcatgtctcgggccacaggttaccaagtttacagacaacagtcctgtgcctctctggacacgtgactggtctattaatagatctgaagttctgggagagcctcagctcttcccccacctttctacttccagcagcctgcttgctggtaatttcttcagtgcccggacaactggacagagaatggaaacagggcaatctgcccatccccttttaggaggtaatgcaggcccaggtgtatatatatgagtagcctctggcctcatgggtgtctgtgctgcatcaggtcaagtggaaaygcttagcatttaggaggaagtaattccagtttgccctggatgggattgaaaaaaaacccaaacatgtatttgaccttcactatatgtaaggcactgtactaggcactttgcatgtgtttaccacaatcttccctgaaccttgtgagatagatattctcattttacagaggagatgactaaaactcaggaagattgacttagtaacctaatgttacacagctggcaagactaaaatccaggccttctgactttgtctttcgaaaatgacagcttccctgtttataactttctatagtaaaattgggctaggataatttaaccatgctatctttggggacacttgtattattgaattatctcatatagctcaggaaaatgggggcaaacatgaagggaggggaataaggcctatcaggctgtgggcaacaaagggagctcagtgtagcaggatggtgcctactgtacaggtccatgtgaccttagtgaacccaagtcagatagtggctgtcctgcaggttaatcaaccatatttcttagcttggcgtacaaggcattcagaattagggttcctgcttcatcccattttatctcttcctacttcctatcatacaaattgtttttcattctattgtttgccagatctgctgtcatcttccatgcatgggcatttggaggctctattaaggttctagtaaaaaagtaactgtggctaccttagggccgagcagacagttttgaatctccatttactccagaatcattttgggctggagctctgtcattcattcatgtattcaatcattcttttaacatacaggacactgcctctctgccaggtactgtactaggccctgctaatcagaataatgaacaagatagatatggttcctgctctcctagagcttgcagtgtagtagggaaggcaaaaatgaacaaaataatcataatgaagtctgatgaatgtcwtgaagtgcaaataagggatgtgatgggagggtgcatatatcagaggaacttaatattgtttagggtgttaggaaagacctgacattagctgaggaggtgacatttaagttggatctgaaaattgagagaaaataagtaagggttaagaaaggtaatgctaggcagctggaagagtatgcaaaggcttacaggccaggcaataaggataaagccatgtccatgtcagttcatttattcagcaatcatttacaactgctgggttatatcatgcagtgtgctaggttctgggaacataaaaaacaataagacgtggtccttacctgccctggataaactcagtaaggagtagtgatgtcactccttggtaaccagggtgctaagttcaccctagatcttggactcagttttttgggtcccatgtgataggacttaacacctttagaaaaactgcctgcccttgagtgtttggtccatctgtcaagccgacaggacatggacctcagatgaaaacctgcagtgttcttatccctggcttcacacttaccagatccatgataaatggggatctgctatagactgaatgtttgtgtccctctacatttcatacattaaaatcctaacccctaatgtgatggtattaggaggttgtagggtaaatggacctgagagcaataacaagcattcccttagaatgacactgtatggcagacacacctgaatgcatgttccaagctagggaatctgggagtggccaatccagagatttcgttccttttctataagtaatatctgagccctagcctaccctgtggaacacgggccatacaggggattgaggccctgggttttgagttgaatgaaggctgccagatgaggccattaagaggagggtgttaagtgaaaatgctatgtaaattgcacgctgtttacaagcggttgcgattttcctgcccggcctgttgctcctgggctgtgtggttttcctgtccagcctgctgcgactggactgtatgtaaggcagataccttgttcagcccgccactactggaccatatctgtacataaggcagttctcttgtccagcccaccaccaytggactctcttccgtgtatgtaagcccctaataaaaccctgtgtcttgtttgctggctctaggtctcttctttggcctcttaaacctgctgccttccctatggaagttaacagggtttggtacaacagacacagggcctttggtgggtgattaggtcattaggacagagccctcttgaatggaattagtgcccttagaaaagagaccccagagggctgggtgtggtggctcacgcctgtaatcccagcactttgggaggctgaggcgggtggatcacgaggtcaggagatcgagaccatcagggttaacasagtgaagccccgtctctattaaaattacaaaaaatcagccgggcgtggtggcgggcacctgtagtcccagctacttgggagtctgaggcaggagaatggcatgaatccaggaggtggagcttgcagtaagccgagatcgctccactgcactccagcctgggcaagagtgcaagactctgtctcaaaggaaaaaaaaaaaaaaaaaaaagaaaagaaaagagaccctagagatctctcttgccccttctgcagtgggaggacacagaaaggagacagccatctatgaaccagtaagcgggccctcgccagacactgaatctgctggcaccttggtcttggacttcctagcctctagaattgtgaaaaatgagtttgttgtttaagctgccctgtctatggtatttttgtcatagcagcttgaatggactaagacaggctcctctacagagttgaggttattggggtccagagattggcttttgtccccagtagaaaacatagaaggagctttttggctgaggtgaagttgcctctgttttcagagctttgtgtccttggtgtctcatatttattacaattgatcatgtgttctcacacccatccattgtcttgagtacacctaaggtggtattttagctgtgtttttctggattctgatactgcttatagacaaaagtcttagcggctggctatcttggactgtaaattgcctaagtcctaggtgtgttgttcacatgggctgtgttgtgaatgggaccacgtttccccaattgtgcaacagtgcaacattgtggccctggttaaagggaagggaagttaggttattgaaacatggactgtgtgcctcaggctgtgtgatttgtattctttatttcatttaatactccctgtaatgctctaaagtaagtacttttattctaatttacagatgaggagactgaagtttagtgaactaagtaaacaagtaagtagtggtttggggttagagtttaggtccaactctaaagtccatgtttccctctctcatccagctgtttcccaatgtagttacagacttcagatcttgcatgtcatcttgtttccatggcctctttggccttgtctaccttgacttatttgccttgcctccctgtgtcagtaatctaaggattctcaacatggctgaggctcaggaatatatcctgtttggtagataacctagagtctctctctcttccccgccgcccgccgtctacaatgtatttttgtgtctaatgtgaggcaacattataactataattggagtcatttttaaagagtaagttagctctaaatttggtgggctgcttttcttaatccagttcccacagcattctcaggaagacggaagatggggatggctcattagaaatgagtttgaatgaaaaaggcattggggcttggcttgagtggtggaaagagcctccctcagcctttctaaattgcgtggctactgaagttggttggatctttgtaagttagtacttaatgtcccttttccagggacctaagattctcttttctctctttcccgtagaagccctgcctcatcatctggagattctggagctactgacattagagtggagagacttttttctttcacagagttgtcagggttgtgtacggggtgggagaggggtctgtgtataaggcagaatccagggaatggtggaagaggaagtgtaacatgtttttgtgtcttcaatagcttttcagcactctttttttttttcctcctcttttcttctggagactttgcagtctcatttgagaagtggggtcccaaataaaacaaggctgctacactcacccatcttgtgttccaactctgcttccttttcctgaaggctgacaggctttttcatatcttgagtctttgtaccttctgttccctcatccttgaaggcccagtttgatctcttctctctggaggttgtcatgcccactttgtgcctccatagcactttgtacagccttttatatagtcttattcacttagctgtctgcttcactctccacatcttgaacctcttaagagcaagaggctgagttagtttcacctctctttagcaagcacagggtatgagggagactagagtctcaaaaattgtagaattgaacaattcaattcattacatcagtaccttggtacactgatgcccaaatcaaaagtagatgattgtgtacaactatcttgtgtacttccataaactaaataagtttctcttccataattcactgttttgtgtatctcccaggcccatagcccttcaaacatgcagtgcagtagctgactttgagagagaacagagcacagatgttatctttgcctgctttgcccttcacctcacagtgctcttctaagtccctgggcttgacccaaggaatgagtagggaggaaatgccagaaatgagccacccttggcatcctaactccttggtttgcaggtttggccctgtggggcagtgcaaggtgagcaaatggaaaagaacctgttccctgtaatagcagctgaaagggatctctacagattattactgtcatcttttcgcagctgcagttgcagcaatgagacactcccctcattgcattctgcatctaagacaaaatcaattcatcttttaaattggctctcttggcttgtcctgagatttctcatagggctgagagcctgaaacaagtcatcttacccgtgtttttctaccattgtaaggccaaagactgtgagattgtgtacccttagcccttcattttatacatggggaaactgaggcccaccatgggcataggactagttcaaggttgggtgactagtgtcaggtgaggctagacactggtcttccaactccctgcaaggtgctctcttcattataccctgctgtctctgatatcagtttatgtttgtaatgcctgtagattgtgaagttggtgaggctgaagtaaccaggaaacctggtttcttttctttctgtcaccttcctagtttctggacatcagggcacagtagacattctgggaagacttagtgaaggagtaaataaaaaacaaagttggcccaggaaaactgcatggtctaagccagaagaagactaacgaaagcagattcctcccagtttcactggacatctttggctttgatgatgattcctgtggttcgattttcccagtgttaaatgcaaccttggctggagcgtggaagaagtatggattgtaactatggtattttatctggtgaaaaccaggtctgtaattaaatgtctgtgaaaataccacacctgggctaactgaggatgcctttgagtcttcagatgcctcccttattccctagcagcaatcacaagacagagattgtgtgcatcattgagaactaactacattatacataggtaacatttattgaatgcttactaagttttctggaactttttgaggtatttacaattcttttaatcttcacaatcatccatgagtagttactataattcttttaacttttcaaatggactttattgagatataatttacatataatatactcattttaagtgctcagttcgagttctgacaaatgtagtatatgcctgcgtaacctctcccctacaatcaagatatagaacattttcatcagtaggtacttttgttatccttattctacaaagaggaaaactgaaagacagagaagttaagtgacttgtgtggggccccatggtaatagaaccagcatttgaatccatgctgtgtgactgcagagtccacattcttctgagctgtgctacctttcatctctcaatttgtggtcaagccattgcctctcttgtcctagtggacaagtgcattaaggactaagatgacatagacttacaatctaagcactaggaggggtgttggggagcaagaggcccagagataggcagtggggaggaatgagatagccatctcagtacccctacagttccaggacccaaagaaggcagaacaacgtgccttttgctcagcctttgcttctccaggcctgcaaagaatagggtagactagagagtcttataataaggttaccagtatgatatagtatctgaaaaaaggacggctcctaggctcacataactggaatagaaacatagaaaatgagaagagatgatagtctcatatgttctgagagtgaccttagtagtggctgcagcccattctggacttggcactatagaggcaacatagatagtctggagatggagagtggccttgaaatccaatcctttgaggagaggttgaaggagccaagactggatgccctgaagtgaaaatgtaatcactggcttcatatccttgaaaggctgttctttggcagagaaaaccaacttgtttttctttgtggcttcagaaggggtaattagaacccaatgggtgggatggtgtagagtattttggaaaaattaaagtacagtgaatatgacatatctcatatctcattagcttggagtacaaataagatcagatcttttttcaatattaaaattaatctctgcagctgggtgcagtggaccacgtctgtaatcccatcactttgggaggccgaggagtccaggagttgaagaccagcctgggtgacatggcaaaaccccatctctacaaaaaatacaaaaattagctgggtgtgatggcatgcatctgtagtcctagctacttggaaggctgaggtgggaggaccacctgagcctaggaggcagaagttgcagtgagccgagatgacaccactgcactccattctgggcaacagagcgagacttcatctcaataataataataataataataataataataaaatatctggaatgagtgtgaaattatctggaaatttaatatgtttcccttggggctgttcttcttccctctttctctttatgaagtattcaaaaactctaagggcttattcaatccaaaggggtcaggcttagttccaagtagagaactaaagaatcttattggcctgctagcgggccccatttttagcttctgttggtgttgcacagtatggcttttaaaaatggatctttcacagaatgtggtttctgtatttactgtagccacaagaacctgattctccataagtcacagtggttcattgagggaggatgatggcagtccttcaatgtcactcttagtcccagggttcactctgcttgagctctcaaggtgaatgctcaagtttatatgtatataagctcatccactggaggaggaaacctccacaattttccatttggctaagtctagaagtgtttctagcttccaccacattctagctccagaaccttctctcatgatcacttttgttatagagcttgggacatcccttcagcatgagctcttactgttggctgttggtgtccccccctacctttaacttcacctaggatcttgagtctgttagagaaattctttttttttttttttgagatggagtcttgctttgttgcccaggctgcaatgtagtggggcgatcttggctcactgcaacctccgcctcctgggttcaagcgattctcttgcttcagcctcccgagtagctgggtttacaggtgcccaccaccacacccagctaatttatttttgtatttttagtagagacagggttttgccatgttggtcaggctggtctcgaactactgacctcaagtgatccacctgccttggccccccaaagtgctgggattacaggcatgagccaccgcgcccggcctgttagagaaattctaatagcattgaacttcagaagtaaggggagtcaaagtttcagtctctccctaggagagctttagaccctatgcatatttgttttcattttcttcagctttgcataccaaggggtgttgagaacagtctttgccaagtcacaaaatatcctgttgtatccttttccccaagagcaatgtgtgctcatttgctttatgttttatcattaaaacagggctcctcaagagtgagggtctgtcccagaatgatttaatgtttctaaacattaaaagggactgacaggagggactgacagttttaaaatgacagtttaaggctgggcacatggttcacacctgtaatcccagcactttgggaggctgaggtgggcacatcacctgaggtcaggagtttgagaccagcctggccaacatggagaagccctgtctctactaaaaatataaaaatgagcctggtgtggtggcacatacttgtaatcccagctactcagaaggccgaggcaggagaattgcttgaacccgggaggcagaggttgcagtgagccgaggtagcaccactgcgctccagcctgggtgacagggcacgactgtcccaaaaaaagacagtttaagaccatcatccagaatgagcagggttatcattagaagatgtgagaaggggcaagtggccatgcagtctgaaccagtatcttgaaacccctttctcctaggagggactcttactaattttctccactactgccatactagcttcagcaaggtactgttctccctttatgtttggccccaagttgggcaaagaacttttctgtatgacatataactgagccctatataaaatatttagacaagaattttctaaaaactaagggatagcaatagaattgagactagatagactagcttataaaatgctgcttgatctctggggctatcagaggatatacacttagacagtaccatcatgattatctggttatgatggaagagagaggagagaggtgtgacttctaaagatccttctggctctgagattctgtgattcttctaggcttttccaaactgaaaattctagaactgactttgttctgtgattcttgcaaatcttacaggcccaacagtggggtcaggaaagtaggtgactatgacatagttgaggttaccactgatctcatttctgcatttctcccaaccactgcattccacttaggccagagaaatacagatgtaaaatacagccttttaaatgtatgttttaccacaattaaaaaaatacagcttttttatttgtccacaatgttagtctatcctttctcatttgaccctcccaataccttgtgatataggcaagaaagtacttattaagtcattttagagatgaagaaattgagattcagagaagttaaataatttacctgtccagattacacactagatcaactggtatcctcagtgctcttaataaatatttgttaaataaatgaatgaatcagaacatagaactaggaacaaggaagattctttgtttccttggccagtatttttctttccctattcttctgagctgcctgggggctttctctgagcaccttttgggttggctgtttttggttgaccttctctttgggattcccttgttctgtagctgaagctgtgtgcactcgttagagatcatcattccagttgtgttccctaaggagtgggaagggaaaaaacactccacccactgtaaatctttttttgttacttgttttctgggatcttcatatcattgctgacaagagtgactcatagacttcactatgtgattttcttggttaagagacctttttccttaactccagaagaaattaattcatggttttgtatggttaaagcacagctatttagtagctttacccagaacacaacagttccgtcttctagtgagcccagacttaccaatttggtttggccaaaactcttgaatgcctagctctgttaggtgctacagaggaagccgttggtgtgaggggaggagaggggctcactcagggtccagttggggagataagacacatacataaatgggaaaatagtttgaggcagtttaaataaaatgcaaaatcaaattgtatacatgtaaatatttaaatgtggggaatagatcataaggggctgagaaggtatagcagaaagagtgtatgctttagaactgtaggccattggcaagttaacataattctctgaactactttttccttttctgtaaaatggggataataacagcagactcacagggttgtgaggaataatgaggtgatgtgtgtaaagcaccaacatagtggctgatgcatcatggtaggcatcgaactattgggaagcagcatacccccatgcactgactgcctcccctacgaccctttcaaggagccatcctggaggacctaaactggaaaggttggttagcatttggagaaagagaaaaggggggatggcaagcmatgaatgaaggaacaggtcccacagagaatgtcaatctagggggagtggaggatacatggaagaagcagtggagtaaaattaaagaaacagagaagtttggactttatttaaaagagatgtttttataggaagtgtttttatgccatatgcatatatttatatttatagaaaggcctttcttgtactcttcagtgtagtgtagtagctaagagcttggactctagagccagactgcctgtctctatatgccaccacttagtttacttctctgtgcctcagtttcttgagctgagaaatggagatgttgataatgatacctcatagggttgttgtgaggatgaatgaggtaacaaatataaagtgcttagaatagtacctgacacatgtgaggtgctataatttttattgttattatttaaatgaaacaaaacttttacaaaagagtacatgcctctactaatgaactctgataattaaacagaacaaaaatggtccactgactgagggattgatatctacagttcgaagacttctgctgtaggtaatgaagatccatgaaagtggtaagcaaggtgaggcctgcataaagtgatattaaacaaaacagatctgactgggaggtgcaggatgaattagaggaaagagagttggcaatgggctcttgagatagggtgtgtccatgttaaatcacctaacagtacaaaacatttgttatatttgaaagtaattcttggtagggttaagcagtagatgtgtaggacttgggcagccttgtcaaataacgtgagttctggtgaaaggaatgcagcagtgttgtagcaaatagtattgccatagaagaagcatatatatgtgtgtgtgtgtgtgtgtgtgtgtgtgtgtatacatatatatatatagagagatagtgtgtgtgtatacctatatatatatatagagagagagagagagagagagagagagtgtgtgtgtgtctcagtgtcactgtgttgcccaggctagagtgcaatggtatgatcatggctcactgcagtcttgacctcctgggctaaagcaatcctcccacctcagcctcctgagtacctgggactacaggtatgaaccatcacacccagctaattttttatttttgtagagagagggtcttatgttgttgtacagactggtcttgaactcctggagtcaagcagccctcctgcctctgcctccgaaagttctgggattatagtcaggagccaccaagtcctgtctgtacatatttttgagtatataaaatgatcaaaaataggctttaattacatctcaattaaaaaatgttcaaataaaaatagagtgatcactgatgactgtaaaaggcaggaagatctcattagaggaggcagtacttggattgggtttgaaggtagggtagaatttgatcattggtgagcactgcatggaggtaagaatggatatggtgtgtgatcgagttagtagccaaaccaggacttcaacctggtctgtctactccaatgagctgtgcagagaagcactaatgrccatataatacctagaccacttatagcaggcagtctcactatgcatagcctccatttcctgggcagagtggtctgaggtgcctggatgacacattttcagcttccttgtaaacttgtaagtcccataagggccaggctgatctggcatttggggtagtgttgagggtgggaargaaccatagacagttgccctcttccatttggatgtgcctcaggagagttcctgagaacctaccctatccttctttgtagtgctgcctgtgctgtgggcctagagtgggcctagctggaacatgggtttggtgatggaccggtaggtggcagggactactggattttggatttcctctcaatgaactgtggtttcgtatgggttgtttgctttgctctctgtttatacagcattaaaggacttttatctttatctttggccagctgaaggttaaaacctccaaagtttgcatttgaactggatcatttctcattttggctggctttaagtctcatgtcttaaggccatttgtggtaccagcagacctctttatgaggtaatgtgttcctggttgctttgggggctagtgtgcaaggcaggaagtaagtgtttgagagcaaggtagagaaacctcttgtagagtctcaagctaatgcttagagctttttgagtgcagagtagttaggttctttacagagttagatggactttgcctggaacagacaccccagaaggatgttatcattgttaaagcaaccagggttatatcatttcttttaccccaaggcaactcttctgctaggagcctgggaccctctagtctgctcttagagagcttgccagctgtgtctgtgcatgctcagccttctgccatctagatgttttgtatttcctaaggccaagctctgagggcatcttctttgggaagcctttccttgactcctaggaaagaattagtcaacttgcttccacagaacctggtatatcctgtgattgtagatatttcctagtagaaaatggggactactcacatgataagattgccacatgctatctaaatattacatggccatttaaggagtgcttttctgcatcgttaactggaatagagaaactgggttgaagtcctggtttggctggtaacttgatgacacaccatacctattcttacctccatgcaatgcctcttaattacctgtcttcttcaccagacaataaagactgtaagctggtaaactttttttgttttttcttctggtaaagctattgtgctttaataaaaaaagattattgctcaatataggtttttccaagagagccacagtccagttcacagttaaaaaaaacatcttctaggtcgggtgcagtggctcacgcctgtaaccccagcatgttgggaggccgaggtgggaggatcacttgagcccaggagtttgaggctagcctgggcaacaggagagactctgtctctgcaaaacacaaaaaccaaccaaacaaaaaattatcctagaatagatggaaaatcatactaaggaacaaagacaactttcctttcatttttcctttgcatatcttacacagtcatatcactatgacttaaagaaaacaaattatcacgtatatacacagattcacataagtgacagaagcaaatgtattagtcaaaggatatcttcatctatattgaagtacaagctagaaagtaaacttcttgaaggcagagattttttttttaagttgtgtggctctaccacctaacataggttatgtacagaatagacatcaatagtgaatgaacagatgaattagttaatgagttaatgatggatttttagcacattttctctcttttttaggaacttaagaccccaactgagttgtttagaggaaggggccttaggctggggccaaattctatgtcttctatgcagacktgagataatgtgaaatgttttccttttacagggtgtttcccctggcttttcagcattcttctcaattctttaattgccatttaaagatttgtatgctgtggatgagctgatggaggggaatgtttccctgaggacatggcttctcatggcagccaaggttttgtgcctgattaactcgctgattgaatcactggcctctggaggcaccaagggagggagcatgagtatatttaagcagccagaactctctgtgcctgtgtagtgggagtggagggggaagtgggatgggagtgatggtaagttgaaaagagaatggtcagagaaatctacagtttttaactcttcatcaatactatgttttggattttccttttgtgacagagtagtctagtagaaagagcacaatttaagtaagagactttcttctgtcaccaactcactgtgccacctaggacaaatcactgccgccatgtgggcctcatttgtcaagtgggatcaggaatctctgctctgcctgactccttgaattgtagtgagcatcggtgagctgttggatgacagagctctgcacagtagaggtgatggtaccctaatcagagcaggagtgtagtgactctggtcatcatcccatcatttcttgctagggttttcctatctctagaggaatcagctactaaagcctagtcctcaatgctcaatttcatctttctgttctttcctgtctttatctagtgactcctcattatataatacgggtgacccagttgtcccagcaaggcccctccatattctctgacttccctctatcacagtactcaccaggctgtcttaccattgtttgtttggaggtagctattaggagtataggctttggagtcaagctgcctgggtttgaatccttacttttacaacttactggctatgtgctcttgagcaagttacttatctctctgtgccttagtttcctatctataaaatgaagagaataatggcaactgcctcactggcagttattgtgagaatttaaataaggcagtatatatggagagtggagactagtgcctggcatatggtaagcattcaaaaatgttgtgtaggctgggcatggtggctcacgcctgtaatcccagcactttgggaggctgaggcgggtggatcacctgcggtcaagagtttgagatcagcctggccaacatggtgaaacacaatctttactaaaaataaaaaaataaaaaaaaaaagaaaagaaaattagctggacatggtggtgcacacctgtaattccagctactcrggaggctgaggtaggagaatcacttgaacccgggaggcggaggttgcagtgagccgagattgcaccactgcactccagcctgggcgacacagtaagactctgtctcaaaaaaaataatgttgtgtattattataataatcattattgcttaacttcttccctgattgaaactctgttaggccagggaccatgtctattttattattatatctatagttcttagcacaggtgtattagccattcttgcattgttataaagaaatacctgaggctgggtaatttataaagaaaagaggtttaattggctcacagttctgcaggctttacaggaagcatggtgctggcaactgcttagcttctagggaagcctcagaaagcttacagtcatggtgaaaggcaaagatggagcagacacttaacatggtaaaagcaagagcaagatagagagtgggtggggagagatgccatacactctaaaccagatcttgtgagaactatcatgaagacagcatcaagccaggagggatccgcccccatgacccacacacctcccaccaggctccacctccggcataggtgagtacaattcaacatgaaatttgggtagggatgaatatcccaactatatcaatggggttggaacagcaggcgctggataggaatttcttgaataatagtatacatttgaatgctgaattttccttatacaatactaattttatgatcatgagcaagagacttgccctctctacaccccagttttcatatctgttaaatgggaatcaaaatatttgtcctgtaggcctgatgtgagaattaaattaatatgaaatgccaggaagtgtgtaaatgtcattcgtctccatacctgttggctgtgtgcatgtggaacccaagaatctgctggttcctatagtacccctatagtgagctaaacccagagatgcttctgaggtgatgttttctggatatttggcctaggacaaagaaagtagcatactttgagattattcttagcatttctggccttttctatctgcctgccctgcttgttcttcgttggattctrggttcctaaaaataaccagaatatttttctgcctcttagttttccaagtgtcttaagcaatcagaagcattttaattttggctcctttaggctggccctgtttggttctgtcattgttagccattaccatatcctgcttatattatgtttcctgacctgctatactttttccagggccaaaacactacccacatcgctccaggtaaataactttatttggctcactctaaccagttgggaagcacagtggcccatgaggttagaagccttgagttccagtgctggctctgccactgtgtgactgtgtgacattgggcatagccctttccctctctgtgtctcaggctgtcatcattaaaatgaatgatttgaaccaactcagtgctttgtaagagtccttaagttctgtatttgagtttggacaaatcacttctcttttgggggggtcttagtttcctcatctgtaaaactaagtatgttggcttgaataatttacaaaggcatatataaacctgaatattttctcctcattcttagtgtttttttttttttttctttctgccttgtattactttctggaacatttctgtgacagttaacagctgtggacaggaaacccttgaacacttctaacttggcaaatgttgctgctcctctgaacctcatcccagcccatttcctgtgtttacagcttttgggttttgcacttagtgacaggcctgacaggtcatattgtagttttctcttcatagcctggtacagggtagaccaaagtgagcaccaatttgagtgtcagaagacagagtttcagtctctgctcagctgtatgaccttatggaagtgacctcccttctcagggttcaatttcctcctctctggagccagaaagttttaacgagggaggctttctggctctgatgttgaatatatgtctcttgtttattactgctgacgggggccctctgtttcacctgttttttccacatactccatcctacaagagacacagcaggctacctttgcatttcctatattggacaaaataagaggaagaaaggaagccaaacagctctcccaggctcagttggcagcagagaggagttgaggtgagaagctggtgtcaccgaattgcccagtaaatcagctgtgtggttggtaaccaggtaggcacctgtatgcatttattcttatcaaggctctggagacagactgtatcctacttccagacctactttcaccatatatgtgaccttggggaagtcacttattgtatctgggcttcagttttctcattttttattgaggataataaaagtactgactttacaaagtttcaaagagacaacgtatgtagaagtgatcaacatagttcctgacatgttcatcctccctttctcccttagacagttaacagtattcttaattctgttcttgtggagaaagcaaaaagacactcaagttccattctagaggagctaacaggccacatgagaacagaatacagttaggtttagaagagctcttatgaggtggtccgttggccagtgtaggctcaatactctgacctcaaaatgggagacttatagggcgcggagtagttaaagaaggcatcccagggccttccctgggccttgaaggttcagaaagtattagacatgaaaagctagagagagaataattctaggtacctatctaccctttctcaagctctggtgctttgttttgtataggtcagtttcccatatatctccctttctcttcttctaggtggttattatccaaggggcttatcttttctttttttaatatataagagaaaaaaattaagggatgaggagaacctaatatttattaagaacaagctagttttacttgaatctgtaggctatgtagtttgcttgcataatcttacttatttagaaaaatacattattatgccgtattttacagatgaaaaaatagtgcctccaaaaggttagacaacttttctagctctacaataacaaattatgatgacaaatcaaaggagccctacgtgagccagtttagaagacatgtataagcaggtgtcagttgtgcttattcattccaagttctcaatctataatagtctggttctttttacacttatcttctaaatacgtctatcttattcctagttccaacctgtactcacctcctgctcttagcagttattcccaatcctctaaatctccagttctaccattaatttagattgtaccttcctgccccaaccttagatcccttaattctcttctcaaatatttaccaagcatctactatatgccaggctagacacgaatgcaaataccaatttctgcttagatatttcagtgtactagttagacaattacaacaaaaataacatggtaataattgaacacttactatgtgccatgctctatttgaagtactttatatgtattaactcatttaattctcacaaccctatgaggtggatactgttttctccttattttacagatagaaatgtaggcatagagaatttaagtaattggtccaaattgtgatacagagaagcacagggactataagagyacagaagagggactcctaatcaaaccccgggggtcagtatrgagaaggctcctagagaaattagaaaaagcctgagtagaatcttgaaacctgagtatgaattagtcaggtgcagaatggggcaaggatattgcgggcagagggaacatcatgtacaaagccacaaagtgagccttgcatatttatggaactgaaagtaatttagtatggtgggagtgtagggtatatgtgagctggtgagtggcaggagataaggctagaaaatgctatagagacagcctcttgaaaaagtcttgcatgcttttctaaattatattcattgcaaaggccaagtattcccagtcttggggatttgaatccctgaaaggggtccttgaggggtgtctcatgaatccatattatttcctcagtcatttttcaaccagtggttagtaaaagcacacctatcattacatggagctctttggaattcctcactgaaaaaagttaggcatcactgttaagggagtttgggaaccctgtgaaggattttttaaattaaaatttttattgagatgattatagatttacatggagtcctaagaaataatatggagagatcactggaaaactttgcagtttcctccatggtaacattttggacaagctrtagtatatcatggccaggatattgacattgacattgataaaatccaccaatcttgttcrgatttcccagttttacttgtactcatctatgtgtataaagttctattccaacaccacaaagatccttcctattcttttataaccactcccgtctcctttcaaccccattcctcattcctaatctctctctgccttccatttctagaattttatcctttcaaaaatgttacataaatggaatcacagagtatataaccttttggaattggcttctttcttttttttcttttctcagttcagttccttggaaactcatccaagttgtgtgtatcaataggtcattcatttttttttttttttttgagacagagtcttgctctgttgcccaggctggagtggagtggtgcgatctgggctcactgcaacctccacctcctgggttcaagcgattctcctgcctcagcctcctgagtagctgggattacagacatgcaccaccacgcctggctaatttttgtatttttagcagagacggggtttcaccatgttggtcaggctggtcttgaactcctgacctcaagatctgcccgcctcggcctcccaaagtgctgggattataggcatgagccactgtgcctggctgggcattcctttttattgctgagtcatgtaccattgtacataagtactggagtttaaccattcacttgttgaagaatatatgggctgcttccagttttgggtattacaaataaagcttctgtgagcatttatgtacaggtttttgtgtgggcctgtgaaggattttattcagagggctatctagtcagatttgaattttattttatttttttgagagaaggtctcgctctgtcacctgggctggagtgcagtagtacgatcatagtttactgcaacttcaaactgctgggctcaagggatcttcctgcctcagcctcctgagcagctgggactacaagtgcatgacaccatacccagctaatttttaaatttttattttgtagagacaggatcttgctttgttgcccaggctgatcttgaactcctagctcaagtgatcctccgcctcagtctctcaaagtattgggattacaggcatgagccactgtgcctggcccagatttgaattttagaaaaattgtactcactgcttggtagaggatgagtttgaaagaaactagaacagagacagggcraatagtgaggaaactgttgtaacccaggcaagagatgtagaagcctgaactgctttggcatagaggtatcgccctcagaaatcagatcaggcttgtgcagaggagggagcagggctatggagcctgggctgccaggaggctcaggtagacttcattctggatagtctcctttcagggaggacactctgctaccccagctgagaaaggcatcctgtaaggaagggctgctcttcagctgcaggaagagagtcagaacctggttcctagaatgatcatcttgactgcaacattgtttagtagatgctgttggttatcttctcccaagaaaagacaaagaggggccagttatctttcttttattgtctgagtggagggttatatggggcagaaagataatgagaagctctctcttagttcatgtctcttttggagcccaggaatgtgttctcttttaaccagccagcaagaggcctgggaggtttcagtctgtcctcttgttactatggaaactggaatccacattgtttttaccccatgcagtggtgtgcctggttcctcagtgtttatattttcaaggcktttatcattgtgcacttagagccgctgtgattgggactgattgttgggaaccagccttactgattgaacccagaagggtataatcttagagggtccactgataggttggacatgccccctaggtgttgtcctttatctgggtaagtccttgggtgcccactccaacactttcagcaaacttttcccagcagaaagccatttgaggtgtctgtaattatttttttggctatctcagaccctgatgagtgctggctagggcacaagaacgtttgggtcaggcgccagtcagataatttggggtagcttttgaacaagtgtgtgttggtttaattcttctggggccgtctttcttcttggaagctttagtatataaagacctgtggtatgtgggactccaaacctgggatagcaaatcttcaaaatcagtatgcacctttcagttgtctctagaccagatattgtgctgcccagcactgggctagacacaggggaataccagaagaatcaaagactctctttgctattgttgggaaggtaagacttcagggccaggctcagtggctcatgcctgtaatcccagcactttgggaggccgaagtggtggattgcttgagcccaggggttcaagaccagactgggcaacatagtgaaacctcatctctacaaaaaatacaaaaattagccgagcacagtggtgcatgcctgtggtctcagctatttgggaggctgagcctgggaggtggaagctgcagtgagccatgatcttgccactgcagtccagcctgggtgacagagtgagaccctgtctcataaataaataaataaataaaataaagtcttccaggttaagcagagagtagaaaactgatggatgaacaactaacatttgtatagagctttactatttttcaaaagacttgactgattttttcaggtaagaacattaatccttaggagtagtcaatgtataggaaagttggaattcaaagacccatatttgctacctctgcaattcaatacatatttcaataattagggattggggaaaaaggggatcctggaggccagagaaatgtgtgttattgtttgatttcccagtgcctttgcctagttcagctagttcagtcatcagcaaaagctgcttgaaagtgttaaataagtgttgaaatgggtattccagcatgtgaacactgatctgggagtcagtcagacactttcaattcagtcaggaaggtcatagaaacaaaagggcaggcaaataggctgtctaccaggagtctgaagccctatgggaaaccaaggagtgggcaaagggtatcataacagttggacagctcctgcatcagaagcccatgttattgaggtcaaggcctgcttggtggtgactagctgtagggattagccattttcttctggaaggaggcttcttgtgagatcaaaatttgaagaaaagaatgcttagaggaggaggaaggtagaaatgggacacagaaggagtagctgagtgcaccctggaggagagatagccagagacttctcttctagaagatgattaggtttagcagaagcatattctttttccctttttgctcctcccagcatggtgtaccagagactcagttcttctctagtgattcttaaactttatattyaagttctaatgagaaagaggtttttggctagtttgtttcaggaggttgaacactaaagaatttaaggcaaagcaaggatgttctattttaccctgtttggggaatggttcaagcccagatggagtttcttgtatttgtcattaatagacaaaaaacccctgatggaagccctgcttcctcaccccacagcccttgctttgttgccttggaaagtaagagttagtaatgccagggagcccggttgcataggctgatccagatcacccaactatagccttgccataggacgtggtataggaagttagtgtggtttctaatctggttctgccacttctttgctggccaacctagggcaaaacaacccattttatggcctcaattttcttctccaggtgttaaaagagcaacggcctttgaggccctccaaatccccttcaattctgccatttagagtctgagtataatatgtgatctcaacatccattattcccattctatgccaggagtttttgcaagatcggtattgacttcttgatcttcttctttyttttttttttttttttgagacagggtcttgctctgttgctgaggctggagtacagtgacatgctcacagctcactgcagtcttgacctcccaggcccaagaaatcctctcatcccagcctccctaatagctggcaccataggtgtgtgccactactcccagctaatttttgtattttttacagagatggagtttccctatattgcccaggctggtcttgaactcccaggctcaggtgatccttagcctcccaaagtgctgggattacaggcataagccaccatgcctggcctgactttctgatcttttaataagtcaagttgtgtgagatgctgtgctccttgcctttgggctttctttgtttgggttgcccttccttcttctcccattctcttctacctgtttttcagtggtaactcctgcttgtgtggtctcttgccccttgccatattttactttgtaattcatatactgtgctcattctcctagtactttttgtgagcaaaggatggtgtttattcatctctttttgaatttgttcattcaacaagtttttctgtgcatttgtttgttcgttcaacaaatgttcattgaagtctaaccgttgtcctagggactaagctaggtgctagcagccaggattcagccatgagcaagacagccatggttcctgccactatggagctttcaatttagtggagaagatagacattgagcaaattatcacagaaataattactattgtgaaaagtgctgtaaatgaaaaatataggttgttttgagaatgtataatgtgggcctaaaccagtttgggagggagaatgagtcaggatctttgaagaaaagacatttaagtggagatcagcagcatgagtcagaatttgcaggttaagaaagaagtaagagccttccataccgaaagaattctgagtggttcttgacctgggctgcagtctagcgtcmccacgtaaaagggagtatatggagcacctggacatatcatgcatgactggtgggagtataaagtgatatgcctactttagaaaacagtttggcagttacttgaaatgttaaacatacttttattttgtaaatgcatcagttccaccctagatatttgctcaagaaaaatgaaaacatatgttcatacaaagacttgtacatgaatactcataatagctttatttgtaaaatagccaaaaactgatgagtggataaacaagtggtggtatagccattcaatggaatactactcagcagcaaaatggaacaaactactgattcatgtgacaacatggttgaatctcaaatcttgttgagtaacagaagctaggcacaaaagagtacatactgatgattccatttaatttgaaattctagaacaggcaaaactagtttatagtgatagaagttggaacagtggttgtgtggggagggagaatgagggttggcagtgaaggaccaagtaggaatattctggggtgatggaaaggttctgcatcttgattggggtggtggttacacagggatgtatgtttgtccaacacatttaacagtacattaaaaatgagggcattttattatatgtaactgtaccttaaaaatattcatgcctcatttttataagggtcaaaaacaggtaaaactcgtctatgatgatacaagtcagaatgtggttactgtggggtatggttactcatggtagtattgactggaaaggggcaagaagggtggagccttcctggaaatgttctatrttttttatttcagtggtagttacatgaacatatagattacataaaaattgaatgtatataatgtaaaaatatatattttaaattgtctatatatttacttatgtactttactgtaagtgtctctattaaagaaaaaataaaaccccaaaaaacccagcttatgcctggccccacccagagagatactgatttaattggtctggtgtggggcctgggcatcagcaatttaagagctccttaagtgattctgctatgcagccagggttgagaactactgctctatgtggaaaggctgaggagggaagaaatggtgtgtaaagaaggatcataaaaagcaggagtttcacttctcttttatttttaaaaattttaattaaaaatttttttattattattttttactgctccctgtgcagcagggctaccccataagcagtatgcccagagtagtcaggagtttcacttctaatatgaagttatagaaaaaaaaaaaaaagcaggagttactggagatgaaatcagaaagatggcaggtgtcagatcattctgggccttgcaggccacattaagaaattttaactttatcttaagaataaggagaaatttttgaaaggttataagcagagagtgactaggttggatattcagctagtatgcactagcaccgcctatagctcgcatttctgctgattggtcattaagtatttagattatctcctctgggagaggcatgctgtgtgcaggataagakttggaatagttaaggaatattgaattaggattggtgattgattaaatgtgragagtgaaggagagtgagrtgtcaaggcttctgacataagcacctggaaaagtaggaaggttagggaaaaaatgaatttagaattggaacttaactagttcaagtgcctgagagacatccatgtgatgtctactaggtagataggttctgtgggtttctgtaggtcctaagtgaaacttgaaccagaaacataattttaggacttggtaatagtaatttctttaaatagtaactgaaggtatgagaagaggtaaaatcactttaggaaagagtgtagtaagaagacagcccagaatttagaaaaaaattctgacatttagaatttatgtagaagtctgggcacagtggctcatgcctgtaattccaacactatgagaggctaaggcaggaggattgcttgaactcaaaaggtagaggctgcagtgaaccatgatcatgcaattgcacttcaatctgggtgacagagcaagaccctgtctccaaaaaaaaaaaaaaaaaaaaaaaaaaaagtcagagaggagaaacctaccttgcaaattagggaaagcgaagatttattcattcattcagcaaattctctattgaatacctagtatgtgtcaggcactgtacgagtcccttgggatactgcagtgagcaaaaaagcgactgctctcgtggaccttacttttagtggagggagataggtgataagcaaaccaaggaataaatatatcatgtgtcaggtggaatcaaatgctatgaaaaatgagaatcacaagctgtgtcctcagatatcttcaaataactatagttataaactgactgaggtaaggccatatgaggtgcaaagtcagaattgctgttggaactcagaagtatatctcattgcattgctcaacatggacctgtatatatagttgatgctgtggattattattattattatttttgagacagattcttgctctgttgcgcaggctggagtgcagtggtgtggtcttggctcactgcagcctctgcctcctggtttcaagccgttctcctgcctcagcctcctgagtagttgggattacaggcgcccgccaccacgcccggctaatttttttgtatttttagtagatatgggctttcaccatgttggccaggctggtctcaaactcctgaccttgygatccacctgcctcagcctcccaaagtgctgagattactagggtgagccactgcgcctggcctattattattattaatgttgagacaggttcttgctttgtcatcaaggctggagtgcagtgtcatgatcatggctgacacagcctgaaactcctggactcgagcagtcctccatttcagcctcccaagtggctgggactacaggtgcacactagcacactgggctaattaaaaatttttttttcttcctttgtagagatgagatctcactgtgtggaccaggctgattttgaactcttggcctcatgtgatcttcctaccttggcccccaaagtgctgaaattacaggcatgagccatcaagcctggccaatggattaatttttttttttagacgaagtctcactctgtcgccaggctggagtgcagtggcgcagtcttgactcactgcaacctccacctcccgggttcaagcgattctcctgcctcagccttccaagtagctgggactacaggcgcgtgccatcatgcccagctaatttttgtatttttaatagagacagggtgtcaccatgttggccaggatggtctcaatctcttgacctcatgatccgcccatctcggcctcccaagatgctggaattacaggcttgagccaccgctcccagctgattaatttttgatgagcgacctcagggagagaagtgagcttggtcaaaattcagagcttagaagctgagtgcagtggcaaaagcctataatcctagctatttgggaggctgaggcaggaggattgcttgagccaggagtttgaaaccagcctgggcaacataacaagacccccctctcaaaaataaaaaggaagttagagcttagaatctgtagtgatttgtgttagtgttgcttgggcagctgaaaccagtgccagttttgtccagaagaaaagatcttttgaattcctgccccctgctgagaagagctggtcctcttcttggatatgaggacgagtggttctaacagacgcaggaatatctctcagataggctgagttttgcctagcctaggggtatgactcctctttctgtggctaggcctgctgtgtgcctcagctgagatgttatatttcactggggacctttcttggataactccaggtctcaaacctgttccttttttaagacttcacatttccatagtcaggcgcagtggctcacacctgtaattccagcactttgggagactgaggcgggtggatcacctcaggtcaggagtttgagaccagcctggccaacatggtgaaaccccgtctgtactaaaaatacaaaaattagccaggcgtggcagtggaggctgaggcaggagaatcgcttgaacctgggaggcagaggttgcagtgagtcgagatcaagctattgcactccagcctgggcctgggcgacaagagcaaaactctgtytaaaaaaaaaaaaaaaagactttacatttctggccagagcgtccatcccttactcctccctcacctcatccccattctaggccccatgctattttatctcttgaacttcatggtccttgaccaaatttgaaaatcttcccagggctagtactctcaagtcttagtcttttgatccctttccaagaatgagggtggattctaatcccatcaagagtagctgcagaatttgctagtcctggctgagaaataagaggtgaagtgggagaaattcttcttactgatggggcccctgctggtaaaacttggcaatttccaattcgtcctatagggatgaattactgtttagtgacgagaaacagaaagtggttgggaaagtcgaagcattagatggacagtggatattggtggtgggaattggtgggttgtattcaagaattcccttgactttttgggagatatggttttttaattaattaattcacacattcttcattcattcattcatttagccagcacatactgatttcatacttgacagggtagatggtagtggtaatattataatgggccctgggggatagagtgagtcaagcttggttcttaccacttggatgtggtatgtgaacaactcataacatgagaattaatataacagagctatgcacaaagtgctttggagcatagaacagtgaacagtgaatgattagctctgcctggagaaaggtgaggagatttgggcaggagggaaaggactttgtgtttttttctgccaatagctatcaaagtgtagtctttagaccatggcgggtggcagcaaggccttttcaggacatccagaagatcaaagccgtttcataataatatattatttgccttaaaaaaaactatgtatacctttgtactgatgttgcaaaaacagtggtaggtaaaactgctggcaccttaacacaaatcaaaccagtggcactgaactactagtaatgactgtattcctcacctccacacactgtcagttaaaaaaaataaaagttttcaacaaagaagtagaaatcattaattttattgaattgcatcccatgagttcatgccttttagtattctgtgtgatgaaatataagtatgcataaagcatttctgctgcatgtagaagtttgatggttatctcaaggaaagcacttgtgcawttgagttgtaagttgacatacctcttttttttcaggcagcactatcattagttgaaagaatacttgatagataactatggttattcagtatttggcagaattttcttgtaaataaatgaaatgcatcttctgctttaaggaaaacaactggtagtatttgttgccaatgataaaattccagcttttaagtgaaaactggattttagaaaacttgtatctgtcactgtgaaattgacagttttcctggattaaaagcttttctgatgaaatcagtggtgatattaataattgtggctattttgatattgtataaatgaaagtgtcaacatttggaagctctgcactaactcctaaccaatagtttccaaatgacaagtgcatcatgttacaaagtcatgcatgtattaaagatccattcaaagtgtaagatagaccaatggattttaatgttagagggtacaaaaagtttattcatatagtttgggatttcacattgcaactaacctttaagaaacctaccgcttgttgagtttgggtatagtctcgtataaggtatccacaatagtctgactagtaaaatattcctgtcttttccaactgcatatctatgttttgatctttagccaaaacaacacatcacaataggttgaatgtagctataagattatgtctgtcttctattaagccagacatttaaaagatttgcaaaaatgtacaattctacccttctcgagattttttcagaaaacaattattttccataaaaatattatttacattaatatgtaagagatttgttattgttctaaaataaattaaagagagcctggagagcagtagcagcctggctgtcatcaccatgtccctgaaaggtgattttttttttttggagacagggtctcactgttgcccaggctgtagtgcagtggtgcaatcacagctcattgcagcttcaacatcctgcactcaagtgatcctcctacttcagccttctgagtagctgggactacaggcatgcaccaccatgcttggcttttatagagatggggtctcactatgttgcccagacagattttgaactcctgggctcaagcaatgcctcagcctcccaaagtgctgggattataggtagtgagccactgtacctggccctgcaggctgattttgacagtgttgcagaagatgtgaggaagctgaaaacaagaccagatgaggaaggactgaaacaactctatgggctttagaaacaagctataactggggacattaatattgagtgttcaggaatgctagatttaaaaggcaaggccaaatgagaagcattgaatttccaaaatgggatatcaaaggacaatgtgatgagtatatatatatatacatatattttttttttgagacagagtcttgctctgttgcccaggctggagtgcaatggcacgatctccgctcactgcaacctccacctcccgggttcaagcgattatcctgcctcagtctcctgagtagctgggattacaggtgtgccccaccacacctggctaatttttgtattttttagtagagatggggtttctccatgttggtcatgctggtcttgaactcctgaccttgtgatccgcctgcctcggcctcctaagatgctgggattacaggcgtgagccactgcgcccggccaaatacctgtatttctaagcaaaggagctgatagaaaaaggttgaatttaggataaagcataggagaaaattgtcctttggaagccttcatactggtatcatgacctaacatttagtgggggaaatgcacttttaactctatgtatcatctacatttttgctgttagcatgaattgtaataattaggagtaaattgaaactacctagttaactaaactgtggttacttaaactaggtgtctgtaaaagttcttttagaaaagtgtcttatattttatttttatagatttagggggtacaaatgcagttttgttacatgggtatattgtgtattggtgaagcctgggcttttagtgtacctagtgtatccatcacccaaatagggtacattgtacccaaaaggtagtttcttgtcccttaccgtcctcccccactcctggcaacttttcgaagtctccactgcctccagggactctccatgtccccctatacacattgtttggcttctacttgtaggtggcaatatgtgatgtttgattttctgtttctcagttgtttcacttcagatagcggcctccagttccatccacgttgctgcaaaagacatgatttcattcttcttttatggctgagtagtattgtgtgtgtgtgtgtgtgtgtgtgtgtgtgtataaaaataatattttctttatgcagtcatccattgatggacactaaagttgattctatgtcttgctattgtaaatagtgccgcaacagacatgagtggtggctatctctttatataatgatttcttatcctttcttatcctttggctagctgcctaattttggtcctttgggagatctccatactgtttttcatagaggttgtactggtgcattcccctaacagtgtatgagtatttccttttctctgcatcctcaccaacatctgttgtttattgactttttagaaaagtcttgctctgggagtatgtatacaaagactttagcaattgtttgttcttttggcttatctgttctacagtgagtttagtgttactcatttagtgttcatctgttttgattattaagaagaaataaaatgaattaataactaaatataaaaatttgtgttttactttccttttttaattcaaaattttgtggaaattttatttgaaatgctctgatctataccttatgaaacatattatcaatctagaaaaaatcttactgaggcagtttgcaaaagttttatgttgctaaatattcattaacgcaatgtaggtaattaaattttaacttttattttgagtttagggatacaagtataggtttgctacataactaagcttctgacatggggtttgttgcacagattatttcatcacccaggtattaatcctagtacccattagttatttttcctcatcctcttcctcctcccaccctccaccctccgaaaggccccagtgtgtgttgtttccctctgtgtatccatgtgttctcatcatttagctcctacttagaagtgagaacatgtggtatttggttttctgttcctgtgttcttttgctaaggataatgacctccatctccattcatgtccctgcaaaggacatgatctcgttctttttttatggctgcatctgttttactttctaatatggtaaatattaaacagttctttgtaattaaaagatgttatgcatataaaagggtcctgagaccaaaaagtttaaaaacatatgcctatgctattttctttgcctagaactcttctcttttttctctagagaaatcctacacatagttgtagagttaatatttaggtattcattttaaaaaaacatttactgagcatcttatcaagaacctggctttttgttgctgttggggacatggtaccaatcccttatggagatcacagtctggtggggaagacacattaaacccagtatgttgaatgttaccagtgatagcatataaatgttgtgggagtacaggctgctgtcagagtcttgcaaagagccactttcccactcacttggaacatatgactggtcaggttgattggattatacctcctatatttgattcttcatagtcagacagggaaagtggccgaagttaaaagaagatgggaactgtttacttgctgctctgggggtaaagaaggatacttcaaatgtattaaatgtcagcctacaccaggccctatgctggatgttttaacaaatgtgattttatttttaaaaagtctgtgcagcagattattatccttattttgcaaatgagaaattggaggctcaaataaattaacttgtccaatatcttatggtttgtaattggtgaagatgggattttgatagtgttctgactctaagtccaggctttttcactgtagttatgtgttgctaaatgcatggctctttgaaggtatttccagatggttgtgggaaaccttgccagattggaatgcgtaagagaaggtaggaaaggtctcaggaagaacagagagactgcttaggacatgcttggttgaaggaattatttgtgagttttggctgacatggtttttctgtacaggattcaacggccataggagaatcaagcttttgtactccctaaccctcaatccctttaatccttctctatgtcatctgatgctagcagcaaaggtcacctgtctgtctgattaggttacaaaccagagactgggtatttgaagcccaaacttcttggatcttgtaggtttttgggaaaggtgctggttaattgacctcaggccagtggtgcagcctggaggccccaaaccctagagcttggtaaactatttccattattttaaaaagcctattagaagttttgctttacctaggatatgtgtggatacaggctaatgaaaagattggatttctatctttctttaattctttttttttttttttgaggcagggtctcgctctgttgcccaggctggagttcagtggcacaaacatggatcactgcagcctcagcctcgtggsctcaagcgatcctcctacctcagcctcctgagtagctgggaccacaggtgtgtgccatcatgcctggctaattttttaaatttttgtaaagacagggtttcaccatgttgcccaggctagtcttttaactctggggctcaagggaactcccacttcagcctcccaaagtgctgggatcacaggtgtgagccaccacagccagccttggatttctttcttttaggtcaatccaatatgatttaggtatgctacctatgatattctagaacagggttcaacaaactatggcctgtgggccaaatccagtttactgcctgcttttataaataaagttttattagaacacattcaagttcattcacttatattttgtctacggatgcttttgtgctacaatggcagagttaagttgtgcaacagagactatatggctgacaaatcctaagttgtttactrtctggccatttacagaaaaatttgctgatacttaattatgatcctttctatcatggcacttagcacatagtgttttaattgcttgtctctcccacttttgtaattagccttctgagagaaaaatgagatatgattcatgtttttatgccccatgctgatcacagggcctgatatatgaagaacattcaataaatgtttaaatgggcatatcatgggctgatcaaaaagctctaatatgcaattatatatgtttttgttggtgaggtagtagagaaacaatgccttaatctttgggtgtattctgctctctccctaagttcccactaccccttcatcccactccccaatttagcagaacaaatgtagagagaaataagtttatgcagagatatttctttttgtatgcatactgtttatcatacttttttcttttatcaaaccattgcaggctgggcgtggtggcccatgcctgtaatcccagcacttcgggaggccgaggtgggcggatcacttgaggtcaggacttcgagactggcctggccaacatgctgaaaccccgtctctactaaaaatacaaaaaattagccgggcgtggtggcgcatgcctgtaatcccagctactcggaaggctgaggcaggagaattgcttgagcccagggaacgaaggttgcagtgagcagagatcatgccactgcactcaaacctgggcaacagggtgagactctgtctcaaaaaacaaacaaacaaacaaacaaaaaaccaaaaaaaaccccatttcttcaatgttcttcttgcccatattatcacctgtggcttctaaaagatgaaagcaacacaaggccagctatctggtcaccctagcaaaaaggcagtggtgaaaatggaattttgaagtgctggcctgggagtcagcagacttgggctctcactgtggctctttagctgcctttgactttggcacatcacttaacattggtgagcttcaatgttcaacatacttctattgaatcacatctggaacactttaaaatttaatatttatactcctcccttattttgaaaaggatttgaataactagcaagaggtagagaggtgacctgtctagtcttatcactgtctttggctgtcagacaagtagatgattaaatggattagggtattttaggtctttgattagtgccttctaaaaggcgtcacaaccacagcctcttcaccctgtccttactttctgtcctgtgacagcttcttctattgcctaggaagttaagatctatcttctttgagggtcatctgaagagtattttgccaaggaagtagttgtcragatccaggtcaaaaggaaagaggaattttagcatctaggaattggaagaaatactagaaacttcagtcaaaatacctttttcaaatagtgaccttgaggcctggagaagagaaatgacctccctagatcatatggtagagctaagcctagatttcaggctcttcctattgtgtgcatcattcagactaggtgttttccaggcttgtaagagaggactaggtgtcacagaaagagctaaggtggcctaggctcttgtgctggttttactgctacatggacatgtaatggtaggcagaagaaactgtatcccagaccacctaaggtgttgtatcagatgagctcgggaccttcagatatctaaaaaatatttgcctgatataactgtctatgagaaggcatgagatgtgagaggtttccccagtcaatggctgaccttatatgtatcagcactgacaaaatgaacaaaaaggaaaattacacatcatttgggcactgggactaattggctgttgttctgtttccagaaagattatgttgatttacatttgtgtatttggctgattaaaaataatagctcaattgaatatgtatttctttgattactaatgaggccaaattttttcctgtgttcattggctatttatgttttctctcatttgtgagttactgattcacattcttgtctagatcccagtatactcccagtcctatgcaagacttccctgccaagaaactattagggtgataaagcattgtccttgtgggggagctcagcattttcttggggagacagttacagtctagatgaaacacctctgtcactgtacaagtagccagttaagtgcctacatgaggagtcagatgctagaagctaaggatgctgacacaggtgggtgataggttctgggtggcagctctgagtaattttgtctcttgcttttcttacacagagttttgccgaattgacaagcccctgtgtcacagtgaggatgagaaactcagcttcgaggcagtccgtaacatccacaaactgatggacgatgatgccaatggtgatgtggatgtggaagaaagtgatgaggtgagctctcccatcctgctatgtctctcttttcttcctgtgtgaattagtctttgaaagctacttagacagcctcttmcctggggagagatgttctctgctggcttgttctttaggaactcatccctatcagggaagatggctcccagaagagcagccctctaggagtcagcctgtcagagtgtaggctttatgcttgtgtctgtgcctgggctggctgccccctgcctactggctagttgtgtaacactgactaagctgtgttgtttgggagggagagagatccctgaggctggtctctatggtttccttgcatccttcttgcaatcctgctatagatggagggcatcagtctgttctcagccctgtgttggcatgagggatagaagataagacacccagatcctgccctctgggagtttatactctatatgggaagaagaaacaaattgttttagaaagatcattctgaattccaggctgaagtttttgggagccagttgagtggtctagatagtaagagttaaaggagtctctaaatggaaaaaagctctattgttgtttcatcttttggcattattgtacctgtggctcagcagatcccagagwataaggtcattatgtgtgaaaagatttaaaagtttgttcatttaaagctcaacatataccagtagtttggtgaagctaccaagttatgccaaatcttcaatagtgatgtagttatatcacgatgggggagatatccccattctctctttcctgccagcctacctttgagttttgagttcaattttggatcccacattgtcagatccaatgtgaggaacaatgagggcctatacagagaggagtgacatgagtgatgaagagtttggaaagtatgaaacaaagagcattcaacacaattatgtttattaagcgtctatgtaccatgcactgtgctaggcatggagatgggactgtaaataaaacagatacagtctgtctttatataacttaaagtctagtgaagagactttagcctggagaagaggagactcaggtaatataatttctatctttaaatacataagaagtaaatcaatcagacttaagtaatgatgatagtaaagtgaaaaccatgatactagctctcattgattgaactcttaccttatgccagtcacagtgttaagctttttgcatagttactcttttaacttcaacagatttatgaagttggtattattactagggtatggagccttagaaaggttaagcattttcttcagggacacagtgaatatcagtgcagatctgatttcaaagcccatgctcttaagtactgctgtattgtttctcctattctaagagcagaaccaggtccaaagtaaagtggggaaagtaaaaagtaggcattttcttttagaataaagaattgactaatagtgagagctatcttgtcatagaagaggcttccttggtagacagtgaactccctatcactgaagatgggcaagtagcatacagaactccactgaatctgggtgtggtggctcatgcctgtaatcccagcacttcgggaggccaaggcaggaggatagcttgaggccaagaatttgagactagcctggacaacacagcgagaccctgtctctacaaaaaaaaaaaattggctgggtgtggtggcatacacctgtagtctcagctactctgaggctgaggctggaggatcacttgaacctaggaggtcgaggctgtggtgcactatgatcatgccattgcactccagcctgggcaacagagcaagaccctgtctctaaaacaaaacaaaacacaaaacaaaacacaaaattcactgattggtcaacagaggggatttgtctgtaaggatgaaccagataatgtttaaggaatttaaaggaagagaaaaaatagacttcctgtataaaaagtaaaatttggatagaatggaaagggttgggcttactgagtagtggagaatcagtgtgagcaaagctgyagaggtagtaagaaatatagtgggttkgtttggttagacagggactgtggtagaaaaccacagaacaaaaagttggaaaggaaagtggggcccaggctgagatatgtatacttgttgaaccaggcaactgtaggttcttgagcaaagacaacgaccatgatgtaagtatctgaaatttggttacatccagaagtgtcactgacctgtaaaggatcaaaattttatttgtctaacctgagaatacagccatgttcctgggggtgaatgaggcctagtggcatcctgatcactgtcccagggcctggccagaaaactggggaatggatgaagaaggtgatgtaacccaagatctataaattcttggatatctttgttatatgctcctcatccttttttttttttttttgttacatcctgctgagttgctttgtcaatgaggggaggaataaaatgttctttttagaggaatgttaccacaacaaaaagctcatcagcacaaactgttccgaaataacacaaaaactgttaccctgctcttctctgcgccagtggtgagctgttctttttcagtatagtttttgccttgccttggtttccactgctctccctgcaatctcaggcctcacatggttagagaggcctgctggtctaggtttgcatgatcaatcacaagctaccttcctgagagagaaagtaccaaaatgtgtgtgcctaagtcacttcaaacatgtatmagatagccttagagttcaggatctaactagaaagttgggtagatatctcagggtttagaatgttgtgtaatggatggtggggtaccagaaaccctggttcttttggccattgaggacctgaagggttttttttttttcattcataaaacttttattccacttacatgaatttaatacacgtgttcttaacaattatgcttggattattaatgaaaatttcataagatattaaacaaagctagccatcatctcaagttatttccttgttaactatttttacagcacatgcatgttaggcaagtatcaaaaaaaatcacaacagcaaaaaaactaaaaaaaaagaagttaaatacatgggtttttctttttttgttttactgctgtgcttgatatacgtgaagtaatgaatatcaagcaattcatttttactgcatctttacttttacatttgtttttaggttgcctaaaacatttaaatacaaataaaatgagtgtagcaaaaataatgaaagccaacagcaggtaactttacaaataatggaatgtgaactgtttctgcccttatccagagtaaaatgggtcacaactttgtctaaaggaacacttctgcagccgtagtcaaaggtgtgcacagtgagattgaatattccatagatatacaagatgtaacatgtgggccaggtgtggtggctgacacctataatcccagcactttgggaggccaaggcaggaggactgcttgaggccaggagttcaagaccagcctagtcaacatagtgagaccttgtctctataaaaaaataaacaagtatgaaaaaaaaaaaaaaagggccgggcwcggtggctcacgcctgtaatcccagcactttggaaggccgaggcgggtggatcacgaggtcaggagattgagaccatcctggctaacacggtgaaaccccgtctctactaaaaatacaaaaaattctccgggcgtggtggcgggcgcctgtagtcctagctactctggaggctgaggcaggagaatggcgtgagcctgggaggcggagcttgcagtgagccgagatcgcaacattgcactccagcctgggtgacagagcaagactctgtctcaaaaacaaaaaaaacaaaaaaacaaaacaaaacaaaaaagatgtaacgtgatatccatgggatatctgtttctaccacagccgtttaagtgctccaaaccttaaagtacccacagttactacacctgtgactggaaccaatgatcccttttactccctgccaggacaaaccaatgtgtaggcagttttctttgcttagacatgaagcagttttaacactggcccttgtgaagccacaatgtaccaaaagtactatgccaaacatttataacctttagaaaaattccacatttccatattggccacctcaaaatggaaacagataactccctaaatgttaaccggccctgctctcctaatattaaacataaaaaccacatgggaaatatagatattcaagtagaagtagcataaacctgtcataaatcataaacaaaaactctttgtgggacagcatggatgacaaatggtctactatgtaacttttagaatgaggcagacaaagttggaaggctggttaattttccccttgttctcctgcttcagcttcatttccttgggttctgatgaaggacctgagatttttataagtcatcttaaaagccttgctgattactcaagagccttagtagaagtctgaaggggtgctctattgaggcctcatgtattcagcctcctactggtaacttttctgcataactggactgtaaccccagttacagatcttttaaaatttttgccatttctgaagtaagtctttattcctacagattattgtgactagagtgttaacttttcgttgtatgaatcaaagcatgtcttcagggcctcttgcactattaccccagtacctagattcctatatacattcttatgattgcctcttatagttatcttcttatagttttatctcttctttgattcattttcatttcttttttttatagacacatttattcagcatcacgatcaaactattacatttagcaatcaacagcatgagtaaaaaaaattatctacactaaaactctttgttggcatgctttacattttccacagaaaagaaactaaaataacctgttatacaattagtcacaaatacagtcctacttttttttttgcctatacacattaatattgtctaaaacatgtcttctttgtagcagctaggccctgccaccactgtgcttggctgagttcacaaatctgttgtaacctgtagcttctttgtcacttctctggctctcttctgctaagtatttttctggcagtaattaaaatctgccactgccatagctactgactggaaccaccatagctgccttggttttgtgttttggccagtatagaatccagagcttctgcctccaaagtttcctcctttcgtgcatccaaaatttgaggactgattgttataattgccaaaattattgtagcttccaccacctccaaaattgctttcactgccaccaacaaagctgcttctgcctccatcgttgttatagctgtgagagctgacactcctgctgtagccactgccctgatttccataatcctgcctccacttccatagcctctgcttccttcagcgtaaccagggctgcccctctataaccactgttgttaccaaatccattatagccatccctgttgctaccagatcaccaccagcatggctgctaccaaagtcaccacaaccactgaagtttctcctccatgaccaaagttgtcattcccaccaaaaccacctccacgaccatcaccagagtttccagaaccatttcgacctctttggctagatgaaacactagccatctctttcttcgacagggcatccctaacttcatagttgtggccattcacagtatggtatttctttttttttctctcgagacaaggtcttgctctgttgcccaggctggagtgcagtggtgtgaacacagctcactgcagcttggacctccggggctcaagtgatcctcccatctcagcctcccgagtagctgggactacaggcgcgcaccactgcacctagctaatttttgtattttttgtagagatgaggtcttgccatgctgcccaggctggtcttgaactcctgggcaagtgatcccctgcctcggcctcccaaagtgctagaattacaggcatgagccactgcacccagccagtatttcttttaaaaatatttgtttatttattttgagacaaagtctcacactgtcggccaggctggagttcagtggtgtgcgcatggctcactgtagcctttacctcccaggctcaaacgatcttcctgtctcagcctcttgaatagctgggactataggcacatgccaccatacccagctaatttaaaacaaatttttttaaatttaaaatgtatcttttttaaagcccccaacaaatatccttttcatagttaagtgggcatgtggtctttgagaatcttctcttgatacagctcttctgtccaccttatgtagccttgcattcacggctgcatccacctcctccacagtggcatatgtgacaaacccaaagcccctggagcacttggtatttggatctctcattaccacagtctgtgagtgctccctgttgctcagaatggctcattggaccctcactggtcatttcaaagctcaactctctgatgaagaacttctacagctgttgggactacttaagagactctgtcttagacatgatagcagtgggaagagagactttaatgatgttttcagcggcatccatgggtagaaaaagccattctcgtttctaattgctgaatatactctgctgtgaaattagacttagggcaaactgagactcagtaggcatgttatagaaaaatatataatcaggccagttgtggtggctcacagctgtaatctgagcaccttgggaggctgaggcaggaggattgcttgagcccaggagttcaagaccagcctggacaacatagggagactctatctctaccaaaaaaaaaaaaaaaaagccagatattggcacagagaccctaaaagagactttttaagagtctcttaaaagaaaagaaaaatatataatcatttgtgtaggggcagctagtttggttaagtgccatctttgcttgcttctcttctggatagcagaggctatgtattgtgggcccttcagatgtgcaagatggctctattggtgatggtgcccttcttgcagagctggcagggagttctaccaggctggcagtatgagaattcatgacctgtgttctgttcaaacttctggtggggtttgctccatgggcaaaagatttgttgcagtgggatggtactgttaggttgtccttaacagtatgagttgggcagacaagggcctacctaagaccattgtccccttgactggaccagactttttgagagcagtgctattttcttttctggagcctacatggcaaatcagggcatttattcagtcattaaacaaattcttatttaatacrtattaaagccaggcactattcgaaggctagggattccacagtgtacaaaacagataagatccctgcttttagggagcttgcgttctagtgatctgtatgtcacaggtgattaagtgataagaaaactttgaaattaggcagaactgtgatcagattatagtagtctagtgactttgcctttggttttctcagggtaaagtggtagttaatgattcctaccattgcagcgttgttgtcaggattaagtgagaaaagtgctgtttaaagttcccaacacaaagaattctcaaaactcgacaatagaaaataagccaggccaggtgtggtagtggctcacgcctgtaatcccaacactttgggaggctgaggcaggcagatcacttgaggtcaggagtttgagaccagcttggccaacatggcaaaaccctctctgtactaaaaatacaaaaaaattagctggtgtggtgacacgtgcctgtaatcccagttactgggaaggctgaggcaggagaatcgcttgaagccgggaggcggaggttgcagtgagtggagatcgcaccactgcattccagattgggcaacaaagtgagactctgcctcaaaaaaaagaagaagaagaaggaagaaggaagaaggaagaagaaaataagccacttaataaaaaatgggaaaagatttgaacagagacttcaaagtagatatatggatggctaataagctatgaaaagatactcaatattattaaccattagggaaatgcaaattaaaaccataatgaggtatcaccacatgcctgttagaatggctaaaaataaaaaatggacaatatcaagtcctggacgaggaggaagagccactggaactcttgctgatgggaatgcaagatgataccgccagtctggaaaagtttcacagtttcttacaaagttaaatatatgtcccagcaattcttcctctaggtatttaccctatgaataaatgaaactttatattcacagtagaacctgtatatgaatgtttatagtatctttatttgtgattgccaaaaactggacataacccaaatgtccttcaatgtatgaacggataaacagactatggaaaactactcagcaatataaaggcatgaattttttggatgaacacctgtggggaaaagcaaaaacaaaaggcaaaaacaaaaagcaaaacaaaggcatgaactactaatatacacaacatatgtgaatctcagaggcattatccgagggaaagaaaccagtctcaaaatattacatactatgtgattctatttatatgacattctgagaaaggcaaaactatagggatggagactaggtcagtggttatcaggggttattagtgtaggggaggttttgactacaaggggaaagcatggaggaagtttttgggagtaatggcctaactgttctgtgtccagattgcaagggcagttacatgaatctattaataaatatgtattaaaactcatggaactatgcgccaaaaagttaaatttcatcatatgttaatttttttaaagttcccagcatagtacctgacacgtaattcaagctcagtgaatactcgctactttcccttttctcttttcctctatatatccaggaaatcaactagcatctgacagttgtatttttcttagatagggtctcactatgttgcttaggctggtgttgaactcctgggctcaagaaatcctcctgcctcagcctcccaaagttctggaattacatgtgtgagccaccacgcctagcctgacagttgtttttttttggagatggagtctcactctgtcacccagaatggagtgcagtggtacagtcttggctcactgcaacctctacctcctgggttcaagcgattctcctgcatcagcctccctagtagctggaactacaggcgcgtagtgccacacccagctaatttttgtatttttagtagagatggggtttcgccatgttggtcatgctggtcttgaacttctgacctcaggtgatctgcccgcctccagctccgaaagtgctgggattacaggcatgagccaccacgcctggcccctgacagctgtattttaatgtttgtctgatgtattttgagcccctttagggaaagaactgctcttatctggtttgtctctcttttccccagtgcccaacaaagtctgttatagaatatgtgcttaatcactgtgttgaatgactgaccaatattgctatagcagaatgctatcattctgctatgggagtcttagcaagggtgtgatcacacattttaggggataaggatgagtaggtagcagtatgaatccaggaagctacaagatctacttatgacttctgttagtgtctgtggtgtctggtatagaagtataacacagggttatgagcttatgctctggaatcatacagactccattctgcctcttccagctgtggaaacttagagaagttacataatccctttccacctcagtttcttcattagaaattggagtaataatagtagtaggcttttcatgaagatgttgcaaatattaaatgaataatgcatgtaaagcacttaatacaatgcctggcacatagaagaggctcaattaaagtttttacgttatcatcagaaagaacatatattttgatgcaaacaagcctgtattcaaaacttggctttgccacttactggctatacaactttaggcaaataaccttacctttctgagccttgattttttttttaagctatttgaagagggatgttgtgagacattaatgtatgtaaagcccctagcacaatgcctggtacgtgataggtgctaaagccatgtttttttctccctcaacatgagggtacaatagtgagggctggcttgtatagcaaaattccatatcagctctatcaccatcccatggcaccacagcatttagccatgggagccactcccagcagtgtgcctaacttgactagggccaggacactgtaggaggcagaggtagttctgttttcgcttaagtggttgatattaagagggagggcatgataaagcaggatcacacatttatagggactacaacttttctggcagctcacccagcctcctacatatgcctgtgtactttttttttttttttttgagacggagtttcgctcttgttgcccaggctggagtgcaatggcactatctcggcttaccgcaacctccgcctcccaggttcaagcgattctcctgcctcagcctcctgagtagctgggattacaggcatgcaccaccacgcctggctaattttgtatttttagtagagacggggtttctccatgttggtcaggctggtttcaaacttctgacctcaggtgatctgcccgcctcggcctcccaaagtgctgggattacaggtgtgagccaccacgcccggcgcctgtgtacttttaaaaaggtctggcttttgggccaggcacggtggctcatgcctgtaatcnnnnnnnnnnnnnnnnnnnnnnnnnnnnnnnacacgaggcgggtggatcacctgaggtcaggagtttgagaccagcctgtccaacatggtgaaaccccgtctctactaaaaatacacaaattagctggggttggtatcaggtgcctataatcccagctgcttgggaggctgaggcatgagaatcacctgaaccccagggaggcggaggttgcagtgagccgggattgtgccactgtactccagcctgagtgacagagtagaaatgtcatgagacctgtttagagtttagtgggggtagaaatagacttgttttctatgtttttcattgtcccatccagagtaatgctaggtcctgggaggctgtgagagttcgggaagctggcatcaggttcccgatgccaccatttggcttcagcgctcccaccatttggctttagctcatgctactagttcatgttatgctgtatttccttaatctatgctatagccaccccaaacagaatcagagctaagggagctaaactctgaggggagcagtcagcaggttcacttgcaatatctaaagtgccaggaggaacttggactttataggtagtagtatatagggagagagtaggaagcccagtgctgtggttaatatgggccaaattagatgaagattaagtagctgggttatttkcagatgttattaccataattaataataattrtattcccttttgtgctctgggcctcactttcttatattcagatagctgtagacaacccttaagtgttctgcctctagtttctcccggaaagcccatgttgtacatgctgccagtgatcttcctaacctacatttgggttctgtgtctcctgcatgatttccttttcctgtttcctttaacttcctgtacctaccactccatctctttaaatccgattttagcctttcttttctttgtttttcattgaaatatatttttaaaagagtcagggtcttgctctgtcctctaggctggagtgcagtggcacaattatggctcactgtagccttgagctcctggactcaaatgatccttctacctcagcctcccaagtaggtaggactacaggtgtgcaccaccacactaggctaactatttttgtagagacagggtcttgctatgttgccaagtctggtattgaactcctggtctcaagcaacccctcacctcagcctcccragttgcyggggattacaggtgagagccactgcaccttggctacctttgttaattctctggacatacctcctaccgcttyggtctggctccaatcttctttgtcttataaacattttatgtttatttccagtcccctttctttgctcaggtagttctccttacctggaattaacctcttgtgcccctccctgcacccctagccctgtctgtatcaatcttagttgtcctctagaatgtgccagcttcattttatatgaaccttccctgactttcccattcctactgatcttcctcatctcaatactaactcccatagtacatagtctctatcgctcgatttagcacttaattagaaattgccttgctttgtgccctaatgattttgattgtattgttttntctataactttgtgttcctgcactaatactggcattattaaagcacaactcatcagattacttctaccatgtgccaagccaagctgattacatataaagttttgtttaatccttaaccactctgtgaactargtgttattaactccattttagagatgataaaactataaatgagtggcttacttttgcttgtttaattaatctaaactctgctctgtcattcaatgctcccaccatttggctttagctcatgctgctagttcatgttatwctgtatttccttactctatgctatagccaccccagacatgctcttcatatcttatcactgtgcccctgttccagataaatccttatcctggcatttctctgcttcccactttgcctgtaaaaatcaagccaggtttggtggttcatgcctataatctcagctacttggttgagacaggaggatcgcttgaggccaggagttctagaccaggctgggcaacataacaagaccccatctctttaaaaaaaaaaaaaaaaacccacacatttcagtgcaatgcctggaacaaaacaacaacaacaacaacaacaamaamaaacaaatagaaacaaaaggaaaaagaaatttcatttgtccaccaaggcctagatcagggtttcggaacctcagcattattgatattttgggccagatagttctttgttgtggggagctgtcttgtacattgtaggatgtttagtagcattcctagcctctacatactggatgccagtagcaaacctttccccttcccccttccagtttgacaaccaaaaatattgccagttactattgtcagttgtcaattttcaaactgccccttgttgagaactactggcctagattaaatgttgcttcatccaagaaatatatatatattttttggagacggagtcttgttctgtcgcccaggctggagtgcagtggtgtgatctcggctcactgcaacctctgcctcccaggttccgatgattcttctgcctcaggctctctttcatcatgttggccaagctggtcttgaactcctgaccttgtgatccatctgcctcgggctcccaaagcgctgggattataggcgtgagccaccacgcccagccaatccgagaaatcttgtttgttctcctacagtgggaagtaatcctttctcatgttcgagagtacttggcatgaaccttatgtttgtcatgttgctctgttctgtattgtaattgggtccatccttaactgtcctaccagattttgagttcctttaggggtcatgaactaggttttattcattgctgtttctcataacattgtgtttggttcaggacctttctcttaagggtgctgagttgacgttatttttgaattttgaattcgaaaacaaagatactatcttattgttttatgccctttaaatagtttctctagtgcaaaggaggagtacagagtgggctggtcaatggtactggggacagagtgctttggacttgtgagttccctgtcaggataaaagctgaagtcagtgttgggttgtttttctggagttgctatagtctgggctctagatatgttagtatatgacctatacgtctgacctcctctgtgaccttcttccctacccttctgccctatgttatgaatcatgtgcagaatctggatggaggtaagattactgtacttaaaatgataggaaagactttaagaataacacatactataggagcacaagtgaagaaaaaaaggaaaacactgagaatgcccaaaggctatgtagtagagcaaaagtatgtacttataaagcaagaaagatagtttcaggtatacttttgccaattattagttgtttgactttggaaagtttctctctctctctgtctctttcttttctttttgtttcttttttcttttcttttctttcttttttgttttgaaatagagtcttgctctgtcacccagcctggagtgcagtggcatgctcatagcttactgcagcctcaaactcctgggctcaagcaatcttccaactacagcctcctgagtagctgggactacakgtgcacgccactatgcccagttaatttttgtattttttgtagagacggggtttcgccatgttacccaggctggtctcaaaactcctgggctcaagcaatctctgcccacctcagcctcccaaaatcctsggatcgtaaacatgagccaacgcacccagcctggaaaattttcttaaactctgtgaactttcatttccttaccgtcaaattagtcagtaattcctaccttgaaagattatggcaaagatgaaatgaaatcatgtatatcaagtacccagcctatggtctagtttatagtagcagtatttctacttctttaactcgtactaccattgctatgatgtactaggcttgtgctgtgtactcttgcatatgctgtctcatataatccttacaagaaatctctgagacagacagtaatttttttctgtataacccataaggaaagagactgaattagctcattgttaaccatttttgaggttattgtaactcagatgtgcctcaggctgatgataatgttctaaaattagattgtggtgatagttgtatacttctgtgaatatactaaaaactatggggttttatactacaattagtatgtgaattaaatctcaataaatatgttttttaaaaaagtgtcaccgcatyggttggagtggtggtcacctttcgcttgcctttctgtagcccagcccataacaatccttagggccctgtagaaaagcactttgaaagtcatgttgatttctatctccatttttaatttttattttttttgagacagggtcttgctctgtcacccaggctggagtgcagtggcgtgatctctgctcactgcagcctccatctcctagggtcaagtgattctcatgcctcagcctcctgagtagctggggctacaggcatgcaccaccacgcctggctaatgtttttgtgtttttagtagagaaggggtttctctgtgttggccaggctggtctccaactcctggtttccagtaatcggcctgccttggcctcccaaagtgttgggattacaagtgtaagccaccatgccctgcctctatctccatttcccctrcctccaactttgatagagatgcagtggtgctttgaagtctgaagtaccatggttgctggaagcagatccgtggttagctaactgacagcgaggttgcctcagttcctggggaggtatagatgacttttgagaatgtcagactgaagagtcctggagcattctcttttggagaatttctccctctttccctctttttattccttccttttccttttttgtagttagtactgcttctggggaagttaagatgtcaaagaatctgtgggacaaccctggtggcaattccctcttacccatataccaggggcctgaatcaatttcttgacccctactatgtgacattacatgtgaggagttgtcaaagacagccagccaagtggctctagttttatttttccttgattaaccttgtgctcagggcctctctctgattcccatggctgctatatcactcccagaggccataccggcacctgagaagcagagctctccttttggtccctggacccaattctgaacataacttttctttgcattccctgcacacagctttgacagcctggagctactgctgctgctgctttttctctttctgctcctcctcctcctctttctcctttcttttttttttttagatggagtttcctcttgttgctcaggctggagtacagtggcacagtctcggctcactgcaacctccgcctcctggattcaagcgattctcctgcctcagcctcgcgagtagctgggattacaggcatatgccagcatgcccggctaatttttgtattttgagtagagacggggtttcatatgttggtcaggctgatctcgaactcctgacctcaagtgatccgcccgccttggcctcctaaagtactgggactacaggtgtgagcaaccgtgtccagcctctttctcctttcttaaaaaaatttactatatgcaaatttacttcagcattggtttctggtatatatattttttgctacagtaattcttctttgacttcagtttggaggcactgctctgccttttttctttctagttctctgcctgtatcctggtgcagtcatcatcttgtctcctacttcatggaacattctgaccccctgctcttaattcaggcaaagcatggattgaagtctgctcaggccctttggacagaacagagatagctgacaccatgaatgacataatttttcaagtgaaacctgctccttaggctaaagaaatgtcctgttcccattcttccttgtaagtacttatagggtggctgtagaattcacctaccaggagtggctcatcagtttataggccgcaacttccattgagttcaagttatttggcccagctcatacattcagtcctaacttttgtgagtttattagaatagctttagaataaactatttggactttgactttttaaaagtctaagcatgagctttggagtccaacctgggttcaaatccaaaccttgcaatgtactaaatatatggccaagtgatttggagactcactttcctcatctataaagtaatgatgacaataagatactctttgccatgaacaagccctaggctagtgagagacacaattatgtaaacaggcagtgacaatagcacattttaagggctgtaatggtagtatgcataggtcctgtgggagtttccagaggaatcaggatgcagtgatcttatatgtactggtgtagcagaagccatattgtcagccagcacgcaggcaagggtaccagttcccagacaagctgagctacgtatcagtgagagtaggcatagtttgcaatctgtcccagtaccttagccagatacaagatgaggcagcagctcccccagatggtacccctcatgtttccaggaaaacccgacggtggcttgctttgacagatagggaaattctttctcactaagcaggctgttgttttccttcccccctctttgttattgagtctgctttgtcttttctggatggtaatcctgtcgatgacagggatgagatatatttgtaagacttgtttgtatagatgtctatatatgtgtatatgtctatatgtgcctttgtgtttgtgttttttttgtatgtgtgtatacatcattttgtgcttgtgtgggtatgtgtctttctgcatttagatgtgtctgtgtawgacaagaagtggagggagaagaggaacactgagccaaggaagtaggggctgaaagaaagcccataaatgaggttgaggatcaaggagcaggttagggacaaagggtttggcctgaggtataggacacaggacctggaagtaaaagcagagccagaaatgtaatcagcagcccaaagatgctgtcagtctaggcagaatctgggccccacagagtggtaggcagaatgcaggtatcacctagcagccaggaatggtcaagctagcagagagagaaaagccatgcttcagaaattaaaaacttctgactcttcctgtctaaggaggaattggcagctggctcccaaggccctgcttcccttcagacctaactggtgtttgtgtttgtttgactatatatgtattttttcaagtccttctgtgcatgtctgtgtctgcatatgcctcacattcagtgtacttgtacttcatagcattaagaagaattgtctgattcacttaagttcagtgagtttcctttcatttcctttcattcattcttgtgttcttctcctcacttataaatacctcctttgaaatctttcttactttttgatgtgctccttgccttctttctctcttttttcttcaaacatatttagtgtgtgctatgtgctggatgctggatatgctttgcatattcatttaaagactaataagatgaatttactacctagaaaggtctcacatattactgaggcaaaaaaaaatacatattcaatccccatagatattgtaacaagagatgagccctgcatgctctggaagtacagaaaagagttaatccatctgaggatgataggaaacactatccagaaaaggtattgcctgagatgaatttttggagatgaataggggtttacatggggagggggctgagcatgatacatcatgtggagtaacaagtatgatgtccttgggaatctgtggtcagtggttcttttaacttgagcaaatgtaatagtggggcagggagggagaggttgggaataagattagaaaggcaggctgtagccagatttgtgtgccatactgaggaacttggatttcatcctaaagttgaaaagctagaagtaaacagagctggccctaattctgactgaaggtatgtcaggagcaggttttgcagaggaggtgaagttggaacttggtttttaaagatgagcaggagtttactagatgaagaaaggaagaagagcattccaggaaaggggaacttaacgagtaaaggcaggaggcaaaaaatatggcaactctgggagacatcaagtagggaagtatctagagaatagttatttcatctatgagatagggacaccagtaacatataccttcaatggctgatgtgaggcttgaaaaatatcctttgtaaaccatagagctgtgtgcaaatttctatagttgttgtgttatccagtttcttctaattttttgtcagtacccaacatgcatcaggccttctcaggtatagatccacataggcatacacctcagcagtttggcactggcttgatgagaggcatgccctcttttatctagccacttggtgtcttgaggaggcagaggtaagattagaagtctctgggaagtcactggtaagattagaagttgctgggtcccttgacaagggggctcatattctttattcttgtttatcctcagacactaggtttctcctcagataaaccagtataaatagtatgagcccccttgtcaaggggacctaggttcagaatagtcaaacacatatgaagcatcttctacatacaggcactgtaagggactgtgccttaaattatctccttttctccacattgtaactgtgaggtagtttgcattttacaggctctaggtgacacagtggtaagtggcagaaatgtgattcaagacattatctgtgaaattctttttcctctgtgacacttcataagctttgtgatttctctggatgttgaccaagctgcgtgatcagttaagagtggaaaactttgtgcagtctcaggcagtatggggatggaggagttggagagaaagttgcttggctctgtctttgggattgagtggtaacactttcctctgcatagaacagtggttctttccttcgaggaccaactctcttctatatatctgtctcacctagatgctttcaatatgtctgattaatctgtgtgtccttggatctcagcacaagacctgtcacatagtaactactcagtaaatattggttaggcaaatgaaagaacaaatggtgcttaacaaagccttctggaactcccaatgcctgcactattcttctgccttctcttgtgtagtacaatactcttaataggatattttgtccttaaggacacacacacacacacacacacacacacacacacacacagtgtgtatatatattttgtattgctcattgatgcataagcctaaatcccccctcttagagttgattagatgccaggagcttcttgggagaggcatgagtttgttttactctcttatattctttgtccctaagcctcttcccataccactgcccaaaggtgagtgtcatttataaggaacacgtgatgagctctaattctttttgccaagtctattgaagtgggtgttctattttggaaatggagtcctagaggttttcctgctgttgagtgtttggctgggtttgtgatcctctcagggtgtttgaaagccatgtatagggatggtagcatgagggaaaactgagcagtgaatcgaagttgccgtttgttcatggggattgtcagggagagagatttcctcagcacctgaagccagagcagagggtggatttattatatctagtccagggatcagcaaactgtttttttcgtgtagcctgcaaactaaaaatgatttttacatttttttctttcataattgagattttattggttgaggatcagtacaaacatttcaatttgtacacaattcttaacatacgtaccgaaaatctaaaaagccatgtattgtaattctttttttttaaagttattccagtgactttccagcttaaaatttggaagcaaattgtccttaagaggctatcaagtaccggtatgttcacatgttgataagctgttacatatgtcccaccaattcacaactgaatagcatgtatactacatattcaaatttttaatctttcacagcacagtaaccaagtgattaggaaaacaggactaccacaaccaaagatgttacagagtacacacaattctgacagggagagccatgatcaaggactggttttctttaggaaacaattctactaaaaaataacatgggaatagaagtaatttaaaatgttcaagacattaaatgcagggctgctgactccatattgtcatttaatatgcattgtattataggatataaaaactaacccccatctatggagtgttaagctgacagcaaagacagtcaaaacctcccataattcaataacccacactgttttctggttgtaccaaaaaataaacaaccagcgaatgatttcacctcttaaataaagcatttacacttaaaagatgggatgaggtgggattccctccttcttaaaaatgtttctagagctactaaaaaacttgcatttacaaaatagttgataaaaatattcctctggattgtacaagaagggagacagggaccactgataatgtatgatgtgtggtattattcagacttggcttccttctctcctgcctcatcagaggctggactctcctcagttttcttttccctgtttactgcaggtaaatgttctttagtttcttggttagccacttcggcctgttttccctttgctccccttttcccttttgtttgcacttgtttgtctgaagatttatcctttgctgctgcctttttcggcttcgcttccacttttgcaggagcaggtttagcagacaaccgcgccgatctcctcttgggctcttccttggcggccccttccgcggagctgaccttgctcttaggcatcctggcggcgtggagggtgcgtgcgggatgtctgtgagccgcggcgcaccgagagccttcgcgaagctgggctgcctggtcgctgccgctcctcccgccgcccgagctgctgagatccccagaaggggcggtgggagaaccctgatttttacattttaaaatagtttagggggaaagctaaagaagaatttcaagatgtgaaatttatatgaaattgaaatttcagtgtctgtaaagttttattggcatacagccactctcgttcatttacatattgtctattgctgcttttacacaagaacagcagagttgtgtagttgcgacagagaccatatggaccaccaggcctaaaatatttactgtctgactctttacagaaaaagtttatctggcctctagtctaacctatcaattttaaaaaaacagctttttggagaaagaattcacatacygtgcaattcacccatttatatacaattcaatgggttttagtatattcacagatatgtgcaaccatcacctcagtcaattaaaaacatttttgtcacctcaaaaagaaaccacatacgcattagctattgttctctctccacatttcccccagccctaagcaaccacgaatctactttctctttctgtagttttgcctattacggacatttcatgtaaattcaatcatataatatgtggtctgttgtaactagcttttttcacttagcatgttttcaaggtgcattcatgttgtatcagtactgcctgtacatgttcatgtatatatatctgtactttatttcttttcatgggcaaataatattctattgcatggacataccagttttgtttagcattcatcaatttatagacatctggtttgtttcactttttggctataatgaaaactgctgctatagacatgtataagtttttgtgtggacgtgtgttttatgttttgtttggatgtatacttttatttctcttgggtacatacatatgaatagaattgctgggtcatatggtaactgtgtttacctgttttaggaactgccagagtattttccatataaaaatggttcaagtggctaaaccatttttacattcctgccagcagtgtatragggatctgttctctccacatgctcatcaacacttgttattgtctgactttttgattacagtcatcctagttggtataaagcaatatctcattatgattttgatttacatttctctgatgactaatggtattgaacatcttttcatgtgcttaatggttatttgtatatcttctttagagaaatattttctcagatcctttgctcatttattttattttttattatttaaaaaaatttccatcttcattttatattcacggggtacatgtgcaggtttgttacaagagtatattgcgtgatgctgaggtttgggattctattgattttcttatgcagatagtgaccgtagcatccaatgggaattttttcagtccttctccctatccccactccttttggagatcccagtatctattgttcacatctttgtgtttgtgtgtacccaagatttagctcccacttacaagtgagaacatgcaatatctggttttctgtgtctgcattaattcacttaggataatggcatccagctgcattcatgttgctgcaaaatattttcatggtcaatatgtaccacattttctttcctttctttttttttttttttttttgagtcagggtctttctctgtcacccagactggagtgcagtggcatgattccagctcactgcagcctcaatctcctgggctcaagcattcctcccacctcagcttctgagtagctggaactacaggcatgcaccactgcctggctaatttctttgtattgttttgtagatacggggttttgccatgttgcccgggctggtcttgaactcctgggctcaagctctcctcccgccttggcctcccaaagtgctggtattacaggcgtgaatcaccgtgcctggcctgtatcacattaattaatggcatctaggttgatttcatgcctttgctattgtgaatagtgctgcagtgaacatatgagtgcacatgtctttttagtagaataatttattttcctttgggtatgtatacagtaatggaattgctggatcgaatggtagttctatttttagtactcttagaaatctccaaactgctgtggccgggcgcggtggctcacgcctgtaataccagcactttgggaggctgaggcgggtggatcacctgaggtcggggttcaagaccagcctgaccaacatggagaaaccccatctctactaaaaatacaaaaaaattagccggtcatggtggcgcatgcctgtaatcccagctacttggaaggctgaggcaggagaatcgtgtgaacctgggaggcggaggttgcggtgagccgagatcgtgccattgcactccagcctgggcaacaagagtgaaactccatctcaaaaaaaaaaaaaaaaaaaaaagaaaaaaaaaaaaatctccaaactgctttccacagtggctggactaatttrcattcccatcaactgtgtataagtgttttcttttctctgcagccttgccaacatctgtttttttggttttttttttttttttttttttagtttttaataataactttgcgtcctggtatggkggctcatgcctgtaatcccagcgctttgggtggcgggtggattgcctgaagccaggagttcgagaccagccagggcaatgtggcagaacttggtctctacaaaaaaaaaaayacaaaaattagctaggcatggtgatgtgtgcctataattccagctactcagaaggctgagacatgagaatggcttgaacccagtaggcagaggttgtagtgagccgagattgggccactgcactttagcctgggtgacagagtgagactctgtctcaaaaaaaaatttaaataaaataaaaaacctttacttatttttaaattgggttgtctttttggtattgagttgttaaagttctttatatattttaggtacaaatcccttatgagatacgtgatttgaaaatattttctcccattctgtgggttgctttttcactttcttggttgtatcctttgaagcacagaagttttaaattttgatgaagtccagtttatttatttttttgctgttgtttctgctcatacttttgaggtcatgtctgagaaaccattgtcaaatccaaggtcgtgatgacttacccctgtgttttcttctaagagttttaaaggcatctgaagcttaatgtgcactagatggattctaaatatcatctcatccaaaacctgctatatatactaccttcctcatctcagttgaaggcaagtccattgtttcaattgcctgggcaaaaaatattctaaataattcataatttttcctcaactccacatctattggtaaatcctgtgggttctccttttaaaacatatccaaaatagaatcatttctcactatcattccactgcaggcaccaagtctcaatagtctcctagcagataatcatgtctacatttattctcaatgtagcagctagagagcttttttgaaaaaaaaaaaaaaatgtaaaccagatcatttcactctcctcaaaacttcatttttttgtttggtgtgaaagccacagtctccacaaaagttagcaaggccctctgtgatctggtccccacttattctgatctcctctctgacttatattccccttgtcactcactgtagccacactctttggtgttccttcatactcttttatattcctgctttagggccttggttctagcttttgccgctgcctggactattgtttccttaggtatttagtttatgccctcatatttccatataaaatatactttgtggctgggcgtgatggctcaagcctgtaatcccagaactttgggaggccaaggtgggcagatcacttgaggtcaggagtttgagaccagcctggccaacatagtaaaaccctgtctctactaaaaatacaaaattagccgggcgtggtggcatatgcctgtaatctcagctactcgagaggctcaggcaggagaaatgcttgaacccaggaggtggaggttgtggtgagcagagattgtgccactgcactccagcctgggcgacagagggagactctgtctcaaaaaaacaaaaaacgaaacaaaaaccccaaaaatattctttgtcatttgtcatacttcatgttatcaaagagacctttcccagaccaccctatttaataatgaaatctgcacctctactccattcctggcacccagatcttcattatgaatcactttttaaaataatttttaagaacttatcatcatctggattttattatttaatcacttattgttttattatttattgcctagaatataaagttcataagggaaagggatctgttttgttcactgctatgtctccagtacctagaacagtacctggctcactgttggtacttttttgtatggattcaaagtactatctgggggggtcacttaaagagcttcctttagtatttttttgtaaggtgtgtcagttagcaatgaattttctcagtgtttgtttatctggaaatgtctttattttcacaagagttttgccggatgtacaattcttggttgacatcctctcacttcagtgagccctttgatcatgttatcccattgtcttctggcatccattatttttggtgagaagttaactgttaatcttactgggttcacatgtgtgtgatgagtcatttttctcttgctgctttcaaactttctcattgcctttgacttttagcgttttacttaatgtgtctatttgtggatctctttgcatttatcctatttggagtttattagattttctttatgggtagattaatgtttttcaaaacttgggaggtttttcagccattatttctttgaatatttttccttctcctttttctttctttttttttttttttgagacatagtctcactctgtcacccaggctggagtacagtggcacaatctcagctcactccaatctgactcctgggttcaagcgattctcatgtctcagcctccccaagtagctgggatcgcaggcgtacaccaccacacccggctaatttttgtatttttagtagagatgtggtttcgccatgttgtccaggctggtctttaactcctggccccaagcaatccacccactttggcctctcacaggtgtgagtctttctgctcctttttctttatcttccccttctggtattcatatattggtgtgattaatggtgttctacatttctctgaggctctgttcatttttcttcattcctttttctctatgtttttaggattgtataatctctatcagtctctcttgaagtttgctaattcttcctgctgccagttcagatctactatttagcccctgtcctaattttccacttcagttattgtacttttcaactccagaacatccatttggttctttttttaaaacaataatttgtctctttattgacattctttatttgatgcatcattgacatcatgcattcctttacctctttaaaaatcatgatttttttttttttaatctttggacatatttataatggctaatttgtagtctttttctgttaaatctgacatctggtccctcttactgagagtttctgttgcctactttttttctggtatatgggtcacactttcgtgtttctttgttttttgtttgtttgtttgtttgaagctgaacatttttgataatatattgtagcaactttgggtacttgtctgattcctctggggcttattattatttgcttgtttatttatttaatgactggctagattgtttaagtggttgatccccctcctcccacagtgtgaatcctctgatgttgctcctcagaggactttggtatgcccacagtcatatttggatgataatggtttgggcagaactttgactgtctctttccctggccacacccagctttttaggttcactaattgccatctggttgctctgctcttttcagcaatgccctgaggcataaattgcttcccagactaatccaactatattagggttcctttgaagggatagttcctgaggtcagtgtttgagatttgttcttttttggtttgtttttggagatagagtcccactgtttcacccaggctagagtgcagtggcgtgatcatggcccactgcagcctcaacctcctggactccagtgatcctcctacctcagcctcctgagtaattgggaccacaggtgtgtgctactacacctggcttcttttttttttttttttttaagttctgggatatatgtgcaggatgtgcaggtggcctggctaatttttaaattttttgtgaagatggggtctccctatgttgcccaggctggtgaaatttgttcttaccctgagagactcctcccagctgtctctttccctagttatctccagcaaattctctagtctacagtttagcctatatctccaatgaatctgctaatcttttyctttcaccacaacttctactcttttgagagtaccctacccttagtcttgaaattctctacactctgtcacagatgaggtcatttcccctgggaagagattcagatctctttgttttatagcctgcttcctcggccaggcaaaatctttgagtcacggttctggagctagggtgggggacaatgacatgcttctgagtgacaccaccactttaggagctgaggacttggtggaggggtggcagtagcctcaggtctttttggttttcttctcccagagtgtaatcaccatcttatgagccagggcaatgccagttgtggctccagtattcttagtggcactgcatccaaggtaaagctctcgtcctatgagtggggtttaaacgggacaaaagaggcccaccttttagctgcactcacttagaacttagcctcagtaacaggtagctgggggaaggatcagaaatgctaatatcctgctcaggacattccaggcagctaaccctttaacagggagcttgagagagaaggtctgtgtttagctgcatcagtgtgcagtggagtttctgtgtcattgagttgggagaggcaaggtggagaacaggtcttggtttaaatattgtggactctcgctgttcttagattttcttgagcatatgtttcttcattggctgtgtgcctttaagaccatttccagaaactttaaatggttgcttttgaaaaataagtttcactagttttactggagagtgggtctgtggagcttctcatgctgtcaaactagaagtcccttctaacccatcaattttgtaactgttctttctcatagtgcattttctccagtgctatgcattcagcctatataaatgtggcagtatttaccccaattaagaagataatctctttcctctggggaaatattttctaattagtgatctatttctgtcctcctttcataaaacaaaggttccccagacagtattctttggctagcttggatactttggttctgacagtttgtaagactggagatgttagagtttctctgtctttgccattctggccaggtacctggcaagctgaaacttttaatgctgcctctaggatttgacctgtgtcatgtgcccagtgttttggtggggcatcaacaatgattccatgacaagcactgagcgttctcattgacctcagagggattctctgtatctatgtatgtgctaggtgctggaaaaaaaggagtaaaaggaaaggcaatgttgctgcctttgaagaagttcccctagtggtggagatagccataaaacagataaggacactataatttattaagtggatactgtgaggcacaatggcgtgcacctgtagtaccagctacttgggaggctgaggtgggagaattgcttgagcccagagttcaagaccagccttagcaatatatcgaaaccctgtctctaaaaaaaaaataaaattttaagagtgaacactgtgatagagttgcagaagaggacgccctaagtcagcctttcccatgttatagtcactgacacataatccggatctcaacagatgactaggagtgataaggagaatgttttaagtgagggaatagcatgtacaaagatattgtacaggtgaaaagcctggtactgtcagagagttttaagtaattcattatcattgggaattgggaattcattatcattgggaatgagaggaagtggcaactgatgcactgaggaaggccagcccatagaggagggagggtcttgcataaagttgtaaagttttgattttaaatggagttaaagctttaaaagctttcaaagaatcatagagtagaacaaaaaggaccttagaggttagtagactacaatgtcttgtcttaactatctccattcctaacctcttgacacatggactttatatagcaagcacttagaaaatatccgttttctacctcctctataggtcttccttacatatgagggatcagcatcactgtaatagtgggccctaggattgtacgttcttttagtatctttaatccttcttaaaacatattacacacacacacagacaggagagcttattttgtgccaggcactattctaaggtatttagttgaatttactcawttatgcttccctcaacatgagggttgttaggttttgtgctactrtcttcattttacaaatgatgcaagttatacactgaaactaagtggtggaacgaggattcaaacccaggcagccaggtctagaatcaaactctaaagtatcatgttacattgaatccaagctagtgtaactctctggctcctggctaaatatctttcttttagataggctgacaatttggggacctttttctttcttctattcaatagacaattatgtcttgactagctattgtaagctaagctctctgctacatgttataggacaaactcgagagacactccttcagttatttaataaccacacactctgctctgtgccrggccctcggcttggagatggatttatggagctaaattaattattcatttatgtattccagaaaatttacaagatgctggtgaagaataaatgataaataaaatatagtctctatttttgagttgcttagggagagtaagagggggataatgtataccctgagaactaagggaacaaataggatagggcaatgaactcacctgggagagatctagaaaacttcacagaaggcagtgactttttatttaatagacaaagagtgggagaaagcattttaaatggagcaccttgtgcaaaatcttgggggtataaaagatcatggtttggtcaaggagcatgaaatggcttgatgtgtctagagcaggcaactttttctgtaaaggattagatagtaattattttagactttgatagccatagagtctctgttacaaatactcaactctgtctttgtagcatgaaagcagccacagaaaatatacatcaatgcatgagcctggctatgtttcagtaaaactttatgaaaactggctgggcatggtggcttatgcctgcaatcccatcactttgggaagccaaggcaggaggattgcttgagtctatgagtttgagactagcctggacaatatggtaagaccctgtctctacaaaaaatgaagaaaaaattagcccctgtgcctgtagtccaagctactcgggaggctgaggcaggaggactgcttaagcccaggaggctgcagtgagccatcttcacgccactgcatttcagcatgggcaatagagggagactcagtctcaaaaccaacaaacagcaaactggatttggcttatggccatagttttctgacccaatatctggtgtgtaaggtgtctggtagggagggagagtggccaggaaggtacttaggaagttaatgtgtcatattgtaaaagaccttgaatgccaggccaagaagctagggctttatcttgtaggtaatggggagccatgagatgttaagtaagggagttggaatagatatttactttaagatcattctagagtgattgtggtggggggaggagccaagatggccgaataggaagagctctggtctacagctcccagcgtgagcgacgcagtagacgggtgatttctgcatttccatttgaggtaccgggttcatctcactagggagtgccagacagtgggcacaggacagtgggtgcagcacaccgtgtgccagccaaagcagggcaaggcattgcctcactcgggaagtgcaagggatcagggagttagttccctttcctggtcaaggaaaggggtgacagacggcacctggaaaatcgggccactcccacccgaatactgcacttttccgacgggcttaggaaatggcgcaccaggagattatatcctgcacctggctcggagggtcctacgcccatggagtcttgctgattgctagcacagcagtctgagatcaaactgcaaggcggcagcmaggctgggggaggggcgcccgccattgcccaggctcgcttaggtaaacaaagcagccgggaagcttgaactgggtggagcccaccacggctcaaggaggcctgcctgcctctgtaggctccacctctgggggcagggcacagacaaacaaaaagacagcagtaacctctgcagacttaaatgtccctgtctgacagctttgaggagagcagtggttctcccagcacgcagctggagatctgagaacgggcagactgcctcctcaagtgggtccctgaccccgacccccgagcagcctaactgggaggcaccccccagtaggggcagactgacaactcacatggccaggtactcctctgagacaaaacttccagaggaacgatcagacagcagcattcgcggatcatgaaaatccgtggttctgcagacaccgctgctgatacccaggcaaacagggtctggagtggacctctagcaaactccaacagacctgcagctgagggtcctgtctgttaggaggaaaactaacaaacagaaaggacatccacaccaaaaacccatctgtacatcaccatcatcaaagaccaaaagtagrtaaaaccacaaagatagggaaaaaacagagcagaaaaactggaaactctaaaaagcagagcgcctctcctcctccaaaggaacgcagttcctcaccagcaacggaacaaagctggacggagaatgactttgatgagttgagagaagaaggcttcagacaatcaaactactccaagctacaggaggaaattcaaaccaaaggcaaagaagttgaaaactttgaaaaaaatttagamgaatgtataactagaataaccaatacagagaagtgcttaaaggagctgatggagctgaaagccaaggctcgagaactacgtgaagaatgcagaagcctcaggaccyaatgcgatcaactggaagaaagagtatcagtgacggaagatgaaatgaatgaaatgaagcgagaagggaagtttagagaaaaaagaataaaaagaaacgaacaaagcctccaagaaatgtgggactatatgaaaagaccaaatctgcrtctgattggtgtacctgaaagtgatggggagaatggaaccaagttggaaaacactctgcaggatattatccaggagaacttccccaatctagcaaggcaggccaacattcagattcaggaaatacagagaacgccacaaagatactcctcgagaagagcaactccaagacacataattgtcagattcaccaaagttgaaatgaaggaaaaaatgttmagggcagccagagagaaaggtcgggttaccttcaaagggaagcccatcagactaacagctgatctctcggcagaaactctacaagccagaagagagtggggaccaatattcaacattcttaaagaaaagaattttcaacccagaatttcatatccagccaaactaagcttgacaagtgcaggagaaataaaatactttacagacaagcaaatgctgagagattttgtcaccaccaggtctgccctaaaagagctcctgaaggaagcactaaacatggaaaggcacaaccggtaccagccactgcaaaatcataccaaaatgtaaagaccattgagattaggaagaaactgcatcaactaaygagcaaaatcaccagctaacatcataatgacaggatcaaattcacacataacaatattaactttaaatgtaaatggactaaatgctccaattaaaagacacagactggcaaattggataaagagtcaagacccatccgtgtgctgtattcaggaaacccatctcacgtgcagagacacacataggctcaaaataaaaggatggaggaagatctaccaagcaaatggaaaacaaaaaaaggcaggggttgcaatcctagtctctgataaaacagactttaaaccaacaaagatcaaaagagacaaagaaggccattacatgatggtaaagggatcaattcaacaagaagagctaactatcctaaatatatatgcacccaatacaggagcacccagattcataaagcaagtcctgagtgacctacaaagagacttagactcccacacaataataatgggagactttaacaccccactgtcaacattagacagatcaacgagacagaaagttaacaaggatacccaggaattgaactcagctctgcaccaagcggacctaatagacatctacagaactctccaccccaaatcaacagaatatacatttttttcagcaccacaccatgcctattccaaaattgaccacatagttggaagtaaagcactcctcagcaaatgtaaaagatcagacattataacaaactgtctctcagaccacagtgcaatcaaactagmactcaggattaagaaactcactcagaactgctcaattacatggaaactgaacaacctgctcctgaatgactactgggtacataacgaaatgaaggcagaaataaagatgttctttgaaaccaacgagaacaaagacacaacataccagaatctctgggacacattcaaagcagtgtgtagagggaaatttatagcactaaatgcccacaagagaaagcaggaaagatccaaaattgacaccctaacatcacaattaaaagagctagaaaagcaagagcaaacacattcaaaagctagcagaaggcaagaaataactaaaatcagagcagaactgaaggaaatagagacacaaaaaacccttcaaaaaattaatgaatccaggagccggttttttgaaaggatcaacaaaattgatagaccgctagcaagactaataaagaaaaaaagagagaagaatcaaatagacgcaataaaaaatgataaaggggatatcaccaccgatcccacagaaatacaaactaccatcagagaatactacaaacacctctatgcaaatatactagaaaatctagaagaaatggataaattcctggacacatacactctcccaagactaaaccaggaagaagttgaatctctgaatagaccaataacaggatctgaaattgtggcaataatcaatagcttaccaaccaaaaagagtccaggaccagatggattcacagccaaattctaccagaggtacaaggaggaactggtaccattccttctgaaactattccaatcaatagaaaaagagggaatcctccctaactcattttatgaggccagcatcatcctgataccaaagccgggcagagacacaaccaaaaaagagaattttagaccaatatccttgatgaacattgatgcaaaaatcctcagtaaaatactggcaaactgaatccagcagcacatcaaaaagcttatccaccatgatcaagtgggcttcatccctgggatgcaaggctggttcaatatacacaaatcaataaatgtaatccagcatataaacagaaccaaagacaaaaaccacatgattatctcaatagatgcagaaaaggcctttgacaaaattcaacaactcttcatgctaaaaactctcaataaattaggtattgatgggacgtatctcaaaataataagagctatctatgacagacccacagccaatatcatactgaatgggcaaaaactggaagcattccctttgaaaactggcacaagacgggatgccctctctcaccactcctattcaacatagtgttggaagttctggccagggcaactaggcagaagaaagaaataaagggtattcgattaggaaaagaggaagccaaattgtccctgtttgcagatgacatgattgtatatctagaaaaccccattgtctcagcccaaaatctccttaagctgataagcaacttcagcaaagtctcaggataaaaaaaatcaatgtacaaaaatcacaagcattcttatacaccaataacagacaaacagagagccaaatcatgagtgaactcccatttgcaatagcttcaaagagaataaaatacttaggaatccaacttagaagggacgtgaatgacctcttcaaggagaactacaaaccactgctcaatgaaataaaagaggatacaaacaaatggaagaacattccatgctcatgggtaggaagaatcaatatcatgaaaatggccatgctgcccaaggtaatttatagattcaatgccatccccatcaaactaccaatgactttcttcacagaattggaaaaaactaaagttcatatggaaccaaaaaagagcccacatcgccaagtcaatcctaagccaaaagaacaaagctggaggcatcacgctacctgacttcaaactatactacaaggctacagtaaccaaaacagcatggtactggtaccaaaacagagatgtagatcaatggaacagaacagagccctcagaaataacgccgcatatctacaactatctgatctttgacaaacctgagaaaaacaagcaatggggaaaggattccctatttaataaatggtgctgggaaaactggctagccatatgtagaaagctgaaactggatcccttccttataccttatacaaaaattaattcaagatggattaaagacttaaacgttagacctaaaaccataaaaaccctagaagaaaacctaggcattaccattcaggacataggcatgggcaaggacttcatgtctaaaacaccaaaagcaatggcaacaaaagccaaaattgacaaatgggatctaattaaactaaagagcttctgcacagcaaaagaaactaccatcagagtgaacaggcaactgacaaaatgggagaaaattttcgcaacctactcatctgacaaagggctaatatccagaatctacaatgaacttaaacaaacttacaagaaaaaaacagccccatcaaaaagtgggcaaaggatatgaacagacacttctcaaaagaagacatttatgcagccaaaaaacacatgagaaaatgctcatcatcactggtcatcagagaaatgcaaatcaaagccacaatgagatagcatctcacaccagttagaatggcaatcattaaaaagtcaggaaacaacaggtgctggagaggatgtggaataataggaacacttttacactgttggtgggactgtaaactagttcaaccattgtggaagtcagtgtggcgactcctcagggatctagaactagaaataccatttgacccagccatcccattactaggtatacacccaraggactataaatcatgctgctataaagacacatgcacgcgtatgtttattgtggcagtattcacaatagcaaagacttggaaccaacccaaatgtccaacaatgatagactggattaagaaaatgtggcacatatacaccatggcatactatgcagccataaaagatgagttcatctcctttgtagggacatggatgaaattggaaatcatcattctcagtaaactatcgcaaggacaaaaaaccaaacaccgcatgttctcactcataggtgggaattgaacaatgagaacacatgacacaggaaggggaacatcacactctggggactgttgtggggtggggggaggggggagcgatagctttaggagatatacctaatgctaaatgacgagttaatgggtgcagcacaccagcatggcacatgtatacatatataactaaccggcacattgtgcacatgtaccctaaaacttaaagtataataataataataaaaaagattattctagtgtctaatatggtagatagactgacagaaaagagactagacgtacaaagataagygagaaatgactgctgtatccctgccttgagcaacagcttctgatctcagtggaaacagatatttcactcatgaaacgtacatgtcctagaactctgtaaatgacatttagagctattgtacctgaaatatggtatgcttccttgctagatgttcaagaggtaaataagagttggtaaacttttcagatctggaacatgtgacttatgggtttgatatggcttggttctgtgtccccaccaaatctcgtgttgaattgtaatccccagtgctggaggtggggctgttaggagtgattggattatcggggtgatgttctcatgaattgtttaacaccatcccctctcagtattgaatagtgagtgagttctcatgagatctggtcatttagaagtgtggtagcacctccccctttgctctttcttcctcctgctctggctgtgtatggtgtgtctgtttccctttcaccttctgccttgattgtaagtttcccaaggcctccccagaagcagaagctgctatgcttcctgtacagcctgcggaatggtgagccaattaaacctcttttcttataaattacccagtctcaggtatttctttttttctttctttttaaaattttctttggcggagtctcatgctgttgcccaggctggagtgcagtggcacaatctcggctccctgcaacttctgtttcctgggttcaagcgattctccttcctcaccctcccaggtagctgggattacaggcacaagccatgatggcagctattttttatatttttagtagagacgggatttgaccatgttggccaggctggtcttgaattcctgacctcaagtgatctgcccacctctggttcccaaagtgctgggattacaggtgtgagccactgtgcccagccacaggtatttctttatagcaatgtaataatggactaatgtagggttctaaatattgtgggctggatgggggttggagagcagcagagaaagtgggaatggaggtgggacaatttggtttgggaaatatggaaggtaagtagtagggaacaaggttggaaaggggagggaagtgttattgattctaaggaagaacccaggaaagccatccagattgctgtacccaaaggtgtgctgctcttcttctggctttatgtcagtgaattctcttctctggtggatcaagctggctgggcctattttgtagaaattatagagagatgtctcccctcttctctgctcccactctcactacttcactactgcttgacacttgggatgggtttatgccatgtgccacctcctgggagatcatttttctgggcgcatggaactaaatatacttactgacagctggtagcttggctctttgtagaactattgagctgtatagttctagccaatgytgcattccccatggtaaggcaggactcttggggagcctccttaggtattcctgagagaagagctgcttgttctaagtctgaaatagtaaatccctttggtgggatccaaaagctgcctgtttagctttgttatcacctttcgttacttttaaactttgtcttaaatcagactttagctattagctggatgtgggacagtgttcaaagtaagatgtggtaatgcctacttcaagtatattgaacatcaaagttacagctcaatataatattcttgggtgctagtacccagcttgtggctgggtaactgggaacttccgttgagggtatatggtttggcaggggagatagacatctaataagactgataaaggtattcataggcactatgggagcacagaagaagtcacctttgatcaagaatctttttctgttactttcctgtccttatctcactctccttccaataataatctcaattaatatctgaattgtgctttcaaactcagtactttagtgtacaacaggaattacaaactgtgcccctgaagggtcagagggcattgtaagtgagtaatgtgggctgtataaatgcatgtgcataagtctgtgagtggkgagagctgtgggaaaatggagagcccacacctcttcagaaggagcagctctggcagactgttgccatgtagtcatgtactccaagagcagttctaagagataggggattgagacctccatagctcctttagcaccaactccccaacctttaagataccccaaattgtataacatatatatattcatactcatatataatatgaattatacatattttatatatagtcataggccacataaggacattcagtcaacagtgggccacatatgcaatgtggttccataagattataatatattttactatatcttttttatgtttggatatgtttaggtacacaaatacttactactgtgttacaactccctacaatattgagtacagtaacatgttgtacaagtttgtagcctaggagcaataggctatttcatataacctaggtgtgtagtaggctatacacatctagcatactctatgatgttgacacatgatgcatttcttagaatgtatccccatcatatgtcataagtgaatgacatataatgaaaccaattttaacagaggctaatttgttataaacaagggttaagttcctatggcatatttctggtcacaaaaacatcaccaaacttacaaataaagaccaaaacacttacaatatgaaacactgaaataaatgtgagctgtatatacatttaagaaagattaataaaaacaagtaagataattatttataattatttacctacttatttcagtttagggttgagagtgtccagagtttatgctagcagctcagggtgcaaggtgggcaccaactctggataggacgccatttcattgcatggcacactcacacacccacactcactcaggctaggaccatggagacatgccagttcacctaaaatgtacatctttgggatgtgggaggaaatcagagaatgcacagaaaacccatgcacacatggggagagcatggaaacttcacacagacagtagccccagccaggaattgatttttttttcattgacgttataaagaaatgacattgaaagaaatggtgttatttgaggagctgctgtatatatttattctttgatatggagaattgattttttccttaagtttaagtaaaaggttaataaaaacatcttcataaaaagttgcattttggctgggtgcggtggctcacgcctgtaatcccagcactttgggaggccgaggcgggcagatcacgaggtcaggagatcgagaccattctggctaacacagtgaaaccgcgtctctactaaaaattaaaaaaaaaaattagccgggtgtggtggcaggcccctgtagtcccagctacttggaaggctgaggcaggagaatggcgtgaactcaggaggcggagcttgcagtgagctgcgatcgcgccactgcactccagcctgtgcaacagggaaagagtgtctcaaaaaaaaaaaaaaagttgcattttaaaattaatttgtggccgggtgtggtggctcacgcctgtaatcccagcactttgggaggccgaggcaggcagatcacttgagatcaggagttcgagactagcctggccaacatgctgaaaccctgcctccactaaaaacacaaaaattagcatgatggtgggcgcctgtaatcccagctactcaggaggctgaggcaggagaattgcttgaacccggcgggcagaggttgcagtgagctgagatcatgccactgcactccagcttgggcagacagagtgagactccatctcaaaataataataataataataataataaataaagtaaaataaaattaatttgtaatgaataatcttcataaaaatagtgtgcttgctatgcaaatgcaacctcatgacaagtcccttagctctcactctccttttccaattaaattgttagtccttaagccactcctgtataaaattctaaagtcattggagcttactgtggctagatatttttatttttttgagacaggatcttgctctattgcccaggctggagtacagtggtacgatcacggcttaccgcaaccttaacatcttgggttcaagtaatcctctcacctcagcctcccaagtagttgggaccacaagtgcacaccaccacatgtagctaattttaaaattttttgtggagatggggtttcactatgttgcccagactagtcttgaactcctgggctcaagcaatctccttccacctcggcctcccaaagtgctgggattgaaggcatgagccatggagcccaacctgttttgatttgtttaaaagatagcctgagaaggtggacttttagtgaaattttctgattttttttttttttttgagacagagtctggccttgtcatccaggctgtagtgcagtggcatgatctcgactcactacaacctccgccttccaggtttaagcaattgttgtgcctcagcctcccaagtagctgggattgcaggtgtgtgccatcctgcctagctgatttttgtatttttagtggaggcagggtttcacagtgttggcctggctggtctcaaactcctgacctcaggtgatccacctgcttcagcctcccgatgtgctgggattacaggcatgagccactgcgcccggccaaaattttatgatttttaaatttaggttcaacttttcaaaatgctgtgcaggccagtaaaagacacacacaaaggcaatttatgacttctgcaaacttgtctcatttaatccttaccatacctgaaatgagggacattattaaccctaattttgagaggaaaataggctcagagaggcaaartagcttgcccaaaagtcacacagcaagtaagtagcctgtttctatgggttctgcctttctttctttcttttttttattattatatattttaagttctagggtacatgtgcacaatgtgcaggtttgttacataggtatacatatgccatgttggtttactgcacccatcaagttgtcatttacattaggtatttcttctaatgctatccctcccccagcccccagcccccaacaggccctggtgtatgatattcccctccctctgtctgtatgttctcrttgttcaactcccacttataagtgagaacatgtggtgtttggttttctgtccttgtgatattttgctgagaatgatggtttccagcttcatccaagtccctgaaaagaacatgaactcatccttttttatggctgcatagtagtccatggtgtatatatgccacattttctttatccagtctgttattgatggacatttgggttggttccaagtctttgctattgtgaatagtgccgcaataaacatatgtgtgcatgtgtctttatagtatcatgatttataatcctttgggtatatacgcagtattgggattgctgggtcaaatggtatttctagttctagatccttgagaaatcaccacactgtcttccacaatggttgaactaatttacactcccaccaacagtgtaaaagcattcctatttctccacatcctttccagcatctgttgtttcctgactttttaatgatctccattctaactggcgtgagatagtatctcrttgtgattttgattttgatttgcgtttctctgatggccagtgaagatgagcattttttcatgtgtctgttggctgcataaatgtcttcttttgagaagtgtctgttcatattcttcacctactttttgattgggttgtttgtttttttcttgtaaatttgtttaagttctttgtagattctggatattagccctttgtcagatggatagtgcaaaaattttctcccattctataggttgcccgttcgctctgctgatagtttcttttgctgtgcagaagctctktagtttaattagatcccatttgtctgttttggcttttgttgccattgcttttggtgctttagtcatgaagtctttgcccatgcctatgtcctgaatggtattgcctaggttttcttctagggtttttatggttttaggtcttacatttaagtctttaatccatctctagttaatttttgtataaggtgtaaggaagggatccagtttcagctttttacatatggctagccagttttcccagcaccatttattaaatagggaatcccttctccattgcttgtttttgacaggtttgtcaaatattagatggttgtagatgtgtggtgttatttctgagggctctgttctgttccattggtcgagatacctgttttggtaccagtaccatgctgttttggttactgtagccttgtagcatagtttgaagtcaggtagtgtgatgcctccagctttgttctctttgcttaggattgtcttggctatgcggactcttttttggttccatatgaactttaaagtagttttttccaattctgtgaagaaagtcagtggtagcttgatggggatagcattgaatctataaattaccttgggcagtgtggccattttcatgatattgattcttcctatccatgagcatggaatgctcttccatttgtttgtgtcctcttttatttcgttgagcagttgtttgtagttctccttgaagaggtccttcacatcccttgtaagttggattcctaggtattttatttgctttgtagtaattgtgaatgggagttcactcatgatttggctctctgtttgtctgttcttggtgtataggaatgcttgtgatttttgcacattgcttttatatcctgagactttgctgaagttgcttatcagtttaaggagattttgggcggagacgatggggttttctaaatatacaatcatgtcatctgcaaacagggacaatttgacttcctcttttcctaattgaataccctttatttctttctcttgcctgattgccctggccagaacttccaacactatgttgaataggagtggtgagagagggcatccttgtcttgtgccagttttcaaagggtatgtttccagcttttgcccattcagtattatattggctgtgggtttgtcataaatagctcttattattttgagatatgttccatcaatacctagtttattgagagtgtttagcatgaaaggctgttgaattttgtcaaaggccttttctgcatctattgagataatcatgtgatttttgtggttggttctgtttatgtgatggattatgtttattgatctgcatatgttgaaccagccttgcatcccaggatgaagccaacttgatcatggtggataagctttttgatgtgctgctgtattcggtgtgccagtattttattgaggatttttgcatcgatgttcatcggggacactggcctaaaattcttttatttgttgtgtctctgccaggctttggtatcaggatgatgctggcctcataaaatgagttarggaggattccctctttttctattgattggaatagtttcagaaggaatggtaccagctcctctttgtacctgtggtagaatttggctgtgaatccatctggtcctggacttttcttggttggtaggctattaattattgcctcaatttcagaacctgttattggtctgttcaaagattcaacttcttcctgatttagtcttgggagggtgtatgtgtcgaggaatttatccatttcttctagattttctagtttatttattttatattttatattattttattctctttgtgtagaggtgtttatagtattctctgatggtagtttgtattcctgtgggatcggtggcgatatcccctttatcattttttattgcatctgtatgattcttctctcttctttgttgatcttttcaaaaaccagctcctggattcattgatttcttttttttttttttttttttttttttttttttgagacagagtatccctttgtcacccaggctggagtgcagtggcatgatcttggctcactgcaagctccgcctcccggtttcacgccattctcctgcctccgcctcccgagtagctgggactacaggcacccgccaccatgcctggctaatttttttgtatttttttagtagagacagggtttcaccgtgttagccaggatggtctcgatctcctgacctcgtgatccgcccgtgttggtttcccaaagtgctgggattacaggcatcagccaccacgcctggctgattcattgattttttgaagggttttttgtgtctctatctccttcagttctgctgtgatcttagttatttcttgtcttctgctagctcttgaatttgtttgccatttcttctctagttcttttaattgtgatgttagggtgtcgattttagatcttttttgctttctcttgtgggcatttggtgctataaatttccctctacacactgttttaaatgtgtcccagagattctggtatgttgtgtctttgttctcattggtttcaaagaacatctttatttctgccttcatttcgttatttatccagtagtccttcaggagcaggttgttcagttcccacgtagttgtgtggttttgagtgaacttcttaatcctgagttctaatttgattgcactgtggtctgagagacagtttgttgtgatttctgttcttttacatttgctgacgagtattttacttccaagtatgtggtcaattttagaataagtgtgatgtggtgctgagaagaatgtatagtctgttgatttggcgtggagagttctgtagatgtctattaggtctgcttggtccagagctgagttcaagtcctggatatccttgttaattttctgtcttgtttatctgtctaatattgacagtggggtgttaaagtctcccattattattgtgtgggagtctaagtctctttgtaggtcactcaggacttgctttatgaatctgggtgctcctgtattgggtgcatatatatttaggatagttagctcttcttgttgaattgatccctttaccatcatgtaatggccttctttgtctcttttgatctttgttggtttaaagtctgttttatcagagactaggtttgcaacccctgctttttattgctttccattagcttggtggatcttcctctatccctttattttgagcctatgtgtgtctttacacgtgagatgggtctcctgaatacagctactgatgggtcttgactctttatccaatttaccactctgtgtcttttaattggggcatttagcccatttacatttaaggtttatattgttaggtgtgaatttgatcctgtcaatatgatgctagctggttattttgcccattaattgatgcagtttcttcatagcatcaatggtctttacaatttggcatatttttgcagtggctggtactggttgtcctttccatgtttagtgcttccttcaggagctcttgtaaggcaggcctggtggtgacaaaatttctcagcatttgcttgtctgtaaaggattttatttctccttcacttatgaagcttagtttggctggatatgaaattctgggttgaaaattctttaagaatgttgaatattggcccccactctcttctggcttgtagggtttctgccaagagatccrctgttagtctgatgggcttccctttgtgggtaacccgacctctctctctggctgcccttaacattttttccttcatttccaccttggtgaatctgacaattatgtgtcttggggttgctcttctcgaggagtatctttatggtgttctgtgtatttcctgaatttgaatgttggcctgccttgctaggttggggaagttctcctggataatatcctgaagagtgttttctaacttggttgcattctccctgtcactttcaggtacaccaatcagacgtagatttggtcttttcacatagtcccatatttcttggaagctttgttcgtttctttttacttttttctctcatcttgtcttcttgctttatttcattaatttgatcttcaatcactgatatctttttttccgcttgatcaaatcggctattgaagcttgtgtatgcttcatgaagttctcgtactgtggttttcagctccatcaggtcatttaagctcttctctacactggttattttagttagccatttgtctaaccttttttcaaggattttagcttccttgcaatgggttagaacatgctcctttaggtcggagaagtttgttattaccgaccttctgaagcctacttctgtcaactcgttaaactcatcctccctccagttttgttcccttgctggcgaggagttgtgttcctttggaggagaagaggcgttccagtttttggaattttcagcctttctgttctggtttctccccatctttgtggttttatctacctttgttctttgatgttggtgacctacagatggggttttggtgtggatgtcctttttgttgatgttgatgctattcctttctgtttgttaattttccttctaacagacaggcccctcagctgcatgtctgttggagttggcgggaggtccactscagaccctgtttgcctgggtatcaccagtggaggctgcagaacagcaaatgttgctgcctgatccttcctctggaagctttgtcccagagggtcacccgcctgtatgaggtgtctgtcagtccctactgggaggtgtctcccagtcaggctacacgggtgtcagggacccacttgaggaggcagtctgtccattatcggagctcaaacgctgtgctgggacaaccactgctctcttcagagctgtcaggcagggacgtttaagtctgcagaagctgwctgctgccttttgttcagatatgccctgcccccagagatggaatctagagaggcagtaggccttgctgaggtgcaatgggctccgcccagtttgagctccttgccactttatttacactgtgagcatagaactgcctactcaagcstcagcaatggtggatgcccctccccccaccaagctccagtgtcccgggtcgatctcagactgctgtgctagcagcaaggaaggctctgtgtgtgtgggacccrccgagccaggcacaggagggaatctcctggatctgccagttgcgaagaccgtgggaaaagtgcggtatttgggcagcagtgcactgttccaccaggtagagtcactcacggcttccctttggctaggaaagggaaatcccctgaccccttgcacttsccaggtaaggcaatgccccaccctgctttggcttgtcctccatgggctgcacccactgtccaaccagtcccaatgagatgaaccaggtacctcagttgggaatgcagaaatcacccgtcttctgcattgatctcactgggagctgtagaccggagctgttcctatttggccatcttggaagtccactgggttctgcctttctgactcttaaggcctgattgttgcagcttcatttctttattttctaaagaggtcccattcagcataagtaccttccttcaggtagagcttctatttgccagttcctcttttggcatcatcttctctctgaccttgttttctgaccctacttgttttttgtgtgttttgtggcaccagtagggtctgtatgtgagtccctatgcagatcttccttatactttctttctgagtttctctgctctccacttacctcggtgatcagacttgactataaaaatgagtctatttcttgttgatttcctataagcagctggtatctcatgtcagatggtttcctggagttatctgataatgggagaaaatccccttccttggagattttggtgtttctgctcccaaggcttgcttgtggtaactgtctttctagtcttagattaagaggttctaggttggagcctatgaggaccaaagaagggtatatcttgaagaacctgattaatcaaacctaaaaaatcatgaggatagcagatttgatctctaaaatatatcccaattctgacaaattctcatcacttccacagctaccaccttgtttcaaaccaccattagctcatgttattgcaatacccacctgagtgatttctctgtatctgccctttcccttttatagtctactttttaacacagtatccagagaaatcgttttaaaaatataaatgtcttcatgttatacctctgttcaaatccctgtaacagctcccatctcagagtgaaaaatcaaagtcttgataatagcctaaaaagtcagctgggtgcatggctcacgcctataatcccagcactttgggaggccgagacaggtggatcacctgaggtctggagttcaagaccagcctgactaacatggagaaaccccatctctattaaaaaatacaaaattggccgggcgcggtggctcacgcctgtaatcccagcactttgggaggccgaggcgggtggatcatgaggtcaggagatcgagaccatcctggctaacaaggtgaaaccccgtctctactaaaaatacaaaaaaaaattagccgggcgcggtggcgggcgcctgtagtcccagctactcgggaggctgaggcaggagaatggcgtgaacccgggaagcggagcttgcagtgagccgagattgcgccactgcagtccgcagtccggcctgggcgacagagcgagactccgtctcaaaaaaaaaaaaaaaaaaaaaaaaaaaccaaacaaaattagccaggagtggtggtgcatgcctgtaatcccagctactcgggaggctgaggcaggagaattgcttgaaactgggaggtggaggttgcggtgagccaggtttgtgcccctgcactccagcctgggcaataagaatgaaactctgtctcaaaaaaaaaaaaaaaaaaaggcwtaaaagggggatctgtgttctggaaccctgtggcttctttgagttcatctcctgctggttaccaccttactcatttctctccaacgatactggccttcttgttattccttgaacataccaagtatattctcttgcctcagggactttgcttctgcccttctccattcttgggatactcttctcccagttattctgcatgcctttctcccacacctcttttaaatatttgctttgaagtcaccttcttatcttttgccttgttgcactcctgaaggcaaaatggatcacaagcagctctgctggagccacccacaaaaatctggccagagttctcgctcttgttgcatctgctcaaaccagcatggtctgatctggaaatatagcctcaatatgtgcctccagtgttgccatcagtacgtgaaggatataggtttcattaaattggactaagtgatcttccttgaatggattatccaaggcatccacacaatgaaaaatcatattagctgtttgtacataaaataaaaatgaagaaaatgaagtcagcttcttaatgacaccttgattcctctcattaaaatgacaaattgtgaataccactactcttggcatctcctattcctcttccctgctgtttttttctttatttaaattatattttatttaaaaacatttttaaaattttattttatttgtaaytgatacataacagttgtacatattggccaggcatggtggctgacgcctgtaatccgagcactttgggaggctgaggcaggaggattgcttgagctcaggagtttgagaccagcttgggaaacatagtgagacaccgtgtgtacaaaaaatttaaaaaaatagctcggtacsgtggtgcacacccatagtccaagttacttgggaagctgaggcaggaggatcacccagcctgggtgacagagcgagacactgtctcaaaaacaacaacaacaaaaaaccccaccaaccaaccaaccatccaaaaaaattgtacatatttataggatacagtgtgatgttttgatacatgtatacaatgtataatgatcaaattagggggtaaaattagtatatctgtcatctcaaacatatatcatttctttgtggtgaacattcaaaatcctttcttctagctattttgaaatatacactatattattgttaactaaaatcaccctactgtgcaatggaacactagaacttataaacttaccctcccaactgtaaatttgtacccactgaccaatctctccccatctccctgtctacccttcccagattctggtaaccactatcctacgttctacttctatgagatcagctttttaagattccatatatgagtgagaacatgtggtatttattttttgtgcctggcttatttcacttagcataatgtcctcgaggcacatccatgttgccacaaatgacagaatttcattctttttttctttatggctgaatggtatgctgttgtgtaaatatacgacattttctttaaacattcatttgctgatgggccctgaggttgattctatatcttggctattgtgaatagtgctgcaatmaacatggaagtgaagatgtctcttcaacatgctgatttcatttcctttggatgtgtaccgaatagtgggatttctggatcatatggtagttctatttttcatgttttgaggaacctccatactgttttatatggtgactgtactaatttacactgccaccaacagtgtgtaagggtttccctttctctatatccttggcagcatttgttatttgttatttttttggtaatagccatactaactggggtgagatgatatctcattgtggttttgatttccatttccctgatgattagtgatattgagcatatttttcacatatcttttggacttttttttttcttttttctctgagacaaggtctcgctctgtcacccaggctggagtacagtggcatgatcacaactcactacaaccttgatctcccaggctcaagtgatcctctgacctcaggctctagcttcagcctatagctgggaccacaggcataaaccaccacacctggctaattttttttttttaattttttgcacaggcggagtctccctatgctgcccaggctggtctcaaaatcctgatctcaastgatcctcccactttcgcttcccaaagtgccgtgattacaggcatgaaccactgtgctcagtcttgtttgtcttcttttgagaaatgtctagttagatctttcacccattttttaatctgattttttttctattgagttgttcgagttccttatatattctagatgttaaccgcttgtcagatgtataatttgcagatgttttctcccattctgtaggttgtctcttcacttttcattgtttccattttattttgatttaatcccatttatctatttttgtattttgttgcctatggtggtggtggtggtggtggttgttgttgttgttttttggcagtgcagtgacgtgatattagctcactgcagcctccacttcctgggttcaagtgattctcctgcttcagcctcccgagtaactgggattacaggcatgtgccaccatgcccagctaatttttgtatttttagtagagatggggtttcgccatgctggccaggctggtctccaactcccagcttcaggcgatccacctgccttggcctcccaaagtgctgggattacaggcatgagccaccgtgcccggcccccagtacagtttattgaagagattgtcctttcctcagtgtttgttcatgcatttgtccaaaatcaattggctatacatatgtggattttattcctgtgttctgtattcttttccatgtctgtttttatgccagcaccatgctgtttcagttactattgttttggagaatattttaaagtcagatggtgtgattgctctagctttgttctttttgctcaagatggctttggctattcaggtttctttttggttccatatgaattttaggatttttttttctatttctgtcaagaatgtcactgaaatttagatagggattacattgaatccgtagattgctttgggtagtatgaatattttaacaatattaattcttccaacccatgtacatagggtatctttccatttatttgtgtcttcttcaatttagttcatcagtattttacagttttcattgtagagatcttttacctccttggttaaatttattcttaggtattttattattttttgtagctattgtaaatgggattttttttwatttctttttcagatttgtttactagytctaacagttttttggtggtgtctgtaggtttttctagatttaatatcatgttattggctgggcatggtggctcacacttgtaattccagcactttgggaagcagaggtgggtggatcccttgagatcaggagtttgagaccagcctgggtaacgtggtaaaatcccgtctctaccaaaaatacaaaaaattagccaggtggggtggcgtgcacacctatagtcccagctacttgggaggcagagatggaaggatctcttgaggcccaggaggtggaggttgcagtcagctgagatcatgccactgcactgcagcctgggtgacagaataagaacctgtctcaaaaaaaaaaaaaaaaaaaagagagaagatcatgttgtctgcatgcaggggcagtttgacttccttctttccaattttgatgcctttcttctttccttccttcccttccttcccttcctttcctttctttcctcttgcctaattgctctggctaggactttcattactgtgttgaataatagcggtgaacgaaggcatccttgtctcgttccagattttagaagaaaagctttcaacttttccctgttcaatatattagatgtgggtttgtcatatatggcctttattgtgttgaggtatattccttctatacctaatttgattgcagagctgggggctggaatcaactgaagtctcagtcactcacatacctgactcctgaacttgaagactcaaacagctggggctactcacacatttctatctctacatagactttccacatgatatctccagcagggtggcttcagcgtagccaggcttcttacattttgactcagggcccctcagggcccaaaagagagagagctaggtgaaatttatattgctttttctaacctagacttgggtgtcgtgcaacatcactgttgccacattctatttgttagaagatgagtcactaatgtcagcctatattaaaggggagggaaatccacctttaacgggaggattatcaaacaatttgtggacatgttttaaaaccattacagtcggccgggtatggtggctcacacctgtaatcctagcactttcggagaccgagatgggtggattgcctgagctcaagagtttgagaccagcctgggcaatggtgaaaccctatctttactgaaatacaaagagttagctgggtcgggtggcacacacctgtaatcccagctactcaggaggctgagacaagagaattgcttgaacttcggaggtggaggttgcagtgagctgaaattgcgccactgcactccagcctgggtgacgagcgagactctgtctcaagacaaacaaacaaacaaacaaacaaacaaacaaccatcacagtaaattaacctgtctaaacctaatgtaatttggggcaaatggcattatcttcaagagtatcactgttctcatttataaaataagtgtgataattcattggttgtgaagatttgatgagaaaatattgtggaaattcttagaatattgcctaatttataagcaagtactcaaacattttaaattcttccttttttctttcctcttttagcttattgattttcagttaactgtcatgtattgtcttttcatagttaaaaaatatgaggaaaggatttctaatttatatatatttttcaagtgagacatgtaacaaagaggaagtgatagtttagttggcaactaagacatgtgcataaggaaggatacatgagtgatgtgatacacttgtatgttgggtagatggaatgtgttatggctagctagaggcaggtgacctgtgtggagatcttgacgggctgactcctaggtatctcttgtgacttgtgtacttttcccttgcagttcctgagggaagacctcaattaccatgacccaacagtgaaacacagcaccttccatggtgaggataagctcatcagcgtggaggacctgtggaaggcatggaagtcatcagaaggtaataggcagyctggtcatcaatcctagttgtgggaaggtttagagaagagagaagcagcaacttggccttagaagaacatgtatataaaatgcttagtaaagggcaaattattgaagttattctacatatagtcactaaawaagactgaatatagtcactctgctgggcatgggggaaggttctccagagttggcrtttttcttcattaggatactttttgaattctatcctattcctacccctttcstcacccacctaaccctggcataggaatcttccaggttctgctgctttatctccagagatagggagcttgctggtctcttgaggcagcccctttcttctctagcttcccacttagtcccagctctgctgagtcctagacaattcaaagattgggtgagggtacagacagactctctcctcttctataccatcttgattgaaagcttttctataccattttggttgaaagctcctgagtcttcttttttccaggttaagtagccctacttcttgaagaaaacattttctcarcctccttcttgtcttgatttcctgcctataagcacttttgttaatgtgtttcttagatcctatagttggctgcagacctccaagtgtgattttatcatcacggagttgagcaggactgtcaccttcttgtttctgaatcctgtgcatctgttagtgcagtctgattagattctggtgcctcactagtcataccactctactgacccatgttgagcttaatgaaaacttcagatttctgtaaaactgctaaaccatgattaccattttttttttctggagcatttccttcagagttcttagtgaaagagcatgtctaattgtgcgagacttgacagggaaggggaaaacagggctttagcttcctctccatttatatctgtggctagggcacagataacaataagactagaagaaatctctcttcccagggtctcttagggcaggttctgatgtaacaggggttaaatgtaagtaaccatcaggatccctggtttttatttgaggaaccttaggcctagatgtataaagttacttgtcattatcatgcatttagtagagccagaacttcagctgtaggccaatgcttttcaataccctcttggttgaaagcattagtctaaggtagagaagactagttttggtaggaatgaggcagtttctatttttatttacattttaatttaggcttatagaatttgagatctgaaagggataatctatattgtagatggggagcattaaatgtgaagcaggaagacctggattctaatcctgattatgggatggacaggctgatgcttcctgttaactctatgttttatcaatgtagaagaaaaattaggcagctgtaggagagagcttcctggatatctttggaagctgagttccttctgggggcttttctttaatagctctcgagcaactcaggctatgtactgatgaagattaagcagtgacatgagctttggaactataccagcggtgccaggaaaaaatcttccattagcatcatttagttttggctttcttatttttctctaataacatgaggacagggtggctggtttttaagagtgggtttcaaaagtaggaacttagaattaaagatggcagggagagcattctggccttttctgaaagctcgcatagaagtatctaggaaaggaaagtgagagggcagaaacagagggactaaatcataatgctagaaaacagctccaggcagttttctggcaaggactttatttttggacttagcaactatttggaacacttccagtgtattctaaattacaggaaaatgaaagacaatggagtgaggttttttgggggagagtcctcattaaccatgagtggagaaaagcatttcaatgcagtgatgtagttcacagctgagaaatgatatatatgtaccctattagaatttgctcactgtgtgttatacctggtgatttgacagactaaaagtgagaatttttatatgtcctcttcctcccaataatttgcttcattattcagaaaaaggcccctaatctctccggagtgatgatttccagagctacaaaaagcatttaatattctggcaccggctcaaactagctgttctgagtttagctagatgatgtagatgtcagcagtggtcacttgtgttcagaacattagctggctagtgtcagtaccatctgtgtgattagcattgttaacatttttctgactaatgttgggagccagtcttttctctgtgttatatagatcttagcagaaaagttttctaatctctatcttagccaactctgggctttaggaataaaaacagcagcagcaacgacaaaaactgaaaaactactttaacatttatatagtatttaatatgtgctaggcactgtttctaagtgttttacatatattaacttatttctcacagaaaccatatgaagtatagatattatgattatacagagttagcacagacttcacaagttaagttcacagcccccgataagattactctcacttcagacatcagccataatttcaagctgttcccaggtcacctgcacttctgaccagctgactacaattcatgcattaccatggscttctcaggtttgataattaactaggactactcagagaattcaagaaagccctatacttatgattacaattttattataaaagttacaaatcaggaccagccaaaagaagaaatttatagggcaagatattggagggtcctgaatatggcacttttgtgtcctctccttgtggaatcaggacacatctccatttccagcacatcagagtgtttgccagccaggaaactcaactgaactttggtgttcagtgtttttcttagggtttcattacataggcaagtttgattgaattcttaggcacatgattgaacttaatatccagctccctttttctccataaaggttggattggtatcaccaggctcagagccccaatgttctagtcacgtggttgatttttatagtgaccaccccccatcctgagtcatcttatcagcctgaactcatgtgtgatccaagggacccaccaggaataataaagacattcctatcactgggaatattccaaaagttcagtgggtacctcccagtaacccaggacaaagatctgccaaattctttattatacaacattgaataattaagtatggaagaactggtaaagcagggttgaagaaggaccaagaatgagggccactccaggaaatccagcagcagagactaggggattcgccttttcttttttttcttttttcttttttttgagacagagtctcactctgtcacctgggctggagtgcagtggcgcaatctcagctcactgccacctccgcctcccaggttcaagcgattctcctgcctcagcctcccgagtagctgggactacaggtgtgtgccagtgcgcccagctaatttttgtatttttagtagagacggggtttcaccgtgttggttggccaggatggtctcaatctcttgacctcattatctgcccacctcggcctcccaaagtgctgggattataggtgtgaaccaccgtgcctggggaattggccttttctaattagctactttcatatgacccagctttattcattttttatttctaagtgtctttgctcaagagtcagatatgacaagagaagaatcagattggcgtagtgtggattacagatttaaatagggtgttgatggtgggagtgtgtgtgtagggtttggagagagctgcaatttccagcccctacaggatcatatgaggttagaggagtggcagttctttaaaggaagggtggctgggtagttttgtagaatccttgagaaatagaattactgyttgcatatttgagccattggaaacaataacagtgtcatttttggagaagaatgatgggaggcactgacctaagggaattctcctctaaccatggctttcattttttctaagcaaagtgcatcgttactgtttctcttctcctttcctggacactagattttaaatgatgctatctgccaaacaaagtatatttcttcttttgagacagagtctcactctgtagcccaggctggagttcagtggcatgatctttgctcactgcagcctctgcctcctggattcaaggcttcttttgcctcagcctcccgagtagctgggattacaagtgtgcaccatcacgtccagctaatttttgtatttttaacggagatggggttttaccatgttggctaggctggtcttgaactcctgatctcaagtgatctacccgcctcagcctcctaaaatgctgggattacaggcgtgagccactgtgcctggtgaatatttctttttttttctttctttttcttttctttytttttttcgaggtggagtcttgctctgctgcccaggctggagtgcagtggaatgttctcggctcactgcaacctctgccttccaagttcaagagattctcctgcgtcagcctcccgagtagctgggattacaggcgtgaacccccacgcccggctaatttttgtatttttagtagagacggggtttcaccatgttggaccaggctggtctcgaactcctgactataggtgatccgcctgcctcggccttccaaagttctaggattacaggcgtgagccaccacacttggccagtatttcttaagtggtaatttctttcctcgtttttatgaatcaagactttgtacctatcaatctttgattctatgaaatatgattgcagctgaaagcaaaagaacctggtagtctagtgtgcctgtggactttgccatagtagttgtttccaaaagtttttgtttccaaaagcctggtagaaaataaacattacagactgggcgtggtggctcacgcctgtaatcccagcactttgggaggctgaggcaggcagatcatgaggtcaggagttcaagaccagcctggccaacatggtgaaaccccatctctactaaaaatacaaaaaaattagccaggtgtggtggtgggcacctgtaatcccagctgctcgggagattgaggcaggagaattgcttgaaactggaaagcagaggttgcagtgagccgagatcacgccatggcactccagcctgggcaacaaagagcgaaactccgtctcaaaaaataaataaataaataaataaaataaagtaaacattacagtaagtaagttcacagatctccttttctgtctgtgctactctttggacgatagaatttctctgcaggaagcagtggagtagtacagcaggttcctgaataacgtcacttcattcaaccttgtttgattataatgctgttgaaaattaaaaaattgcttccttactgggaccattgtctctttgtggagtttgcacattttctccatgtctgcacgggctttctccaggtatatcagtttcctcccacatcccgaagatgtgcactttaggtgaattggtgtgtctaaatggtcccaatctgagtgagggagagggagagagaggagggacggaaggagggtgggcggggtgggggtgggagagagagacagagagagacagagtgtgcgtgtgtatgtggtgtgtgcgtatgtgtgccctgcaatggaatggcatctgattcagggttggttaccacctggcaccctgagctgccgaggataggctccagccactctcaaccttgaactgaagtaagcaggtaaataattatcttacttgctttaatcttccttaaatgtatgtacaggtcacgtttatttcattgtgtaatattaggagtgttttggtctttatttgtaagtttggtgatgtttttgtgaccagaaatatgccataataacttcacccttgtttatatcaattagcctctggtaaaattggttttgttatacatgcttttgcttaaagttgcagtttccaacaaaccattgatgacattaattgaggacttactgtactggagagctaggaagcctttagaaagaacatccaggccgggtgcggtggctcacgcctgtaatcctagcacttttgagaggctgaggcgggtggatcacttaaggtcaggagttcaagacctgcctggccaacatggtgaaaccctgtctctattaaaaatacaaaaattagccaggtgtggtggtgggcatctataatcccagctactcgggaggctgaggctggagaattgtttgaacccagggtatggaggttgcagtaagctgagatcgcaacttcactccagcctgggtgaaagagtgaaactccatctcaaaaaaaaaaaaaaagaaagaaagaaagaaagcacccagcagagctgctgacctctctgttgacacaacacagggaggccaggtggcatcagacttctgtctaaaccatttcaaaagtcagatccgtatgaaagagctggcagcccatttttgcttttacataaacctaatgagagatatgtttagtattttcttttagtcattaaaaaaattatttttctaagttaaccatcaagtcatttagttaaaaacctcagacattagttgtttgctgctgtattttttggaagaatcatacagttggctttttctttcccttacattctttcagataatttttgtatactgataataaaaacaactagcatccatgtagtgatttaacttttatcacagtcattttatatttattttaaatagacacttgaggataaaaagttttacttgtattcccatttaataaataagaaaactgagtatctctcacccgagggttctacctgtttaatatatcttatgtgcatctccgatgatactaccttagctcaacttcattacctttttaaaaagatatttattgagttgcaattgacatacaaaaaggtgtaaatctctaaagtttactatttttaagattttggtacatgtatacaattgtgaaaccatcactgcattaaagatggtgaatatattaatcacccctgaaagttttctcatagtcctttgtagtctctgctcccctagcaaccactggtctgctttctgccatagattagtttgcatttgctacagttttatgtaaatggagttatataatatgtacttttaaaaaataatctggccactttcactcagtgtaactattttgaggttcacttatgttttgcatgtgtaaatagttaacttgtttttattgcttagtagtagtccattgtagagacataccacaatttatttacctatttagctactgggagacattgagctgcttttagtttttggctattacaaataaagctgctatgaacattcacatgtaagtctgtatggacatatattttcttttctcttaggtaaatacctaggagtggaatgactagatgatatggtaggtatatgtttttaagaaactgtcaaactgttttctaaaatagttgtattttttatattcccaccagcagtatatgacattttcagttcttccatatctttacaaacacttggtatggttggtctacttaattttagccattctgatagtataatgatcgtggttttattttgtatttgcctaatgactaacaatgttgagcatccttttatgtacatgtttccattcatatctcttttttggtagagtatctgttaaatcttttgtctgctttttattgggttgtttttctaaattgagttttgagaattctttatatattctccatttaagtcttttatcaaatatatactttgctaagattttctccagatctgtggcttgtcctatcagtcttttaacagtgtcttttgaagagcagaaagttgtaattttgacgaagtccagtttatcaatttgttttttaacagatcatgsttttggtattgtatctaataaatctttgcctaacccaggatcacacaaagatttctttctgtttctttctagaagttttgtagttttatgttttacatttaggtctataattcattttgtattaatttttatatgtggtgtgaaatatggaacttacttctttattgtgcttacacgtggtcccaattgttctagaaccrtttttagaaatgctgttcttttcttcattgcrttgccacacctctcatcttttgtcaaaaatcagttgtttaagctgagtgcagtagcatacactgtagtcccagctattcaggtggctgaggtggggtgggtgggtgaaaactgcttgagcccaggagttggagtccagccagggcagcatagcaagaacctgtttctaaaaaacaagcaaacaaaaatgcctcaagttgtttgtataagtgtgagtttatttttggactctattatgatacgctgatctatctgtctgtctttatgccagtaccatgctattttgattaccatagaattataataattctttcaatcaggtagtgttagccctccaactttgttctttttcaagttattttggctgtttcaggtccttgaataaacctgtcaatttctacaaaaaagcctggtgggattttgaataggattgcattgaatctatagatgagtttgagagaactgacatcttcaaaatactgatgttctttcaacccataaacaragtacatctctccatttatttaagagatacactttctctgggtactattttttggtctttcacatttagaactttcacatcttttgtcagatttatcactaagtagttcatagttttttatgctgttgtatatggtattttttaaaatcatggtaaaatacatataacaaaatttactatgtaaatggtattttaaaataatttctgattgttgcttatatacagaaatgtaattgatttttatatattgattttatattctagacatgaagtccttgcccatgcctatgtcctgaatggtaatgcctagattttcttctagggtttttatggttttaggtctaacgtttaagtctttaatccatcttgaattgatttttgtataaggtgtaaggaagggatccagtttcggctttctacatatggctagccagttttcccagcaccatttattaaatagggaatcctttccccattgcttgtttttctcaggtttgtcaaagatcagatagttgtagatatgyggcgttatttctgagggctctgttctgttccattgatctatatctctgttttggtaccagtaccatgctattttggttactgtagccttgtagtatagtttgaagtcaggtagcgtgatgcctccggctttgttcttttggcttaggattgacttggcgatgcgggctcttttttggttccatatgaactttaaagtagtttaaactaaaaatgtatattctatgaagtgctaaactcatttagtagatttcatcacatttttttnnnnnnnnnnnnnnnnnnnnnnnnnnnnnnnnnnnnnnnnnnnnnnnnnnnnnnnnnnnnnnnnnnnnnnnnnnnnnnnnnnnnnnnnnnnnnnnnnnnnnnnnnnnnnnnnnnnnnnnnnnnnnnnnnnnnnnnnnnnnnnnnnnnnnnnnnnnnnnnnnnnnnnnnnnnnnnnnnnnnnnnnnnnnnnnnnnnnnnnnnnnnnnnnnnnnnnnnnnnnnnnnnnnnnnnnnnnnnnnnnnnnnnnnnnnnnnnnnnnnnnnnnnnnnnnnnnnnnnnnnnnnnnnnnnnnnnnnnnnnnnnngtgcctggctgtttctgatcttagaaaacattcagtctttcaccataaaatataatgttgggccagatgcggtggcttatgcctgtaatcccagcactttgggaggctgaggtgggtggawcacgaggtcaggagtttgagaccagcctggccaacattgtgaaacctcatctctactaaaaatacaaaaattagctggttgtggtggcgggcgcctgtaatcccagctacttgggaggctgaggcaggagaatcgcttgaacccaggaggcgggggttgcagtgagccaagattgtgccactgcactccagtctgggcaacagagtgagacactgtctcggaaaaataaataaataaaataaaatamcaaaattatatatatatataatgttggctgtgggttttttgtagtgcctctctactcctagtttgctgagagcctttatcaggcatagatactggattttatcaaakgagttttctgtgtctattgagatgattgcatggtttttctgtttgtttgttaatttgataaattacagtgactgagttttgagtgtaaagctaaccctgcattcttgggataaatccccttggtcataatgtattatcctttcactgtattgttggattagatttgctaaaattttgttttaaatttttatgtctttgttcatgaaggatactggtttgtagytttcttaaaatgtctttgtttttggtatcaggataatgtttgtctcataggatgaattatgaagtattcctcaagtttttttgaagagttcatgtagaattggtattattttttcttaaatatttgatagaattcagcagtgaagctaactgagcttagagttttctttgtgggaaggtttttaattatagtgtcaatttctttaataggtataaggctgttcaggttatctatttcttgagtgagcttaggtactttgtgtctttcaagaaatttgtctatttcacctgtgttgtcaaatttactggtatatgttaataaaattgccttattttaatgtctgtaaaatcagtaataatgtctcattactgatcttaataatttgtgtcttcttttctttactgattggtcttattagatctttgttaattttacagaaccagtgtttggttttattgatttttctctggtttctatttcattgatttccactttgatctgtattattttctttcatctgctactttggatatcatttgctcttttattttttagtttggtaaggtgaaaactaaggtcaccagtatgagacctttcttcttttctaatacagaatttagtgctgtaaatctcccttaactactgctttagaggcatgtcccaaattctggtgtattgtgtttttttttttttttcctcttttccaactgatttattagtagcgcagacgaataaaaatacctagagtgaagacacaattaatggcaaatgttctcctattactttttttcctgatataatcttcaataacttagtatcccttaataatatgttctaatttgagagattctttttgccctggaaatgcatacctttaaaatctgttttagaccttagatccatccrttattggtttatcattatattggatgaaatgttgtgcttttttttttgacttagctcaaaatattttatatttcctttttgacatctttagttcacaagttatttagaagcaagttatttagtttccaaacatttggagattttttttagacttttttagttattgatctctaatttaattccattgtgatctgagatcatactttatgtgacttgaagcctttaaaaaattttaagatttttttctttcatgtcctaggacatggtctatcttgttaaatatcccatgtgcacttgtatgtgttctgttgggtggagagttctataaatgtcaatcaggtctgtttttgttgttttgcttttttttttttttttcaacttttaagttccagggtacatgtgcaggatgtgcaggtttgttatataggtaaatgtgtgccatggtggttttctgcacagataacccgtcacctaggtgtttagccctgcagccattagctgytcttcctgatgctttcgctcctcccactcccctgacaatgtatgttgttccccctgatgtgtctgtgtgttctcatcgttgagctctcacttgcaagtgagaacatgcactgtttggttttccattcttgcgtgaatttgctgaggataacagcttccaactctattcatgtccctgcaaaggacatgatctcgttccttttcatgggtgcatagtattccatggkatatatataccacattttctttatgcagtctttcattgatgggcatttgggttgattccatgtctttgctattgtgaatagtgctgcagtgaacatacatgtgcatttatctttataatagaatggtttatattcctttgggtgtatacccagtaatgagattgctgggtcaaatggtatttctgcttctrgatctttgaggaatcaccacagtgtcttccacaatggtgaactaatttgcattcccaccaacagtgtaaaagtgttcctttttctctgcaaccttgccagcatctgttgtttcttgactttttagtaattgccattctgactggtatgagatggtatctcattgtggttttgatttgcatttctctaatgatcagtgacgttgagcttttttcatatgtttgttggtcgcatgaatatcttcttttgagaagtatctgttcatgtcttttgcccactttttaatggggttgtttattttttctttgtatatttgtttaagttccttgaggactctggatattagacctttgtcagatggatagattgcaaacattttctcccattctgtaccattcaggacataggcacaggcaaaagtttcatgatgaaaatgccaaaagcaaatgcaacacaagcaaaaactgacaaatgggatctaattaaagagcctctgtatagcaaaagtaactatcatcggagtgaacaggcaacctacagagtgggagaaaatcaggtcatgttggttgatggtattgttcaagtctacatatctttatcaattttccacctacttgttctatctttttcctttcttttctttctttctttcttttttttttttgagatggagtctcgctctgttgcccaggctagagtgcagtagcatgatctcggctcactgcaacctccgcctccygggttcaggcaattctcctgcctcagcctcctgagtagctggaattacaggtgtgtcccaccatccctggctagtttttggatttttagtagagacagggtttcaccatgttgactggtctcgaactcctgacctcaagtgatctgccttcctcaacctcacaaagtactggaattacaggcgtgagccactgcatccagcctgcatacttgttctatcaattgttagagaggagtatttaagtttccagttataactgtggatttgcctatttttccttgtagtttytggttcacgtattttgaagctctgttactaggtgcataaagatttaggatgattatttcttagtgattaactgaccccttcaacattatgaaatgaactgctttatccttcgtggtaatctttgctctgaaatctactttgataaaaatatagctgtcttttgactgttgttagtttggaatgtctttttccatccctctacatttaatctatttgtatttttatatttaaagtacatttcctgtaggtgcatatagttgggtcctatatatatatatgtatattttgcaatgtgacaatatctgttaattgcattatttagaccatttacgtttggtgtgattattaatatgattaatcaaatatgattgatatgattattaatataagataatttaggttagtccattttcttgctatttgttttccgtttgtcccatctgttctttaattccttttcctaccttttctgctttcttttgggttaattcagtattttttataattcaattgtattttctttgttggcttattagatataactggtattttagtggttgctttaggagataaaagatatgtatctttaactcatcacagtcttttttttttttttgagacagagtcttgctttgtaacccaggctggagtgcagtggtgtgatcttggcttactgcaacctctgtctcttgggttcaagagattctcgtgccccagcctcctgagtagctggaataacaggtgcatgccactacgcccagctaatttttgtatttttaatagagatggggttttgccatgttggtcaggctggtctcgaactcctgacttcaggtgatccgcctacctcggcttcccaaagtactggtgttacagatctgagccactgcactgggcctactttcaagatatattataacatgtcacatgtagtataagaagcttccagtagcacatataccctaaaacttaaagtataataataawaaaaaaaagaagcttccagtagtgtattttcatttccctctctcaagcttagattttaatccttgcactgtggcttggaaattcaaggccataagctggggcaattgtataacttccctcatttgtttcctatctctcaagagtcattgtcctttgtaggctgatgtccagtgtcctgaaaaccattatttcatatatgttgtcttttttgggaggggtaattttaattcaggaggragggtaaattccatctctggtacttcagcttaccctgaaacagaagtgtcagctgaatcttcttttgcttgggccgttgttcttcatataccattattcttggcccagcctagctctactgctatgtatctttcacttggttccagatctgacgaggtctttgcttacatttttcagagttttcccatttttctctcatacatgaaacaaacaagttagggcatcaaatttctgggtgtaagaaatattctcaaatggaagttggagaaataaagatactgttaaaaatgttacaagtaaatacctgtatagcaataaatagtaatcatgttattttgaaagaataaatactggctttcctattggtcggataacccttcagcttgtgtaggrgtagcgataagcttagatcacaactgctgtctcatttgagactcaacagaataagatatccaaagcttagtaatttttgatgaaaaaaaattatagaaaatgttggctctgtgtggtgactcatgcctgcaattccagccctgtgagaggatcacttgagccccagaggttgaggctacagtgagctatggtcatgccactgtacttcagcctgggtgacagaatgaaaccctatctctgaaaaaaagaaagaagctgggcgtggtggctcatgtctgtaatcccatcactttgggaggctgaggcaggtggatcacagggtcaggagttcaagatcagcttggccaacatggtgcaaccccgtctctactaaaaatacaaaaattagctgggcatggtggcgggcacctgtaatcacggctactcgggaggctgaggcagataattgcttgaacccaggaggcagaggttgcagtgagctgagatcatgccrctgcactccagcctgggcaacagagtaagactccrtctcaaaaaaaaaaaaaaaaaaacgaaagaaagaaaatgtcagtgatttttttttcatgtttatctgtgagatgttagtcagatgtattgaaattaaatgtccatctgtaatctcaaaatgaattaccttatctgggagaaaagagtaatatgtacacataaataaaaatctgatgatattttattttattatattgtactttttgatggtgtctcactctgttgcccaggctggagtacagtggcgtgatcttggctcactgcaacctctgcctcccaggttcargtgattctcctgcctcagcctcccaagtagctgggtttgcaggtgcccacgatgacgcccagctaattttttgtatttttagtaragatggggtttcatcatgttggccaggctggtcttgaactcctgasctcatgtgatctgcctgcctcggccttccaaagtgctgggattacaggtgtaagccaccgtgctcagccctgatggtattttatatcttgagagtttatttatattttaatgctgtagttctstgttattccttatctacctctgtggtattggccctagaaggtagtgtttttctcctataatttatgtaaacatttctgtgttaaaaatttactgagtaccttctatatactaggcattgtgctagatgagtttagcatacaaggtccatgcttatttctctgatctacttgttttccatcattccacaccacatctcctctggaagtgcactgctttattggcagttcctaggaaatgttgttctttttcatcccatggtgctttcatatatgctgtttcctctattcatctttctcatttgttgatctgtttaaaactcaattaatcatttctttaagtcttcttccctgaaaaccacaggctaagttaggtgtcttcttctgtgttcccacagcccctatctcttcacagcccttagcacactaaatgcaaagatctgttccactgccggttttcccatcagactactggagtgcagcattttatatgattttatctcttaatacttagcacagggcctggcccagagtaggaatgcagcacacaaaaatgtgtccttgactgtttgattgtgtgatcttagataagttgtttggcctacccaacatttcatagcacctaggttctcttactactctgcagccatgctgccagacttctctaatctgtctctactaaccttgtggtttctctmttggtggtctttaatagcatgtcctgttgggccctgggagacctggtttttgcctggtagcctagtgagcctatcacatgaggcctaggccagattatttttgcartgatggttcagggtttgataatgacatcagattagaaaatgaagacctttacctcactgtagtcccagatgagaagctgctagtgggaaccagaaggaagctacttaaagagacaattcacagttccaggtcacacactatctttaggaagggccactttggaaggatttgatagctgccttggagtgctgttattcagagcagaccaataagaagctgggttttgtgatgccttttctgattctgtcagtcactcctttctctgtgctcccacatcaccttatatatccctgtgacctagcatttatcacactatattatattcatttgtttccttgtatattcccctctctagaagagagcccttgaggctggagttcatgcatattcacctctgtgctggttaactcaccctttacctgctagagtagaagccaataaaagcttagtgaatgaatgaataaatgaatggcgataataattatagatgattttttttacacttatagtatgctaggagcttccctttactacatttttatgatgtgaaaactctgattttcatcattttggtggtgaaaaaaatgaggcacaaaatattaagtaatttgcccatggtcttacatctagtaagtggcagattgcaaatycaaatcaagacacctggtttcaaagttcacattcttctttttttttttgagatgggatctttgctatcactcagggtggagtggtgcaatcttggctcactctagcctcaactccaggtgatcctcccacctcagcctcccaagtagctgggactacaggtgcgcgccatcacacacagctaattttattttttgtagagacgaggtctcactttgttgcccaggctggtcttgaactcctggcctcaagtgatcctcctgccttggcatcccaaagtattaggattataggtgtgagccaccgtgcttggccaaagctcacattcttaaccactgtgctatatctgactagctgactaaaggctaagtgaccaactaactaacagctgtgtgaaggaggggcaaagaaagtactggcaaccttcctgccagacctcattctcttgagatgtggatttgaaaccacaaaagtagatgagggcttcgtctggaggcaccacaggtccattatgggaaagagatactgattcgggaatccatttactattattccttccctgccaagagaaaagattggccaaggccaagtgtttgccctggcacatccctggatgtattgctatagctcaagtgctagggagtatactgttccttctgcctggtatgcccttcccccaaatgtccacatgcctcataccttttatttcattttctgctcaaatatcacttcatcagagaggccttccctaatctgacctaatacaatataggactattttttatccccttaaccccttatggcttaattgttctttattatacttatcaccatctgacatataattatttgtttatagtgttttattttgtctccctccaccaaaatataagcaccatgggatctgtgactgttttgtgtattgttgtatctttactcctagagtggtgcctggcaagtagtagctgctcaataaatgttttttccccctaatgaatatattattttggagtttgagaccacttgttttcaaggacctttgtcatttggtgtcagcaatacctcattctccttgaccctatatataactcttggactccagacaaactagagtcagtgttctctgagcatgcttcacatcttatagctctttgtctttgttcacgattctttcttctggcagatctgcatctctgtccatccagattctgaccagtccttaatatctacccctttttgaatgaaggtacatatgaagaaaaagttactactgagtttgtattaaatcctaggcatctcaaacacattaactcatttaattcaacaactctgggagacagatattgctaaattgtaagctacatgggagtagggatctctctcttgatcaccgctctattcctagtgcctggtctcagaatagaacgaaataaatgcttgttgaatagcaaaatgaatattttacagaaggggaaattgaggttcataatggttaagtgatttacgcaagctagttcatggcagataggataggcaaggtcttccagcttcaaattcagtgtttttttgtaatatatcctaaaataaaaaatcagtgttctaaaatgccaggggtttggcagtctttaataactttagtttttgtagctacctcagaataaaacaggaggttttattgatttttacatgaaaattgttcttaatcataaaaggtctgttcctttctataaaacatagtatggagaccagggtatatctttactacccaagatgctaactggacaccagtttctgggattctttgtggatatgtgtcattagtactttttaatttttttatacctcccccctttacctccrtaagtagtctgtgggggtaagtgatacttttttgtgagaaaacataatataaatactgatgggatggacaacaagtgatccaggacccacagattgccatcatttgttcattcgaagaagatactagaggtggtatttatgttgtacttatttttatctcattgtttaatttttatgtgtgttttacaatctatctaatgttagtaaatgaatctaatttataaacacatatacgtatattggcaatgtgtgtacaaagctttttttttacaggtagattatgtcattaaaaagattggagatggctgggcgtggtggctcatgcttgtaatcccagcactttgggaggccaaagtgggcggatcacgaggtcaggagattgagaccatcctggccaacatggtgaaaccytgtctctactaaaaatacaaaaattagctggscgtggtggcacgtgccygtaatcccagctactcgggaggctgaggcaggagaatcgcttgaacvtgggaggyggaggttgcagtgagctgagattgtaccattgcactccagcctagcgacatagtagactccgcctcaaaaaaaaagaaaaaaaagataggagttaagtcaccctgtgtgtctctcttgtgaaggatggtttgttgtgtagaactccaggggttagccttctctgattcggtgtagcattgtttgtcattttgcccagaggtgtagtctttgatctggctaggggccacatggacaggctcaggggatgggagacttatgacattaggacattgactcttgcttgcatgtcctcctgggatttggacatatgagtcatttggagtctgtatctgtactaagctctccttgccaaattctgcagcctgtcactgatagccacagctctctgtacttgctgttgccttcttcctcactctggcccagggattcttcctatcttctctttggaatgagaaaacagaacaagacttttaacttttaggtgcttgaaccttggggacagggagccctgatatatcagctggtctgttgaatgagatcttcatgctggaactcagggttgctatctgagatacagatgttatagaggatacagctcatcctggcttgttttgttcagactatagtgactccaggtggacaccatgctgccaaaccctacctagatagggcatctgcctaggtaacagaatgatatatgcagataaaaacaacaacaacaaacaaaccaaaacaatcttgaggtttggtctgacatgctgaagctattctccttttcccctacagcttagctatgtaggagcgattattctagagtccatcttcagtggagtgtattggcccccttggcaaccccgtgcctcacttaatgcagtgtttagagcagtggttctcagctgggggcagtttttcccttccatgggatgttgaacaatatctggagacattttttaattgtcatgattggcagcatgttactggcatctatgttgttaaacatcctgcaatgcacaggacagcctccacaacgaaggattatctcatctaaaatgtcattggggcagaggctcagaaactctggtctagagtgacttctgcctgtcaccactgtggtgtagggtgctgatagaggagtttctgcatgccaagattctatgcccagacttgtatcaaggcatcctcccagtagacaaaaggcccttgatgtactgctggcctcaggccttctagcaataaaaaagtagccttctttccactacactccaagcagaaaggcccctttgtgctggatgaggtcgacttcccttggcagcagtggcaggagtgtgttgttctctgtactttacaggctagcacttgtctgtctgccttatatctgtgtgtcactctcttatgccttcattacctgacactccagaccatagtaaatgataacatctgcaatgcgttaggatatatattcattttcaggaataatacrttctagtccatttaacttccatcagcattttttttttttttgagtcagggtcttgctctgtcacccaggctggagtacagtgttgcaatctcagctcactgcaacctctgccttccaggcttacgtgatcctcccacctcagcctcctgagtagctaggactataggcatgtactaccacacctggctaattttttaatatttttttgtagagatgggttttgtcatatttcccaggttggccttgaatttctgggctcaggcgatccacctgtctcagcctccctatgtgctgggattatagtcatgagccaccaagtccatccctcaacacttctttttttttttttttttttttgagacgaagttttgctctgttgcccaggctggagtgcagtggtgagatctcagctcactgcagccctccgcctcccaggttcaagtgatccttccacctcagcctcccgagtagctgggattacaggcacgtgacaccatgcccagctaatttttgtatttttagtagagacagggtttcaccatgttggccagggtggtctcgaactctcctgacctcaaagtgatccacccacctcggcctcccaaagtgctgggattacaggcgtgagctacctttttttttttttttttttttttttgagacagcctcagtctgtcgcccaggctggagtgcagtggtgcgatctcagctcactgcaacctctgcctcctgggttccagtgattctcatgccttagcctcccaagtagctgggatcacaggcacgcaccacccctcaacactaatttaaccccagctctgtcatccttcttttctcaacggtatctcttggaaattaatttatctttttcttccaacatattctagtctgggaattagaaatataaccaagcactgactaagcacccttcacttaagcttctagtatcttgtctcctaggatgcattcctggacacactgtgtctgcctcatttccttcccctgccacctttcccttctcacctcccatgcctctgcaaatagtctaatcttcccccaaaggcactcagcttcagagctttccttctgaactccagcatcttcttgaggacattaagagattggagcattcttgccttcaactttattttattcaggatgtctccctgattatctgctttgcatcacatcctgggctgagaggaatgcctgattttgtttgttttgttttctttgtttttgagacagggtctcgttctgctgcccaggctggagtgcaatggtgcagttatggctcactgcaaccttgaactcctgggctcaagttatcctcccacttcatcctcctaagtagctgggactacaggcatgtgccattaggcctggctaatttttttatttttcttttgtagagttggagtctgctgtgttgcttaggttcgtctcaaactcctggcctcaagtgatcctcctgcctcagcctcccaaagtgctgggattataggcatgagccaccatgtctggccaaatgcctgttttttgacaagcatttcagaagttacttatccacgtgagctgtatgtttttctaaggaggttttgttgttgttgttttgaggcccacatcaaatcatttctggaacccctcatttagagtagttcttattgatgccactgtatatgaagctcttagttcagaaacagtggatgagcaaaaatgaacaggacacattccgtgccttcaatgttttctgcctattaaagggaaattagaccaggtctgatggctcatgcctataatcttatcactttgggaggctgaggctggaggactgccagaggccaggagttctagaccagcctgggcagcattgggagaccccatctctacaacaagtaaaagaatttgaccaggcacagtagctcacgtctgtaatcccagcactttgtgaggccaaggtgggaggatcacttgaggccaggagtctgagaccaacctggacaacatggtgaaaccccatctgtactgaaaatacagaaattaactgggtgtggcggcacgtgtctgtaatcccagctactccagaggctgaggcaggagaattacatgaacctgggaggcggaggcttcagtgagctgagattgtgccactgcactccagcctgggtggcagagcaagaccctttttcaaacaaaacaaaacaaaacaaaacaaagacaaagacaaagacaaaaaaagagttagcctagcatggtagtagtacatgcctgtagtcttagctactcaggaagctgaggcaggaggatctcttgagcccaggagttcaaggctgcagtgagctgtgaccatgccactgcactcaagcctcggtggcagagcaagacctgtctctcttttttttttttttttgagatggartctcactctgtcacccaggctggagtgccatggcgtgatctcagctcactgcaacctccgcctcccaggttcgagtgattcttctgcctcagcctcccaagtagctggaactgaaggtgcgtgccaccacgccccgctaatttttttgtatttttagtagagacagggtttcagcatgttggccaggatgatctcgatcccctgacctcatgatctgcccacctcagcctcccaaagtgttgggattacaggtgttgagccaccgtgcctggccaagacctgtgtcttcaaagaaaaaagatatggatcttatgagaggacagtgatgaatctcaccgtatcattcaacttcaaaacttttttggcttcttgctgcttacagcagtggttttcaaacttgaagaatgtacaaattccttttaaggtaaataatacatcttggacctgcagtgctgacttaaattatttttattataatgttatttaagtatatacaaacatagaacaaagtttaagtcactgtgtaaaatttgtatataagtgtaaacaaaaacagatttatactttaagtaaaaataaacttcagatccaataaaatgatgcttttttgctgaaaatcagttgcttccaggctctttttaagttcagcatatctgtattgctgggtaccatgtgatgactcattcctcccaccatttttctttatttaagctaccatgaaactttgattcatgatctcatttgaccttcactgggctggaactattccttgtgtattgtgtattaagtctacttctattccttcataattgacttttaacaaagtatagagataaatttgctttctgtgtgtttaaacacaatacagatataaaaattattattattattattaattttttttttgagacagagtctcgctctgtcgcccaggctggagtgcagtggcacratctcagctcgctgcaacctccacctcccgagttcaagcaattctcctaccttagcctcctgagtagctgagattataggtgcccgccaccacgcccagttaatttttgttcttttagtagagatggggtttcaccatgttggccaggctggtcttgaactcctgacctyaggtgatctgcccgcctmggcctcccaaagtgctgggattacaggcgtaagccactgcacctggcctataaattattttaaaagggtactttttatgactattcattaaaaacatcacattataatattgaggaatcactagctctagtgctccacgtatggtgatgatgcaatttgccatgttgcaaatgaccattcagttgtttcagttagagttggttcctgttatgacagaaaatcctttcaatctgatataagcaaaagggagaatgtacttcttgcacaaaactgaaatatctatgaataggactttctacaggcattatctgactcagggcttaaattatatcagctkgattttttttttttttttttgagacaggctctcactctgttgcccaagctggagtgcaatggcatgatcgcggcttattgcaacctcgacctccgaggctcaagccatcctcccacctcagcctcctgagtagctgggaccacaggttcacatcaccacacctggctaatttttttttttattttttgtagatatgtggtctccctatgttgccctgactgatctcaaacccctgagttcaagtgatcctcctgcctcagtctcccaaagtgctgggattataggcgtgagtcactgtgcctggcctgtcatctggatcttgactcagcttttcctctgtatgaaggcttccagcagcatcagggaggttgtatacacaacccccctgcccaaacacacacacacacacacacacacacacacacacacacacacacacacacacacatgcttagaacgtgaatgatggagccagactgcctgagaccaaatcttggctttcccagttcctagctgggtaactttgggaaagttatataagcttgctgtgctttagtttcttcatccttaaaatggggataaaatgggatatctacttcatatgaaaatgatgaagattagtgagttaatatatgtgaggtacttagaacaatactctcatagactaagcgctatgtaagagatggcttctattactattattattattgttgttgttattaacattatagttcaggttcattttatcccagacaccagtatagtggaaaagcaagcatatcccctatgggccaaacaaaaattttagaattcagtttcttcagccttgatttgggttatgtactcatccctgaactaagcactatgggcagaaagatggaatgtattgattggtttagcttgggttacatactctacttttaaaggctgatttagctttacctgaagcatattagctgagagcaagggaggagtggttctgttcatacaaattcagaatactgttgccaccaaaaagggaagtggatgcttggtggcaaaagtgaaccatgttcattatagtgctatcagatagatcgtaataggtgatcctgttatactacattagtctctctggggatgcaccaattgggacagttcttgtctgaattaaactaaaagacagtttatatcttttagtgggtaatatttgtctttttgaattgcaattatgaatgtatattttgtgtaaaaacatcagtttgacctctgggttcttttgtattaaaatatttaaatttgagatatattattgttatgaagtacattatgtcctaaaattccaggaaaatrcagttgagccttaacaacacagrggttaggggtgctgactgtcccttttcccccatgtagtcagaaatccacttgcaacttttgactccctcaaaattgaactattaatagcttgttgaccagaagacttaccaataacataaacagcctattaacacatattttatatgttatatgtattatatactgtattcttacaataaagtaagagaagaggaaatgttattaagataatcataaggaagagaaaatakatttactgtttattaagtggaagtggatcatcataaaggttttcatcctcatcttcacattgagtgggctgaggaggaggaggaagaagagagattagtcttgctgtctcaggggtggcagaggcagaaaagatagagaaggtaggaagggaggtgggagaagcaggcacactcagtataccttttattgaaaaaaaaatccatgtataaaattcatgtataaatggacccaggaagttaaaacctgcattgtttaaaggtgaacggtgtcactgtaactattttgcatcaacacacttataaacacaaatgcaacatgagcactgaagttgagagcctgtattcttatatatctagatgatacagaataaacttttgctttttacttttagcttatttccaaaatataaatatagaatcaaaacactttaatggtaaattgtcttttttttttttttgagatggagtattgctctgtcactcaggctggagtgcagtgacgcaatctcggctcactgcaacctctgcttcccgagttcaagcgattttcctgcctcagcctcccgagtagctgggactacaggcatgcaccaccacgcctggctaatttctgtgtttttaatagagacgaggtttcaccatgttggccaggatggtcttgaactcttgaggtcagatgatccacctgccttcgcctcccaaagtgctgggattacagtcatgaaccactgcctggccrtaaattatctttttttatctgttttgcaacagtctcactccgtcactcaggctagagtgcagtggcgtgatcatggctctctgcaggctcaatctcccaggctcaagtgatcctcccacctcagcctcctgaggagctgggactctaggtgtgcaccaccacacctggctaattgtccctgtttgcagatgacatgattgtatgtttagaaaaccccatcgtctcagcccaaaatctccttaagctgataagcaacttcagcaaagtctcaggatacaaaatcaatgtgcaaaaatcataagcattcctatacatcaagaacagacaaacagagagccaaatcatgagtgaactcccattcacaattgcttcaaagagaataaaatacctaggaatccaacttacaagggatgtgaagcacctcttcaaggagaactacaaaccactgctcaatgawataaaagaggacacaaacaaatggaagaacattccatgctcatggataggaaaaatcaatatcgtgaaaatggccatattgcccaaggtaatttatagattcagtgccatgcccatcaagctaccaatgaattttttcacagaattggaaaaaactactttaaagttcatatggaaccaaaaaagagcctaagccaaaagaacaaagctggaggcatcatgctacctgacttcaaactatactacaaggctacagtaaccaaaacagcatggtaccggtaccaaaacagagatctagaccaatggagcagaacagagccctcagaaataataccacacatctgtaaccatctgatctttgacaaacctgacaaaaacaagaaatggggaaaggattccctatttaataaatggtgttgggaaaactggctagccatatgtagaaagctgaaactggatcccttccttacaccttatacaaaaattaattcaagatggattaaaaacttacatgttagacctaaaaccatgaaaaccctagaagaaaacctaggcaataccattcaggacataggcatgggcaaggacttcatgtctaaaacaccaaaagcaatggcaacaaaagccaaaatggacaaatggagtctaattaaactaaagagcttctgctcagcagaagaaactaccatcagagtgaacaggcaacctacagaatgggagaaaagttttgcaatatactcatctgacaaagggctaatatccagaatctacaaagaactcaaacaaagttacaagaaaaaaccccatcaaaaagtaggcgaaggatatgaacagacacttctcaaaagaagacatttatgcagccaacagacacatggaaaaatgctcatcgtcactggccatcagagaaatgcaaatcaaaaccgcaatgagataccatctcacaccagttagaatggtgatcattaaaaagtcaggaaacaacaggtgctggagaggacgtggagaaataggaacccttttacactgttggtgggactgtaaactagtttaaccattgtggaagacagtgtggtgattcctcaaggatctagaactagaaataccatttgacccagccatcccattactgggtatatacccaaaggattataaatcatgctgctataaagacacatgcrcacgtgtgtttattgcagcactattcaaaatagcaaagacttggaaccaacccaaatgtccatcaacgatagattggattaagaagatgtggcacatatacaccatggaatactatgcagccataaaaaaggatgaattcatgtcctttgtagggacatggatgaagctggaaaccatcattctcagcaaaatatcgcaagaacaaaaaaccaaacaccgcatgttctcactcataggtgggaattgaacagtgagaacacttggacacaggaaggggaacatcacacactgaggcctgttgtggggtggggggaagggggagagatagcattaggagatatacctaatgtaaatgacaagttaatgggtgcagcacaccaacatggcacatgtatagatatgtaaaaaacctgcacattgtgcacatgtaccctagaacttaaagtataataaaataaaaaaaagaaagaaagaaaaaccaggcgaccaaatagaaaaaaaaaaattttaatagagacagggtctcactgtattgcccaggctggtcttgaattctggagttcaagcaatctcccgccttagcctctcaaagtgctggaattacaggtgtgagctaccatgcccggcctatattagattatcttgaccagtgctgtctaacagaactttctacaatgatggaaatgttgtatagtttatgctgtccaatatggtaggcactagccacatctagctattgggcacttgaagtgtggctagtgccatcgagcaactgaattcttaatttatttaattttaataaatttaaattgccactgtggctactggctactactgcttggacagtgcagctctgaataacatcaaataagagaatggctataaagtgcccagtgtgctctatactaagcacacagtagatgtgagaggaggagaggtctatagattctgtcctgaaaagggttgggcctcacctaactggccagagcaacctgagttaggcttatcccaggacaatactagtagctatcttagcatggtagtcaagactctttgtgacatggcttcaaccttcttctgccactacctgccatatattctatattctagaccaggggtccccaacccctgggccacggacctgtgtcagtccatggcccgttagggactgggctgcacagcaggagatgagtggtgggtgagggagtattactgcctgaactccaccttttgtcagatcagcagtggcattagatcctcataggagtgcgaaccctattatgaactgcacatgtgagggatctaggttacgtgcttcttatgagaatctcactgatgcctgatgatctaggtggaacagtttcatgctgaaaccatctccctgcccaggtccatggaaaaatcatcttccatgaaaccagtccctcatgccaaaaaggttggggactgctgtttcacacacatcaaatttcacatcttttcttttgcacctgtcttcattctgtattgagtgccctcctctccccacacccatgaaatatttgagataagcttctactaatcctttatgttgcaatacatcatcttctctgaggctgtccctgaagccctaggcagttatttcctttcttctctgtgccgtatgtatttttctcatcagaatctgtgcttcactcatgctgtttagcttttgatctcttccactggattgggaactaacttcctccaggcttggcactaagtagtccccttatgaatgctcagttgaatagctggacgaatggatggatggataattgattctcaaccctggtcacaacagtttaaaaatattccaaaatcaaatttattgagttataatttacataaaagaagatacacctattttaaatgtacagtttgatgcattttgacagatgttatcatttgtgtaaccaccaccacattcaagatatagaatatatccatcaccttataatgttgcatttgtgattttttcccagtcagtccccagctcccttcctggctccagctaaccattgatctgctttctatcactatagatttgtcttttctaggatttcatataaatagactcacagtgtatactcctttcatacttagtattttatgggacagatagatattaaacacacaaatgtggtaaatattaaggtcagcatgacaacaaatgaaagcagtgcttggcattctagagtcatggctttgcttgtctcttttcacagtatacaattggaccgtggatgaggtggtacagtggctgatcacatatgtggagctgcctcagtatgaggagaccttccggaagctgcagctcagtggccatgccatgccaaggtcaggaggggactgggtttttctctgttgagggtacggggaatgggctggagtgggcctgccttcagattgctctggccagttaagtgaggttctgcctttttcagggcagcgtctatagatcttgcctcttctcacatctgttgtgcacttgctataaagtatgatgggcgctttgtawccactctcttctttaatattcctgtcagtcctgggaatagtactgatagctgccatttactgagtgcttagtacatgccaggcattctactcaacactgtatacagtatctcatttaattcttacatcagtcctgtaaggtgggtattattgtatatagatgatgaaactggttaagtaacttatccaaggtcacaaacatgactagttaggggcaaaactgagatttgaatcttggtgtacatcaaaccctgttggtgtttcttttttctttttttcctgtgccctgagcagctgcctcttttatcacccgggagcctcagggctcttttagcctcccctgggttatccatatacagcttatttataataaaaatggtacagaggagaggctgattgccattggccccagcctcatctctgggatggctccaacagctgttgkttcataactctttgcctactttacacgctgaatatgctagggcttgggctgggagtgggaaggggatggagtactgcttggacttcttgtcatgtcaaactagtgccatatgccattcagtcattaatccatttacttattcatccaacaaatatttactgggtacctgctctgtgccaagcacttgtgctgggtgctagggataaagatgacaacaagctgtccttgccctcaaagggcttactatctggtaagtgctgattatgtataatctgtcatcttattatgtaggtgcatctggttttgagcttcagcaaaggggaaaggggaaggtgaagctgttggaatgcccacactttgcagtctccagccacagagctactgagcactgctgtccaggcctagctgagctggctgttccctcctctgctgcctgcagcctcttcttcacagcttctctctgctctggagagagtaataatcttaatgtttgtacctccctttatagagtgctttcctacatattatttcagttgattctcacaactctgggaggaagagtatcccaacctttgggtgaacaaactgaatctcaaatattttataatttatccaagctggtaagtggcagagctgggatttgaacccaggtctgtcttgttctaaatgccctgctttttttcactgcatcttcctcttgtgccatgtggttaaagataggcttcctttcaatattcagtttagttctattttacaaaacttcactaagcacctaccatgtgccatactctctggtgggcccagaggacaaagagatgtattagacctgacccctgacttgaggaactccatgtttaatggaaaagtagatgactgaccactaagatccaggatttaggtttctttcttgctacccatagaaatagcaatattgccttgtggatccctggaccattttcctcatgggaaggatatctttggcttggattaaaactgcaaagcataggataagaagtcagttctcaggtcactggttcacttagcttttttgtggctagaattacagccaagaccaggtccagccaggctgggcacaggtgtaggggatgtcaagctgtggcaccttagtgacagcaggaagcatggggccttcagtgcttggggtgaagtgagggtggttctaggcccatcactagctcacatggtataatgagaataatctagcagatttgagttcattctctggctttgccacttacttgtgtgtgactttgggcaagttactcaactctaagtctccattttcttatctagaaagtcgcactaggccgggtgcagtggctcacrcctgtaatcccagcactttgggaggccaaggtgggtggatcacgaggtcaggwgatcgagactatcctggctaacatggtgaaaccccgtctctactaaaaatacaaaaaattagccaggcrtggtggcaggtgcctgtagtcccagctactcgggaggctgaggcaggagaatggcgtgaacccgggaggtggagcttgcagtgagctgagatcgcgccactgcactccagcctaagcgacagagcgagactccgtctcaaaaaaaaaaaaaaaaagaaagtgacactaataatggaactgagttcttaaggttgttgtgaggactgaatgaggtattgtatgtaaagtatcagaacagtagcagacacacagtagttgcttagtcagtgttagctcctttctcatttctttcattgcttacaagtagatagcattccagttcataggtttctttgagaaatagactgtagaaaagaygacaatgtttattctcattagtcagacgaactgcagcacaagtgtttcaaagaggaaccccaagaactcccaggcttgtaggaagcatctgattttacataagtttgcacagtaggaaactgaggtcctyggggaggaacaaagcaacttatgatcagacaaatgagtcactagtagagctgaaatgagaagccagatctcctaaccactcccacaccccatcacagtgcctcactgcgtctcttactggtgggcttgattgctttccaaggccagagaaggaagtagctgttcctgtatgctcagacaggagtataaatcacactgtgatgtcagaagcttcttttctagctggagaaataaagctatgcatcagaaaagagcaccaatcttatagagtagtatagaattaagtgcttacttgtgggacctagaccagtggttttcaacctttcatatcttttacccccctcctcttatatccactgtgttccagcagaagagaaacaaagttccatttttcctaggtcattttcttgttcacaggctttctcttattaaagttatcactgacagtatgggtggaggtcataaaaaattacagtaattttattggaggtaacttgtattgcagtgactcaaatacaagctaacaggactaattccatttttgtcatcagtggttaattaaaattttttttccttttctatatttcatttcaatagcacattagcaggtttatatataatgacagtgagtttagattaggataattcataartcccagaatcastgggtcatatgacatgacagtttgacctgggctgcacaggaaatgcatttataaatggtaggaggtggggaaaatatgtagaggataaaccctggaaggagaagcacaacagaaaatttagttgggtgtgggaatggtcacagacaggtaatccttagaggatagggtgcttagaagttggtggatatggggagagggctgaacaaattcttggtaaatgttatgtgtctctccatataccctgttgagacccaactggtatagactctgtgttctagagtgcagaggggagcaatcaccaagagctagaagtgttcctgggggagscgggtaatcctaccaggatccttcctggctttactgggagggaactgatctgctactctttgcctcaacaggctggctgtcaccaacaccaccatgacagggactgtgctgaagatgacagaccggagtcatcggcagaagctgcagctgaaggctctggatacagtgctctttgggcctcctctctgtgagtcttgtgttgagaagggctactgctgtgccatggaaaccaaagctgttgtagtggataggctaaggctaaggctctgggtctcctaggcacacctgcaagatagcacctatactatttccactggtattaaggtatgaaagagtcttacattttagtccagacacgtagcaacatgcattcattaaatactttaaggaaatatctgcattgtgccaatgctgtgctggaccctgtaggaagacctggaatgaatcatgttctgccctgaagggacaacatgagtgttctgtagaggtacacagtacttctgaggcccagatgagggctagtgaaggtatcctatagacaaggtgacatgttacctctgcctttaagggtggatagagctttattctatggaggtggcagaataggacattctaggcagagtaaacaacctgagcaagagtacaaaagctaaaatatgaaaagtatgctcagrgatagaagtaaccccctatgggctgaaagctttttacctgttacctacttctatatttcatttcaatagcatatcagcaggtttatatatawataatgacagtgggttattgtagacatgtagagtgcatgaactgattaatgaacatctttgtattattgaatgaccaaggaggactaagtgggttttcactgaagcagtagacacactcaggcctaagaaagggtggtctcttcagccagggtctagttgagagaattaggttgttcagtctctacagatctatgtggtaggaacggccagcctgtaatcctttttctaattctaagttaaccaagggggagcaaaaagtagtgagatttcttrgaaaactattttcaaccaaacaggmtcttagggcccacttcctgccctttgggaatggctggcctcgatttagggtgccagcagaagaatgctattgaaccaggaaacagtccagagaagcagctggcaggcaaggtcagaggccatataacatttccctgtctgtgaatatggcttggctaatgtgcaagttgatgtctcaatacaagtggatccatactttttgaaagtatgaaacagagcaacctgggagaagactaatgtttccacttcctttgccaccttttttttgggggagtggagggttctaggacacattttactcaccttcattggtaggttttgaataacgacacagtgaatggttctactctttatgtaaggcgtagtctctgtattgagcaatggccttccagtcattcactaacctttactgagcacattctatgtaccagcataatcggcagggtccctgctctccagtacttctatctaaatgragatagctatgtcaacaaatatagtaaagtgtcaacaaatatagtaagtgttatagctattatgtaagtctttccagagttcaactgggggcacaaactagggaggagtttcctattggagtccagggaaactttatggagaaagtaattcttgagctgagtcttaaaagatgagaagtggccttattaaactctccctatgttaacagcttacacatctctttgtatacaccaacaaggacacttatacccaactataaaagctaggctacttttgcagaggttctcctctgtcaccaccatgcaaggggaagctttcagcagcctgaaagtcttccttagccttgtaatatatattatcaagctttatctgtatcaaaatcagatttatcatgtctgaaaggatacagtagaaactgcaggttaaagcagtcaaggattttatctgaaaaaatcagctagcatgggaaccagaatgctggggacatggtactgggtccaggatatcagaaccaacaagaggggccctggtggagcaggttggactgataccaggacagggrtattcttctcttaggcttattgcatgtagcccatgtgctgcatgtgatctaacttaaggaaggccagagatcagcaggaaaactatcttcctgagataggcagaacacaggtactgaagctaagaatatacttcacactgactgggatacttataataataatagtttttaaaaatggaaaacttgtgttggcgagggtatagagaaattgaaaccctgtatattgctggtgagaaggtaaaacggttcagctactgtgtaaaatagtctggtggtttctcagaaattagacacagagttaccctagaacctagcaattccacacttaggtatatatgcaaagaattgaagacaagtactcaaacaagtacatgtacatgcattttcatagcagcacatgtcacaagagccaaaaaataaaacaacccaactgtctattaatagatgaatagataaatacattgtggtgcaatggaatattattcacctataaatggaatgaagttctgatacatgctacaatgtggatgaacctggaaaacattatgctaaatgaaagaagccagacacaaaagatcacatattatatgattctgttaatatgaaatgattagaatagataaatccacagagacagaatgtagactaatggttggcaggggttggtgggaggagggaatggggagaaaccgcttactggtaaaaaattttactgtagagtgatggaaatattttggaactagatagaggtagtggttgcataacatcatgaatgtgctatatgccactgaattgcttactttaaaatggttacttttatattatgtgaattttacctcaaattattttttaaaaagcatatacaacaaaagaaagaatagataaattggacttcaccaaaataaaaaagttttatacttcaaagaatgtaccaagaaagtgaaaagacaacccacaaagtggagaaagtattggcaaacatttttctgacaaggctctactatccagaatacataaaaaattcttgctaggtacggtggctcatgccagtaatcccagcactttgggaggctgaggtgggcagatcacctgaggacaggagtttgagaacagcctggccaacatggcaaaaccctgtctctactaaaaaaatacaaaaattagccgggtgtgrtggcacatgactgtaatcctagctactcaggaggttgaggcataagaattgctgaaacctgggaggcagaggttgcagtgagccaagatcgtgccactgcactccagcctgggtgacagggtgagaccctctctcaaaacaaacaaacaaacaaaaaatggacaaaggatttgaacatattatttgtatagtccacagttcaatggccaatatacacctgaaacaatgctcaacatcattatcagggcaatgcaaatcaaaactacaatgaggtaacactttttacccactaggatataataaaaaagacagtaacaagtgttggtgaggatgtgttgaaattagaataatagccaaaaagtggaaacaactcaagtgtctgtcagttgatgaatggaaaaaaaaatggtatatacatacaatagaatattaatcagtcactaaaaggaatgaagtactgatatatgctacaatgyggatgaaccttgaaaacatgccaagtaaaagaagccagtcacaacaggccacatattatataattttgtgagttcacttatataaaatgcccagaacacacaaatccatagagacagaaaatagattagtggtttctggggctgggggtgggggcagtgggaaataggaagtgactgctaatagatatggcatttcttttyggggtaatgataatattctaacattaattttgccagtggttgcacaaccttgtgaatatagtacaatcattgaattgcccattttaagagagagacttagaattttagggtctgtgaattatatcttaataataaatatatacatgcataccttgttttattgtgctttgccttaytgcacttggcagataattgcattttttacaagttgraggtttgtggcaatcctgtgttgatsaagctgttggtaccatatttccaaaagcatgtgctcacttttgagtctctgtgtcggaatttttaagcaataagttatttttaaattaaggcacgcacactgtatttttagacataatgctattatacacttaatagactacagtatagtgtaaacataacttttatcactgggaaactaaaaaatttttgtgactcactttattgctatattagctttattgcagtggcctcaaactgaacttgcagtgtatccgaggtatgcctgaacagctttttttgtagctcctggatttttattcagacaacttgtttgaagtttggggaagaaccctgtattggcaggtgaccttggtcccttttcaaaattgccactcactgtgtgaccttgggtagtcacttttctcaggtgtgttttatgatttgtatcaggagattcctccctacagttcctttcagctgtgacattttatgatttttgggaggaacttcttcctcaataagggttctgtgtaaaagacaggaggtctgttccttcctggtgtctgcatcctgtatttttaggacttctgtgcttggtccttgccttattaagtgagctttggcaattcagttctgcctagatttgggtttccttatctgtaaaatgggtttgttcattaaaggttcttactggttctctcattcaaggattctgatagagctgggtatactcttggaagctaaggttttagaaatcagcagctgtcctgatggcaaatattgtttttatatttttctactgatgcttgtcaaaggaaatatttgaaaatcgccggctggaatctgaggaaaatactaaggagctctttgccaggagacttctgaaaggggtagggacatgcctgctgggtgtttacmaaaagtcccttgatctgtgcccctctagactttatttcccctctgagcatggactaaaaatccctatttcagttctattctttaatacccatttaggaggcctgtactggctctgacctgtattctgaacttaggatgagttcttaaggctgagtgagcagacacttagacctcatcatcagtcatttagcacacaaacaccccagagaacctagacttgttacagctgtgagctatggccaccttactgagctataataaaaattctgttattggtctgaggcttgacatatcttcaattaaaggtttgtcatgcagtagccaagagggtctgctgagggaacaggtgccatctgtccacagcagcctcagaacttgggaagagggaagagggaagagggatcagactggctcagcagagggccacctcaaggtccattttctgacagtagatggcatgcttaatcctccccatgtgaccacagagtagcacactgccctttaggatctttttcactctacagagttggctctgggtttacaggcccatctagggctcgccaaacagtaccagtttgcagatgttaggtgtgtttggagatgttaggagatgttatccatcttctacttccattagaggaaacaagatataataaagagttccagctttgaaatcaagctgaccagctctatcactcagtagctttgtgaccttggacacatttctaaggttctctgtgccccaatttgctctaaataaatggtagctactatttttaatttttaatgtgtgcctacagtgtgcttagtcctgggctaggggctagcatgccctttgtgctttcagcaggaatattgagaaaagtgcagggaggcctacagaataattgttgcgggtcaggggcagttggagataggaaaagaaaagactatgcctcatcttccttcttcattggctcagaaaataggggaaagtccccagtgagcaggagtggttgcttttctggcaaagctcactctgatctctgtacctgcatccttaccctctctctcttttctgttatggtccaatttgcccttcaagctttctccaggatgtttttccatccttttacaggcatgctcaactctttcctcttattctcctgtaggaacccacagccctttgtactttttttttttttttgataacaatatgtctctctgccttttatcctttaaactgggaactccttgatgaaagaattttgttcatctgtcatcagcacccagcttaagatctagccagaattaagtgctgggagatgtgtgctagaagttatatggaaggaggctgggcctctccagactacagaagtgaggggatttgggagaagaatctggcccagcttggttttggggagaaatgctatctatggagtacctgaatagctgaggcatttaaagcatttgttgggctataactagaagggaggggggcccatgagtagctcttacacgttaaacagacatcccagcacagaaggctgtgtaaatgacaaaagaaattcctactacatattttggcagtgagggatgaatatctatatctgccagggtattgtgtgaagtggacagggtggagagaatagattgggagaagggattccagaaggtgataatgattggatgctcactttctcagtgctaacttgtaccctgaaaattcttattattacccctgactttgttaacatctcagtatctcatttttttacaaccacttcccttgtctcaggcctgatggtgttaatagttgacctcattttgctaaaatctaattgcagcacacagactgggaattctgccatcctctggttcccccagtcccagccagcttccctgggttagctctgttcacctagccagccacatctgttctcctgaaacctccatggttactctgccctggctatggttactgagtgcaaggtagattctgagagctgagtttgtgtaggggttgtgcgatgcagctggccatgctctttttgtctccaggagctggcatttgccctctatatgcactttgtattgtagctccctttccayctaaaacctccctgcattctccccttttctcccttttctgcctttgctaaatacctgttctggtcagaccctgtgctaagagtatggggctacagagatataaataaaccttgtgccctggccctgaggaactcacagactaccagatggtgactgacatggaagttgaaaaataggctgggcgcagtgactctctcctgtaattccactttgggaggctgaggtaggaggatctcttgaggctaggaactcaagactagcctgggcaacatagcaagacctccatctctaaaaaagaaaaaaaaagttgaaaaacacacaagacagtccctgagaaataaagagataacctatgtttacctgtccaaagaatgggttgatcgtagctcacaggagatggaatggaaggctttgtgggcaatggtagggagaagacagtaggaattgaagaatgggaatgggattataatgggaagaagcagattattagtaaggcatagattagactcttgatttgcctattctctcctctttttctacacaatgattcatagactcacttagtggtgtggggtacagcctagggctctgcgggagggacccgacaattcttacatctactgcttcagctacttcttctttctcaaactccacatctatattcttaattatctcctggcatgtccatctgagtatctccaagacacctcaaagtgctgtcatttacacctacacrttcgatctcgttagtaaccacacattctatctctgtagtaactctaatgcattttacagctgaggaagctgaggtctagataggggaagtgaattatataacaaattggggcagaggcaaacatagaaccaggcttcccaacacatagtgtgggatgcctcccttggtagcacaagaatttctctacacggacccttgtgtttaatcttaaggcctggttatttggccttggggtattcactgccctgatggcaatgccactatcagcttccaggatattgtgtgggggaaaactcaggccttggaactcttagagtcaagagttccaagagtctagcttgagctagatcagggccatattagacatctccattgtaagagatgtttgcctgtaacaaaacagaaacaatatttgctgcgtgaatatgaaagctgtagtgagaaagtgtggtgtagcagaaagacaatgtagttgggcaaatctggatttaaacccagctctagcaagttagtgtcccttacagagcctcagtttcttggtctacagaatgggaataccaataacctatcttatgtagtagttgtgaggataagagacgatgaatataaatgcctgatatgttttatattttctctatttcccttcctttcttatacggattaagggaagggagatattatcatacttgaagcttatcagtaaagaatcaatccttccaagatttattgagtgacttctgtatgctggttgatgttatgctgtgcactggcatatataggcaagtgatgatcactaggaaccttaaagagtaaatcaaccgtgttagaatcatcttcttttatcaagcttggtagctcatggatgtggcaggtagtatttccggactttatctatacatttgacaaggcagagggttggataggatggatatttgtatatttaagtggagtcaaaactagttgaaggaatccagtggtactgataggtggaacagtattaccttagagggagggagtgactgttagatcttatccttggccttggttattcagtattcttattcatgacttggatgagaatatgaagctgggcaaaataatagatctggttccaaattgaactggataaggtagaataagaaaccaaatgaaataactaggctcaatctgcatacccaccttaagtatttgaggtactggaagtgctcgttgcatggagtcttgtttgaayaaggatacctttgacttttggtaagaatataaaggggatattgaagttgagaaaccctaggaaaccaagattaaaagtcattaacaaacaggggagacaaagaataccccaggctctggtagtggctctggaggaggcaggtgtgttccaggaagtaaggcaactcactgtgctgcagaaatagctccccttggaacctgaaagacaggagagtgatggcttacgtatggctagacttgtagcctgcctggaggctaggggatggccgctagaggaccctcaattttctttcagagagcctggaataaacatatgaaggacatggccaccaccctgacctagtgacccccctcccttgggtggaaataggatgtgttaatctgtctttgatcccatctcatccccatgttctgctgctcagcctttctgtgaggagctatgatggtaactcttcttgtcaaactataggcatcagtatcatatggtttctttttctggtgtcttgaccttcccttaacttggtggctctacctgggtccttttggatttccaccagccccatgtccttactatgtccaaggatcatgccagtcctacctccttctctgctgtttaagggcaacttgctgtgcacagagggtcattagccctggcataactcccttttttccctctttctctgactcccacatccagggctcctctgagcccacagcamaacctagacagaggatgcaggagtagctgtctccttcttatagtgcccctttcaagtcttttgtgctgtggcacagagcccagatctggtataccaggaacaatgttagttccagaaatgcctctctcctgattggctaagtttttaggatgtggcttttgctttttatcttgtggtgtcatttcttgtttaacatttaaattttgctctggacaatgggcattctttgaaccccagctggtggctggggccctcgtggttcactgaattgctaccaggtgttctctgaaaatagctctgcccctcaatttctggtaggtataatgtctcatccatatgaatktattsatgctatcctgttctagagtctctggatttcacagtagcctagaaatgttctccatagattgagacttctggacctttccctgatctgtgccaaraatggcctggtagtccaggatacctagttcctacagtgacttcagtcctacagccagaactgaggcttctggtgacattgctttatatcctttataccagtcatctccatttacctactgtggaactttagaattgcttaccctgtatgacagaagccactacatcttggcatatgggctcatccagcccagagatggctggggcatattgagaaggcactagttctctcctcttcactgcatcttaagaaagtgtgatttaataagcatcctgtattgctgtaaggcctctcatttcaaaacaaagccttggctagcagagagatagacatagagcttactgtaatagtgtatggcaagtgtgtatctaagaagagaaactaattccttctcagtgggagagtgtgtctgttatggaaggcttcatagaggagggatgcagtggagtctgcaaggctaagtgtgcagtgggcaccctaactcatcatgccctcccctctctggcagtgactcgccataatcacctcaaggacttcatgctggtggtgtctatcgttattggtgtgggcggctgctggtttgcctatatccagaaccgttactccaaggagcacatgaagaagatgatgaaggacttggaggggttacaccgagctgagcagagtctgcatgaccttcaggaaaggtaaggcctgccccttcaggaaaggtgaggccctgccagttcttgggaacctcctatttccacctgggtgtgagccacttggcccctgagaccttgtcagcatggcagcccaggctgcatcatccttccaaaactgcattgcaagtttaggttgctgatattccaattgctattgggcagttattcctcctggggagaaacttgtttctatcttttttgcctcttagcttcagagggagaaatgtgtagctgccagaggtcttgagcttcccattgcttgttatggggtcattcttccttctgcctgtctctggactgcttctcctagcatataaatagatgtaatgaactgttctttactgttccccaaagaaacctcaaaaccttccttcttactgtccttagttctttcttataaggagtctaaatctcataaacactaacttgctatataactttggataaatttctttccctcccaggatttatttcctcattggtaatatgaagggattgaccttggagaatgctaaactctcctaggagaacacttccaactcagatggtctgggattctgttaaaataaaatgtgacttcaaaactatggcagaagatttaactgtgaaaagagagtgcccgtcagtcagtcagtcagtcctgacgtctaggaaccagttctgtgatggcagttatgagaaattcactggtcctgagaaaaaaaacttacacacccacaagaagcagcagtgagagcacacttaatgcagacttagttccagactcagcttataggataagaatgctaatgtctagaaagacaaagaggtggatgagtggatgtgggactctgaggaggtagcctttaaagatgggtagcgaggtcctaggtgttaaggttgagtgtatagggtggggtcagatccctggaaccttaagatgcatgtggggaagttagtaggatgcagaaggcaatagagagtcaaatcaggtttttttggttgttttgttttcgagaagaggagaggtctattcaagactgtcttttagaaaatgattctggaagcctagggactctagttgggaagtctttgcaggaattcatgtaaaaggaaatgaagtcttgtcttttcatttatttctatttattattattattattattttgactctgggtcttgctctgttgcccaggctgaagttcaatagcatgaacatggctcactgcagcctccaccccctgggctcaagagatcctcctgcttcagcctcctgtgtagctgggtgcatgccaccatgcctggctaatttttttattttttgtagagacaggggtcttgctgtgttgcccaggcttttcctgaactcctggactcaagaggtctacctcagcctcccaaagtgctgggattacaggcctgagccactgtgcccagccattgtgttatttttaaatggtaaacactatttaatttggaggggtagggacaagacttcttgtgagccaggtattgttaaatacttaaatgcattattacttttaatcactatggccctttgaagtaggtactattagagttggggaaatgaaggctcagagagggtaagtgctttgttcagggtcatatatcagtaagtagtgaactaggaattttgacactccagggtgctgcctctactgaggtagcagacttattggatttatttccatgggctgggcttctagggagcaagaggggtctgatctctaagctgattcctggctactttgctgggccccttgttcttgggccctttgccarttaggagctaactgctgctgtctgagcagtccccatacctcatttgtttgaaaaacatgtactgtttccattccaaaggcaaaagaatctaggcaggagacattccaagtttggggataaaactaagctcccagcactccctgctccctaaagcttccagagctaaatgaccactgtggcacttagaaagagacaaagacacccctccccttttccccctagagataggcttgcacacatgcacacatatatcctcctctgagtgtccagagcccacatgccacctggttcctccttgtattaacagacctgcaatgccagctttcacagagctttattacagagttcctgataatttatgtgaataaatataattctacatatacagtccagttaggatttcattgagtttcaagataattatttgaggcaggcaggaattttgattcccaaaacaggcaaaacttgctcatagtcacacaactgcttagagccaggactaattgcaatgctaattgttgttgccttggagtggggcagtgcttaattgtatacttatttgctcatttctacacccaacaatgattattgttctccatctctaacagaccttattggaactatgaaagggtgtcagtcttgattctactttaaaggagctcgctattattataaaggacagacatatcatagtattggcttttctcaagaggctgytttcataaaaggacagtatttcagtgaagaagtgaatccttaatggtgtaactttatatagttgggtcatggaagagtacagtaaaggaggatattcagcaagggaaggagatggcaggaaatggcgcctctgatttgtctttgcctatgcatatatcgccatctggtgttcattttcagggggttcaactccctttctcttcagggacaaattaggcagatcacaatttgcgggaagcttgcagcctaacatttcctcttcttacctccttgcttgttccatgatgtcttttgaagtctccgccactgatagctctggacttagaggttttttttttttttttttttttacagattgagttctgtttgtttcatctacttaattatctcagtggtcagtgttctctaggggtccttcttgttctgtagtctatcctttcttttctatacctcaagtctaagctatatatcttatctcttcttcaccatcctttctccttcctaatctggtcccctggtaacctggtggtttttacttagaaaggaagaccagacagtaaagtccgttttctcttccaaagggattagcaaactctcagtctttgttctgggtgtagcccaagtctctctttctttccctgactcctttcaggcagagctgatgactccatcttttgggaagacccaagaccttatatatctatatctatctctttctattatagaatttgtcacactgaatacagttatctgtctacttgtctttgttggagtaaatcatgagctcctcagtggcasggagagctttctgatttatcgccacgtatttagggcttagcacagggcttggcacttagtaggcacttgaaagaactcggtgaatgaatagatgaatgaatgagtgtattaacatagatarccgtgtggaggaaagaagtgaagaagcgggaaggcttgtttagctggatggaargttttgtcggtgaactgagggaatgtgtgtgacggtgcaagggtagacttacattataactcatgcccttgagatcttatccactaaggaagatacttaggaaaggaactcagggcctgggggcagcaggggactctcctgagtcctttggcataaatttaatttgttttgtgcttctgggaacagaagctcaggagtccaagaggactcctagctcaatagttcctcctcatcttccctaatccacccctctgctaccaccccagtcatttctcagccattaggttttccctggatctttttgtcaagcttgcagggtattctacattcattgaactttctagataccactacataagaggaataattgtggcatttgaagtcacacagattggaattctagcctcagttcttcctacaagttgcaagactctgtatctgcctgtcccaggctgataatgataccaatatatcattatctgctgggaggacaaatgggaaataccttgtaaactggtacttgttatgattttagtatgagatagtttcgaggagggattcagatgcctgagagcctggcttcatagccttgattactggcagcaaaatgatggtcagtgtgtgaattaggtaatgactgtggtttctatgggccttgagctagctcagagccagacacacagcagagcagggagaatatatgctgagagttggagctgtcattttcctctttratgccatgactcatggcatgttggctggcacccccttgcctggcctcctccagctccctgcattgcccccccaggctgcacaaggcccaggaggagcaccgcacagtggaggtggagaaggtccatctggaaaagaagctgcgcgatgagatcaaccttgctaagcaggaagcccagcggctgaaggagctgcgggagggtactgagaatgagcggagccgccaaaaatatgctgaggaggagttggagcaggtaggagagtccacaaattcctggacaccttgacgggtgggtaaagggcaggggcccagggtctggctagaaagttacatgtgtgaggaatttgaaatatgatccaaagactatgttctagagtcactggactcttaccaacaataagagttcaagttgtaaaaaatagtcactatgggccaggcacagtggytcatgcctgtaattctagcactttgggaggccaaggcaggtggatcacctgaggttaggagatcaagatcagcctggccaacatggtgaaagcccatctctattaaaaatacaaaaaaattagccgggtgtggcggcgggcacctgtaatcccagctacttgggaggctgaggcaggagaattgcctgaaccccggaggtggaggttgcagtgagtggagattgtgccattgcactccagcctgggtgamaagagtgaatctctgtctcaaaaaaaacaaaaaaagaaagaaagaaaaaaagaaaattataaaaatagtcactatgattttcaaagaacagtggataataggtgataacagttattttgttccttttttgaggtatttacataaagtgtacaagtcataagtatacagctggcaagcttttgcatatgcatgtacctgtgttactaccacccagatcaagatacagaaccttctcagcaccccaggaaactcacttttgctaccccaattaatatttcatccaaaagttaactactgtcacaacttgtaaaccagattagttttgtctaattttgaacttcatataaatggcattatacagtatatactcttttgtgttttgtttctttcactcaacattatgtctatgagagtcatcaaagttgcatgtagtgatagttggtttatttccattgctgagtaataatctattgtatgagtatactttaatttatccactcttctgttgataaacatttgggttgtctgcagttttgttgacttttatgaataatattgctatgaaccttcttgcatatgtctcttggtgggcataagccctcatttctgttggacatataatattcatgtatttagctttattagaaactgtcaaacaattttccaaaatgattgtaccaatctatactgccacaacaatgtaagagaattctagttgatccatgacctcagtatttttaggcattttaattttaaacattctggtaaatatatagtagtatcttgtgattttaattttcatttccctaatattattaaacacctttttataaatttattggccatttgatttgggaatctcttctcattttaaaaattggattgtctgtctttttcttattgatttgtaagcattatttatatattttggatattagtcttttgtcaatataaatacacatatatatagaaaatattttctctcagtcttgacttttttttgctttattgtcttttgataaacagaagcccttgattttaatgaagtgtaatttaatcagttttttaaaatgattgatgcagtcaggcgccgtggctcatgactgtaatcgcagcagtttgggtggctgaggtgggcagattacttgaggtcagaagttcgagaccagcctggtcaacatggcaaaagcccgtctgtactaaaaatacaaaaattaactgggtgtggtggcacatatctgtagtcccagctccttgggaggctgaggcaggaggattgcttgagcttgggaggtggaggttgcagtgagccaagatagtgccactgcactccagcctgggtgacagagtgagactccatctcaaaraaaaaaaaaaaaaaaaaaaaaaaaaaaattgatgctttttgctttttgtttcttgttcaagaaatccttccctatccccaagatatttccctaaattttcttctgaacctttattgtttgtcttttcacatttagggatattatttcaaattaacttttgtatgtgatatgaggtaggctgtcaaggatctttgttttttttcccccaagtaaggtgatcattcaggaatctcttttttttttttttatttttcaggtcaaaaagttttctaatttttattgtggttccttttttgggacatggttatctagtatattgcttgattttcaaacatgtgaggactttttaagttatttttcttttgctgatttctagtttaatttcactaagatcagagaacatatgctgtgtgggtgtagtcctttgaaacttgttgagacttggtttgtataaaaaaacaactaagcaattcagttaaaaggcaaagattgtcagattggattaatgccaaaactcaattatatgctgttcrtaagagacacattttaaatataagaacacaaaaaaaggttaaaggaaaaggatatgagaaaagatatatgttacaaaataaagcagcaaaattaagcaggagtagctatatattgatataatatttatattaatataaaataggatttaggtcatgaagtattgacctaaagcagttgctaagtgaaataaagcaagggtagctatatattaatataaatgtaatatttacattaatataaagtaaactttaggtcaagaagtattactggactccaaaaatagatatttcataattataagtggatgaattcaatttaatatataacagcccttaatttggatacatctaatgatgtagtctaaaatatrtaaagcaaatattgactgaactaaaatgatactagacaaattttataatcaaagttagagattttaatatgcttctctcaataagccaccaacagcatccataaggatataaaaaatttaaaaacatggttaataaatttgaattccttgacacatatagaacactttgcctaactctagaatatacattctttttagcacttatatatctcttaaaatatacttctgctccattctctcctctccttctgagaatctaatatttatgttagatcttttaactgtattccacatgtctcttatgctcagttctgttcttttttctctctgtgctttggtttggttattttctattgatctatcttttaagttctttaattctgcattctrctgtaagcattctggtgtttaacccatccagtgggttyctactctcagacaatgtatttttcaattctagaatatccactttactcttttataggttctagttccctgtccagaatttctatcttttatctattgtatccatcttttcctgtatttctcttaacatagcaatcataattattttgaagtccttgtcttataattcttacatctggatcatttatgggactgcttatttttcctcttgattattagtcatattttttgccatttatgtctaataatttatttttattacatgctggacagtgtgtataaaaaaacaatagaggctccagatgattttctcttccatcaggtagttttccccctttcttttgtgaagtatattaaggaactgatcacctcaagccaatcagagatcaagctgcatttgaactaggttgtagttttagtaaaacttggtgtagctttcatttgtcccagtttctcaggtatgtccctccctgacttttaaatggaaagctgttaaatttctttctcttcagccctgaaagactgtgagagatgcagttctgccacttcgtaggctgttttctttgtgccccagtggagatcttctacatgggtccagcccaattttcggctgtcacctaaaatcatcaatgtctcccaggaagaaaatgactggcaattgacaaatcatcttagaaaggctttttttctctctgacttttggtttatctagtctagtggttttcacactttttgttcttaggactctactttttttttttttttaagatggagtctcgctcttgtcgcccaggctggagtgcaatggcacaatctcggctcactgcaacctccgcctcccaggttcaagcaattctcctcctgcctcagcctcccgaaaagctgggattacaggtgcctgccaccacacctggctaatttttgtatttttagtagagaaggggtttcaccatgttggtcaggctggtctcgaactcctgacctcaggtgagccacccacctcagcctcccaaagtgctgggattacaggcgtgagccaccacacttagcgaggaccctttactcttaaaaactatttaggacctcaaagaacattttgatagggggtaatactgttgatatttaacctattagaaattaaaactgacgacattaaaaaatatttattaattcatttaaaataactatatagccaggtgcagtggctcacgcctgtaatcccagcactttgggaggccaaagcgggcggatcatgaagtcaggagatcgagatcatcctggctaacacggtgacaccctgtctctactaaaaatacaaaaaattagccgggcgtggtggcgggtgtctgtaatcccagctacttgggaggctgaggcaggagaatggcttgaacctgggaggcggagcttgcagtgagctgagagatcgcgccactgcactccagcctgggtgacagagcaagactccggctgggcacggtggctcatgtctgtaagtaatcccagcactttgggaggccgaggtgtgcagatcacctgaggtcaggagttcgagaccaggctggccaacgtagtgaaaccccgtctctactaaaaatacaagaattagccaggtgtggtggcaggcacctgtaatcacagctattcgggaggctcaggcaggagaatcgcttgaacctgggaggsagaagttgcagtgagccgagatcacatcactgcactccagcctgggtgacagagcaagactccatctcaaaaaaaaaataaaataaaaataactatatcaaaccccttagatgttaacacaacatattttctaaatttttcaaaataaaaacaattttgaaaacacaattttcataaaatgcatacagctttctccagatgttgtgttggatcagaattgtttttctcccatgacctaccatatcctactgggaagtggaagtcaggtgataacactttatttaaaacatatagataagtgtttattaactttggctgcatattagaatgacttggagagcctattttaatgcccaggcaaacccccccagataaatgaaatcactgtctctaggttgggacccaggtatctgtgtttttttaagttcctggccaggcatggtagctcacgcctataatccttacactttgggaggcaaagggcaggcagatcgcttgagcccaggagtttgaaaccagcctgggcaacatggcaaaaccctgtctctaccaagaaataaataaataaataaataaataaatacaaaaattagctgggcatggtggtgcacacctgtggtcccaaagctactcgggaggctgaggagggaggatcacttgagcccgggaggcagaggttgcagtgagctgagactgcaccactgcactccagcctgggcgacacaatgagaccctgtctcaaaataaaacaaagtaaaaaagttccccatgtgtttacagtatgtgacaaggttgagaaccacagccataaaataaaaggacaagaactctgacttgcccatctcttgtcttcccatcagacatttattactgtgcatggcatgatatgtctctttctgtctgtctgtcttccatcttccctattccttattttgtagttatttctctctttaaccaaacagtttttttttttttttttgagacagtgtctcactctattgcccaggctggagtgtggtagcacgatcttggctcactgcagtcttgacctcctggactcaagcgatcctcccacctcagcctcctgagtagctgggaccacaggtgcacaccatcccaccaggctagttttacaattttttgtaagatgaggtctcgctgtgttgctcaggctgctctcgaactcctgggctcaagtgatcctcctgctttggccttccaaactactgggattacaggcgtgagccactgtgcctagctcccaacagtttttgagccttgtaggcctgcccctttgtatgcctccctgactatcatgcttctatttgctctctttttttctcttcttcatccattcttcccttcttagcttatcccattccttaaactgcttttaatatagaacttgatcataaattttcagacttggtatattagtctctaaggtatctagtcttcatttagagctataaaaccaggaatgggctatttttaggttttttttttcagggaacagaaaccaagtgaagattggcactctcattgcctcttaaaggaataaaggtgttctgtccctagctgaggccctcctggcctatcttagctgtggagaggacctcaggcttgctatgggatgtttacctcattggctgaagctggggataataagactgctttcartgcatcttctctgggattctgttcaggtaggagaattggagatcacttatgctggtagcttggatgagacagcaagaaactcagtgtacataatgtctgtaygtactttcaagtcttttacactttagtgctttgtgactgcctcattgtgtgctccctgcagagaagtcggttatttctacttatacattggtcctctcatgtcttggcttctgttggcaatgcctgtgttaggtgtgggcatgctcattatcttcccaccttttacagagttcttttcaaagcccacttgctctactccctgagagaatcatagacgcagtctctgggctagagaagactttggagagcattcaggacaatgcccttctgaagtaccaatcatttttcagktctctctgacatgagctcttcacataactcccatgacagggaactcattctctcctgagatcaccccttcactgatagtttggatttgcatgggagaaagtccttcctcacactgaattaagagccggtttaggaagcacagggtcacacaaccagttaagcgacagaccagggaccagaactagattttcagattcctgaccagtgctttttctgtcacactgtgatgtcttgaagtctaagcacagaccctgactcttggtaagatgattcactagctgacctgttcctgaagagatcagggaagactgctggaacttgctgcatgaccaggaaagtaagctgatgtgatagaaaagaatgcctttgtctgggaacagaaacatctcaatttgggttctggttgacactgttgaccttgagtaggttaattttcttcgctgagcttgctttcttctatataaaatacggaaaataatccttaccttttctccttcctgggagagttgtaaagcagataagaagtctgagttctgaagcatcwtacagagatgttggagagtcttagtagcagtaaatgaactcacatccttttggctgcctaggttcgggaggccttgaggaaagcagagaaggagctagaatctcacagctcatggtatgctccagaggcccttcagaagtggctgcagctgacacatgaggtggaggtgcartattacaacatcaagaagcaaaatgctgagaagcagctgctggtggccaaggagggggtgagaacagcccttctattgtcctcttttctcctttttgcccttctcctttttacctgcatatcttcctcttctctccctctccctgttcctcccattgggtgaagagatatcctggtggtgggttctgtttctttcctaatgttcagctcctgacagtgtcctcaggcttctggaggagggaatgagggtgtaggggcattcctgcctgtcttctgggaaagatgaaacaagtggaggcaggcagagggaaagctctgccagccccaggctgccatggggacagaggtcctcctggggcaaaagggctatcaaggacccctttgcttctcccctcgctttctctattttgtccccctcctttttcttctaccttgcctgcctttctctttttcctctttctcttccctttccttgtacagcctmagttgtgctaggaggagtgggccccagccataggggaaggcctttctcatttmttccattctcgaatccctgctcttttygagctgggggcctcayctttgcaggctgagaagataaaaaagaagagaaacacactctttggcaccttccacgtggcccacagctcttccctggatgatgtagatcataaaattctaacagctaagtaagtaacaccagttatctactctggcaatgtccatatcatcctcagaatttgagggcatacagggcctccaacaccaattccatttcctcattggtggagggacmgctctggtctcctgcctcagcctttatttatctccygccttgctcttaagtttgagtttattgtgtgttttattcacacatattctcaaaacttgttcctctgagaagagrcttcattcctattggggctcacaccaagtccatgcctgcagttctctttcctctgtcttcaggcaagcactgagcgaggtgacagcagcattgcgggagcgcctgcaccgctggcaacagatcgagatcctctgtggcttccagattgtcaacaaccctggcatccactcactggtggctgccctcaacatagaccccagctggatgggcagtacacgccccaaccctgctcacttcatcatgactgacgacgtggatgacatggatgaggagattgtgtctcccttgtccatgcagtgtaggtgacctctttgsggggatgaaggaaggagcctttgatgtacaggttgagaagtctgtggcctctgttgtgcttaaacagcagatggggcagatacccaggaagatagttcaactcatgaccttggtcaataaagcacaatttactcaggttatttctttatagttgtccttttggtgttctttccttgttgtatgctctgtgtgcccctttgggtctattgtgctaagtgtgtctcccttcattctttttcactttattgtccctaactaccactctatctacctttataaaaaatatgtcctttagtgaatttcaatgtaaaaatggcatttattctatttattgaacttatttattttgatttttgttccttattcttattgctaaagtagatgaatggaatgatgtttctttttgtgtttttgtgagaggccctataaagaaatagtcccttaaagtgatatagtcctaaatcctctaagctggaaaggcattcttgcccaggagggatctcctgcacaagcatgtctggctttccacctggactcttggatcctacccgctcttcctctgtcctggatcttccctctcccttttctcccctgcaagtgatgagagttgagtagagcagagccaaaaggaacaacactggaattcttcagtgaatgaagggagttttcccttactggcccacaattgaatttttctttggatcagawgctattttaagtaagtagaatagcccttatggtaaagctattgtcctaggcccatattctgccagttcagcgggagggcagaaggccggggctggrttaggggcttactttcagattctttaatcaggctggattcccactcgagacagaatttatttgtaattttatcaataatactttgcccctggccaagcctctttgttcttctaatctgataactcgttaggcctttaatcaaaggcttaacaaggacaggatcactgacaggcagagcttgatcctgacttgctgatctgaaggcttctgtgttctccaggctgggagggaccttaattagctctgagctacccaatccctgcccccagcccttcctttattacattgatggcaggccgaagccctccataaatcagattctcttctccttttggcctggctgttgaccctagatgctgcctggctgatggggcgtaggttcagtgaccgctctctctgctctacatccgccggctcggatgatcagtccctctggaaataccccggtttgaggagcccctttggggcattttgtttttctgactttcgggactaaatcaacactcttaccccatgggtcccttctcctgcctgcttcacgcccctgcctgctccctctatcccctcagcactgtccctactaactacagggaggggttcgggggtgagaagaatcagcttgcttggcaagagctggacagagaacacccatggtaatggaaggcttaggcttctccctttagcgcagctgtgcaggtaacytggtagcccttcttccatctgggctgggagggaaagagggaaggacaaatgacccctttcttttctctttttcatgtttctcccttttcttcccagtttcccccttctttctcccccttccccyccctattccagacttcctcatcctcttcagcctctctttcgtaccttgaaagctaccagcatagaagccctacctcctgaactctccatcactatggaattatgctgtctccctggtggtccttccaaggcttcgctcacccttgtaacctggccctttctctcatctttaggtagaatgcagggaagcttatctatcaggctagaggagaaagaataaaggtctgcactctcttttagctgggagtgagcccaaagggggatgcactagcatattcctaagttacttggtgcccatgtatcccttcactgggcatagtggccattatctccaggaccccgatttgcagcctgatccaagagctggttctttgttgtttatgtgcttattggaaagcgaaaaagagtgaacattagcataaaaagcatccatagtcccaccatatttgagcaccttctctatcactcttttctgtgaaattttttatgtggttaagataatgatagccactgccacttattgagtgccatgacctgtttcaggtgccttaaagacattattgtgaagtctcagaagaaccctgcaggattttagaaattaggaattaaaatggggaagtcagctgctcaaggtcacagctagaagtgaaagtcctggtttcaacctctagtgtttggtattccaaagctcaaggctagtacctataattctgtatcctttttcccctctgaacattttaataggcatttttccattttcttcaagtctttttataagcatcatttttaatagctctatagtctcccagaaactggatatgttatcattttcccattgttcattatttatgtttactttcatacaactattaataaaaagtaaacaattatgtttacttctcatttaattattaataatgatgaacatgtttatgtataagtccttgtctatgctgtgaattatttcctgaggttggctttctgaaaaggctggttcttagtgctctcccggaccttatcccaagcccctatcctacccttccttgcttgtgtctacccactaactgccttgccacttccctttatagtgatattgcccataggtctccttctattggaattgccactaaaactgacctgggcacttcatcttcaatttcccatccttttaggacccctggtgggaggtttctgggaggaggtgccccaytctccagattggcattagaggcccagggtggtctccagcaagcatttattcatgggcacctccttacctgccagcccaaagtgggctggcccctcctgacactttctttattctccttgcagcccctagcctgcagagcagtgttcggcagcgcctgacggagccacagcatggcctgggatctcagaggttggtagagggcgaggctggccacttcttgacaagccgggtatctctgcggcgaatgcgcagcctttcatctggacagtctttcagttctgaaggctacgggaccagctctccatctgcctctgctgctgcttcttgctcctcttccatcaccaccatcaccactaccaccaccaccaccaccaccttcaccaccgtccatgtccaccctgtttattaccaccacagcacttcctatttcctccagatggagccctaccctgacacacccccttctgacagcaccgctgtgatgcctgggcattcagagagcttggggtatcagctgtctctcttttctttcttcccttccttccctttctgctgcttttaccttggtttctgcctgccagctgctgcttgatcaactctgggggtgtgtgcagtggggaatcttcttatcctgtttgttcccagctctgggattcctttttaaggtcagcctactttctccccttctgtgtttggggtttgctgactctaaaaatgagtaacgactttcttccctcatgaccctatagcacttttgcctaaactatgcactttcacattagttatctcacttgggccctcacttcctttactccttcaacaaacatttactaatgcctactctgtgccaggctctgctgggcataggggttcactggtgataagatacaatcccagccatcaagaactacaatcttgtctgagagagatacatamataattatggaaaaatttattaagtgctatgggggtgttgaggaaggagtgactaacagtgtgtacctgggtggaatgcttcaccaaagagatgaatttgtgctaacatcctgtgtgaagggaaaggagaaagagtattctaggcagaggaaacactgtatgcagagacatggagattccagagaatacaatatatttgtggttagaacactggatatgtgttggtgggaaggagaaacaggtgaggctagaatgacgaaggctccgaaagggaagggttttggcctctacccgttaggagatggagaactacaaaagggtttctaagagaaagtgaatcagtcacatttgcattttagaaataacattttagtggctgtgtgaaggaaggaagtggaagactacaggaatttggaaaacattccagtagaccactaggggaggtaatgaggacttgggataaaaagacatgataaatttggtaactggctacagtggtgaaggaaagggaggatctagtatgacactcaggtttatagcttgagtgactgagtggacataacgtccttcatggaattcgggaaccaagatagcggacataggttttggggttttggacaagaagagtttataggtggggcaggaattaaaatacacattttaagaacagtaagttaaggttctaaaagggtaagtaattccctccaggtctcatagctagttgagagcagagcacagattagaacttggctttccattccagaatactccgttggatatttttgtcttttcacaaggtctcaaaaagtgtactggaaaataattggtgaaaggtttttcttccacagctttgtctggcagctgcagagactattcttgctaatacccaagatggtagactagaatcagagatagtagccttgaccttgcctggaacaagcttaggagaccttcagaaagtccttcccctctggaagtacttctcatctctgaaatggtgaccacagcccagtcctggcctctgggctgcagtctgcttactctgttgcttttttttagttctatctcactctggatacccatttattcagctctgccccttaaacctctggatagttatgcttgagggctgttcctttctcttgcacaaagggattgcccttactaggattattactcagcagagccactcatatccattctcattctcattttcatccaaaagcctaggaagggagactgctccttccagtacagatggagaggatcaaattgggttggggacactaagggatgctgtgaattccatgctccaaggtttaagctgagggcagtggggaggaagggcggagaggtacctgtatccacctggcctgttcactacttaattttcttttgcaccacgcaccagaggatcatctctaaaggcaaacaggctctctagtaaggtcagtagcttgggatgggagtccgaggcagcccagcctttggggagggacctctggcctgattgttctcagtgattcagggagggaaggtgagcctgcctcactgggccttttccctcctatatctccctaggcttcctcccaggttcttatcttgctttggcagtcccaacttttagytgatgagagaggcatagaaggacaggaatcaggctgggtgcagtggctcacrcctgtaatcctagcactttgggaggccgagagcggaggactgcttaagcccaggagtttgagaccagcctgggaaacaaagtgagaccctgtctctacaaaaaaaaaatcaaaaatttagttgggcatggtggcacatgcctgtggtcccagctacataggaggatcacttgagcctgggaggtcarggctgcagtgagccgagatcgcgccattgcactccagcctgggcaacagagcaagaccctgtcaataaataaataaataaaaagatggataggaatcaagatgaaataggggtctggtccaggagaagtgaggctgggagggccctaacctcctgatttctcctccttggtgttagagagggtaggatcccagaatcttcacttcctcagcttagaggaccctttttctcagtgtgattgcttcccagaacttccttggcaccttgctcattggtttataatagtgtttggagaaggcaagatatggagaggatcatcttggggcttagagaaacaaggacaagtttagaagcaaggacagtgtcagatatatgaaaccaaatatgagactgaatatttgtaaatactagaatatgtggctaaaacagtatttgtagaatggaagctgagttggaattgttctctgctgcctgctgagtccaggaaggtactggcccatggggtggctacttagttatttgcttccaactgagaattaaatctacaatagctatgagccaaccccctgcttttgcctgtttcaggggcctggtacccttcctaacttctgaccctcagcctctttctttctaggtcctatggtggtctccttttccattcatgactcttcccctttggctagcagacgtttaaacatttcccttaggtctctcctctgcttttgctgaggttctcaggcctctaggaaggcagaaggaggattcaggattggcagagagagcacctccatatctacctttttgtctgtagagcaggaggagtggcatctggaattgattcatggtcttagcaaccaccagctccttaaagggtctcaagttcctagactagcctgtgtgtgtgcatgtccagtgtgcggtggcatgtctccataactcagccttgcaaagaagcctcttgcgaccggcccgtacataggcctttcagcttggcaggcctcatcatcttcattcccacaataatttctacatttccaagtgctttgccagcatatttgatcctccaaacagtcttgtaagataaattgaattggtattatcttcattaggccaaagttaaggactagcaagtttagatgacttgacttgtccaagatcacacaggagtccagacctcttctgaaccactgctctttaaaggccaacatsctgtctttctatgcctccctacattctccgtcagcagagttctgaaagagaccccacccttcctgccgcaccacagactttggtttgaactctgcaatacctatctatgacctcctttgaatcctatgagatggttagaagaggcagcatcctggccttttggggtgggtgaaggattatttgcaaggctgttctaaccttctcatctccagcctgggtcaggtccactgactgcatgtgccctgttccttggggcctggcccagactggataatatcctaaggtgtgacaggagtaagtggggraggaaggcatggaaaatggtgactcggagcaggctgtaggttctgtgttagcttgagtcccaggaaatacagccagctatgagaaggcagagattttattgaggatgccgcctgtggaatttaagcctatggctgcaccagttcagagccagagcattcaccactggtggggcccaggtattggaaaaccatttgccagacagatgatggtatgatgacrtttgtttttgtttcttatctgtttcttccctccctatcacttttccctttcttgtctttctctcttggcccttctttctacctgcttatccttttgcttttcttcctctacaattctactctccttttcctgtctcttttccaatctatcctcattccctcctcctgcctcctctcttatcctatacttatggctgctcaacttctgtctattcctctttcctctctccttcccacctgcctgttcatcctatttctctctcctgccgctctatccccattttcctaccytgtccttgtcttctcgtgttgtccctctctcctcttcgcctttcccctatcacctcatccaatatatgtccctttcttcctctctgccccatgtcttgcagggatttgacccattccgattcggagtcctccctccacatgagtgaccgccagcgtgtggcccccaaacctyctcagatgagccgtgctgcagacgaggctctcaatgccatgacttccaatggcagccaccggctgatcgagggggtccacccagggtctctggtggagaaactgcctgacagccctgccctggccaagaaggcattactggcgctgaaccatgggctggacaaggcccacagcctgatggagctgagcccstcagccccacctggtggctctccacatttggattmttcccgttctcacagccccagctccccagacccagacacaccatctccagttggggacagccgagccctgcaagccagccgaaacacacgcattccccacctggctggcaagaaggctgtggctgaggaggataatggctctattggcgaggaaacagactccagcccaggccggaagaagtttcccctcaaaatctttaagaagcctcttaagaagtaggcaggatggggtggcagtaaagggacagcttgtccttccctgggtgttctgtctctccttccctcccttccttcaagataactggccccaagagtggggcatgggaagggctggtccaggggtctgggcactgtasatacctgccccctcatccttgggtccttcattattrtttattaactgaccaccatggcctgcctgccctgcctccgtcccaaccatgggctgctgctgtcactccctctccacttcagtgcatgtcttagttgctgttccctcagctcccagctccacctctggggttcagcttctgtctctgctgtcccagttttgaggtttggtttcttgtttctgtctcttgctttcrggctcctccctcccaccactccccaacttcccctagcagttgcagggaagataggacgagtagcttctgacatgkgtgcctcagatctgttccaccccactcacagtggttctgtttgctccagactggggctagggcctaatctttgaagtttgttctttggtattgatgtgggtcagaaggagcctcatcctaatctcactcaggcctccagggatccatgggggagtgaaaccaattctcagagaacaacccaccagagacttttaaagagaggccaggcttgggaatgggttgggagaggcatctgttcattggagcatgagtggatgccagaactgtaggttataaggcagtcactttttctctctactcccacccacacctgcctccctcttacccctgctcccccacactgcaggaggatttgtctctaagaggtgctgccccaaagctccccaagcatcaatactcctagggctcaggacaagtggctcccctggccaggagagccacagccatgatacagggctcttatggagccctggagttgttgggcaaggatgctgtcattttttgaaccaaaagacaaacaggttaaaaggaaaaaaagtaatctgaatttcccaagtgcctacgctgcatattccccttgttagatcccattttcatgttactttgtagccttggcyagaggctcaaaaaggacacaaccagtttggggaaggggtggctaaggaagatggtataggtgaaggcggctgtgtgaccactttcccccacccttcccacyctctagacaactctctcccttacctgtttttgctatggctgtaaaggtatttttcctctgccccactccctgccatacctttatcctgggatcctattttgggcctggggtgggtatacctggggctggtcttaggagggtgctaggctgcagactgccttgtactccctggacaccctcaaatggggttttctgtgttatttcataaaattctttgaagtccaataaagcatgtaggagattttaaccactgctggctttgactctcattgtgttctctgtgctgtggcatgatgggataaagagacaatctttcctttgcccagggaaaatgaaacttgaatgcacatacccagaagctctgtgggcagggttaccagataaatgcaggatgaccagttaaatgtgaatttcagataaacagtttttaaagtataattttctctcatgcagtatctgggacacatttttatttgctaaattgggaaaccctatgtctgggtaaacttgaccctatctatcctataacttcacttacgacttttaaaaaacatatctatttaatttttctttctttttttttgttttttttgagacggcgtctcactctcttgcctaggctagggtgcaatggcgcgatcttggctcactgcaacctctgcctccagcgttcaagcgattcttctgcctcagcctcctgagtagctgggattacaggcgcgtgctaccatgcctggctactttttgtatttttagcagcgggggggtttcaccacgttggttaggctggtctcgaactcctgacctcgtgatctgcccgccttggcctcccatagtgctgggattacaggagtgaagcaccgcgctggcctaatttttctattttttgtagaaatggggtctcactatgttgcccaggcttatctcaacacctggcctcacatgatgctcccgccttagcctcccaaaatgctgcaattacaggctcacttacgactttccatgatttttgaaattacttcacagggagcctgggcagcttctggagggcagtgagaaaccaacgaaaaggcttcagggaaaagatgccacagatgaaatttcataaagatcgctttgggtagcccaaatcagaagcttctacaccagccttacatattacggttctcatctattcttattctccactctaagtcaccaagtccatcctacctccacaaggcaaataccctgtctctgccaccatccactgaagaaccctaaaagcaaatgggtactgaccctgccctgcttaaaattctctcagggctctgatttgcgtcaggataaaatccaaacgccatcggccttgcgcggttttcttccagttccagagtgtcagtcctctggccgatctaaaagccctggggctccaagctgcccacggctgtggagcctgggctggagcccacagcggacggcagtgttaggattattataataaatgtcagagcaagaaaaacgttcccgccggttaggttttgttatttcaaaaataaattaaccgcctttcctccggcggagacgcgcaggtgagagggcggcgcctgacccagcgggctctaggtgctacgccagggccccgagggtcccgaactcggcttgcccacacaaaacatggtagcaggagagcagcatttccgccgggcatgtccatatccaatggggcccatgggagaggcgtagtcttctgggtcttgcccagactcaacatggcggctacacgtcgcctgtcagtctgtgaagcctaccccgggcgtgggccgcagcgtcgagtaacgtcattcgaaccccgtcgcgcccctttgtgcgtcacgggtggcgggcgcgggaaggggatttggattgttgcgcctctgctctgaagaaagtgctgtctggctccaactccagttctttcccctgagcagcgcctggaacctaacccttcccactctgtcaccttctcgatcccgccggcgctttagagccgcagtccagtcttggatccttcagagcctcagccactagctgcgatgcatgtgatcaagcgaggtgagggggggacgaggtgggcgagaaggaaggtgaggggatgcgggctgccgccgccggagctgatgcccagcccgcccgcccgccttcgctgcttcccgcctttcccgcatttcccgccgcggccttccgccctgtcagcccgctcggccttctgtcttcagtcagcctgccccgaacctccttcgggccttcaggctgcgccccctcggctttgtcatcctgccgcctttcaaaaggataacacttaccccgtatcgagtagtgactgcgtacgccgagcacttgccaggcactattttattcctccctgcaagcctctgagagatgattagcttattacagatgaggaaactgacgctcagagcgaggtgtcgccgactgacccaaagtcacccataggtgacaatacagtttgatttgaaaaccgtggggttggtgagctgtcttaggcacagggtcggggggcagctaggaaagaaggagggggcctctctaccctccgtaggcacttgtcagtttactgatctcttttgtggggtgaggataggagtgtggcgtggaaaaaacagatcccagacagacagcaccctcgagttcctttcccttcatgggaagagatgctgaatcagagaagggtggctgagacatcttctgacaagatggggactgggaagagtcaggaactcgtattctttctcaacagttctttttcattagacttgccaagtgcccgctttgtgcccagccctttgcttggctttgtgagattgtaggaggagacagtccctgccttgggaacaggcttcatcgggttggaaaaacaagagcaacatacttttaacaaccgcatgagatacgtatgaacaagttttgagttgaacctacttgcctttgttaaagcaatacaatgatttcaaaattgtaggcacttagtaaatactggttaatcgactggttgtttctattttgtcctctaggctgtgaacatttcaaagatggagacttgtttgagacagagtcttgctctgtcacccaggatggaatgcagtggtgtaatcatagcttactgtaaccttgaagtcctgggctcaagcgatgctcttgcctcagcctctcaagtagctgggactataggcatgcaccaccatgagtggctaatttttaaaaatttctggtagtaaaggagtcttgctgtgtttcccagtctggccttgaattcctggcctcaaaccatcctcccttccttggcttcccaaagtgctgggaatacaagcaagatggagacttttctgttcacgtttagcacaggacctgacatgaacagattcttaaagaatgaatgaaaatagttgtatcaaaatgtaggacacgatgaatgctgtgaataagcaggtagttgatttggtttaactacagccaatgtccagattggtttaactacagacaagagttggaaaggtggacagtagtggcctttcttgtttttggtatcttgagaacatcattctgtgaattttcctagctcacattttagctgaccaaagagcaaaataacatagtgcacttttattgatccattcataagagtgagagctgagcatctatttttgtatttttatttttttacattattatttatttgtatttttttagagaaggagtctcgctatgttgcccaggcttgtcttgaactcctgggctcaagcattcttcccacttcagcctcccaaagtgcttggattacagtgctgggagccaccgcacctggcttgagcatctattttttaaatctttagatatgggagagatgtttaggatggtctatgataagtcagtaacaaagatgaattgaaaatgtatggacttagatgaccagaatgggtaaaattcaaccctgtgttgaattttgaacttttagagtctacttctaaatactttcgtttaaaaagtgctaccttggcctggcgtggcagggcatggtggctcacgcctgtaatcccagcactttgggaggctgaggtgggtggatcatttgaggtgtggagtttgagaccagctgggccaacatggtggaaccccgtctctactaaaaacacaaaagttagccggacggtagtggtttgcacctgtaatcccagctactcaggaggctgaggcaggagaatcgcttgagcctgggaggcagaggttgctgaaatcgtgccattgcactccagtctaggcgacagagtgacactctgtctcaaaaaaaaaaaaaaaaaaaaaaaccacaaagtgctagctataactagctctaaaaagcagagcttattttctcattccttcatagagcacaatttgatccagatggttcatgctgtagattctgccattgtagcattcagcaagacttaatatacaacatgtacttagatttgtttgtttctttttttttttatatttctatgtttctatattttaatgttttttaatatgcatagggtttttggttttctggactttttttgtacccccttatttttggcatgtcagtggaatagcagactaactcctacagtttttgttaattttctttgagatggggtcttgctctgtcatccaggctggagtgcagtggtgtgatctcagctcactgcagtgtctgcctcctgggttcaagagattctcctgcctcagcctcctcagtagctgggactacagatgtgtgccaccacgcctggctagtttttgttatttttaataacaagggcaactggaagttgactttgaagtacctactgaatatgctaatgtcttgctaaacactgtgagggcagtaatggagaaggcagctctatcttcaaagaacttaaaattgttagggatttaggaacaatccatatgaaaattattagatagaagagaatagtagatgagtttttttcatctgctatcttgagctatttttcctaatgggagagtatcattcctcaaggagattatggttaaaaaaataaacattgagaaccattgcagtaaatgacaaagtagctaactgagttgtaaactgttttggaatttagtgtagtattttcaaaactttggattgtaactcacagtaaaaaacaaaacattttacagacatgtgtatatatgtggatacacataaaatgatacaaaagtttacgaaataatgtctttgaaagcatccatttgcactctaatctttcttttattccagattctttccctatccctgcctccctccctcccttccttcctccctttcttcctccctcccttccttccctccctccttgcttccttccttcctttctccctcccttctttcctgccctcctccctccctcccctccctctccccctccctccgtcccttcctccttccttccttccttccttcctattccattcacagcctgctatattattttacaactctgtggataccgtgctgttcaccgggattgcagtgatgagtaggcagacatggttccagcttccaaagatcctacaatcaattgagaaagatagacaaataaagaagtaatatgataaaatatgataaatactctgataggtaaagtataggcagtagaggccattcattcagttattcataaagcatttattcagcacctctttgtgctaggaaccgttgtaggcattagagattctgcagtgaacaaagctaaattacatttctcattgagttgacatcttggtgtgggtgggagtggtaagtgtatataagaaataagaagtaaacataataatcagttaatttcagatactgattaatgagatgatagtaaaacaggatcatgtgataaagatgaatgagaaaataaccttggattgggtagccaggaaaggcttctctgagaagccaacatttgagctgaaccctaaatagtattaagagctagtaatgtgagatctgtggcctgaacattctcggcagagggaattagaaagtttgtatcctgtggaaaaggcacgcatccttggtcttacaggattagggaagtcttcctgaagagagaagaatgaaagacagtttatagccaagaggaaatcacactagtatgctagaggattttttaattttattttttattttttgagacggagtcttgctctgttgcccaggctggagtgcagtggtgtgatctt

SEQ ID NO: 96177 - DNA, 430873 bp, Homo sapiens
  misc_feature (1)...(430873): n = A,T,C or G
tgaacccaggaggcggaggttgcagtttgctgagatcgcgccattgcactccagcatgggcaatagagtgagactctgtctccaaaaagaaaaaaaattaaaaaaaaaaaggaaaaataatggtttaaatccagtagggaggacaccatggcatattactgccaccaattggcagcacaccttaattgcaagagtagaaaagaagggaaaattatttctgataattgcaaaggtctaccaacgtaagaaagaacaaatgccttgtgaccaagtgaaaaatgcaaaggaatacttgatttgggggagattaagatgagacagtggtcatgatccctgaaacacagggtttgtggaggtggtaaaaatgaagggtgaggaagcttgatcagaagacctctctttgctctagatatcgagcagttgcacttggaactctgaaaaaggggaaggaaagggaagaatgacgaatcaaattttacttttctttttttttttgagacggagtctcactctgtcagccaggctggaatgcagtggcgcaatcttggctcactgcaatctctgcctcatgggtttaaccgattctcttgccacctgcctcagcccctcgagtagctgggattacaggtgtgcgccaccacgcccggctaatttttgtgttttagtagagatggggtttcaccatgttggccaggctggtctcaaactcctggcctcaagtgatctgcccaccttgccctcccaaagtgctgggattacaggcatgagccaccgcgcccggcccaaattttactttaaaaatcctttctgtgtaagaaatatcaccattatcctcacgcaaaaaaagttgatttaatgtgtcttactctaactgtaaggccaatagaataactgaaatcttttgtgtgctaaaattatccagagagaaaaagacataagtctggcccaaattttaaagaaactgtgcaatctacacaatcagaaactcattctttgggttataaagcaaagttcttcatgttattggttaataaatgttaattagaactaatgcattttcagaaacacaatttggtatatttgcaaggaaaacaagaaaagcaatctaaagctcccagtaaaacaacactatataaaaatcttttaaactattgcaacccctgttcaatgtcttcccatttcataggctatagaatgcatttttttttctatttataacattaaatatctacttttggaccaggttggctaagagattgagttgaattaaagttctgatgggcatgtgtctgaagaattacattatttttcatatcgtaggggtgaagggaaaacttttatatgtaataacaaagggaagttttccctctgctgaaggtttgctgaaaaattaactgacgacagtcacattaggctgggcgcagtggctcacacctgtaatctcagcatcttgggaggccaagttagggagaattgcttgagtccaggagtttgagaccagcatggacaacacagtgagacctcatctctacaaagattttttttttttttagttagtgggcatggtggtgtgtgcctgtagtcccagctacttgggaagctgaggcggatcgcttgagcccaggacttttaggcttcagtgagctgtgatagtgccactgtactctagtctgggtggcagagtgagatcctgtttcagaaacaccaaactttttaaattaacgtgtgtgtgtgaataatccagagtgattacctattatttagtgtggtaaagaaacttatataccctttttcataagggaagggggagatggagaatgtagaaattcttttgagtgacagcaagtcattagggagaacaaatggaccttggaggtggaaggcagacattaatgggaaggtgaggtgtagagctgcacaggaacaaagattgtcttattatgcagagaaagtcctccaggtaatcccttggggctgccctcagaagaacagatgaaaagtctgtcaggtcatagtgactgtcaatctattctctagtggttgatatttcctggttgtttgatgagattactagggagggagttttacaacattgcatttcttctttttatttatttgtttttttttttagacagagtctcgttctgtcacccaggctgcagtacagtggtgcaatctcagctcactgcaacctccgcctcccaggttcaagctattcccctgcctcagcctccccagtagctgggactacacgcatgcgccaccatgctcaactaatttttgtttttttagtagaaacagggtttcaccatgttggccaggcaggtctcaaactcctgaccccgggtgatccatctgcctcggcctcccaaaatgctaggattacaggcatgagccaccatgccctgccctgccaacattgcctttcttttggaaaaaagctttcttggtcagataaggaaattccaaagagagtgtacccttggtgcttcgggaaagaggatcagggagacagggaaaggtaagagacagaccttggttctgaggccgttcaattttcaaagcattgagcatgctgaagtgctgtattttggggaatcgttttactgtgcctcaataatattttgatcatatgtatgacttgaagctgttaataaaaattgtgatgtttgaaaatccttgccaagagaattggaatcttgattaagaatttcattggccaggcgcagtggctcacgcctgtgatcccagcactttgggaggccgaggtgggctgatcacctgaggtcgggagttgagaccagcccgggcaacgtggtgaaaccccgtctctactaaaaatataaaattagttgggcgtggtggagtatgcctgtaatcccagctagtctggagcctgaggcaggagaatcgcttgaacctgcaggccgcggtgagccaagatcgcgccattgcactccagcctgggcaacaagatcaaaactctgtccagggagggtgggggtggggaagaatttcttaaaagcagcctctgcttttatgtgtaattctgtaacaaagtcaacatgttatgggacctttattactttatcttaccagataggtaaaggatgaataaatctgcccttcacttacatttatgattaatcagacaggtcagctagtgtgaataatttctaatgaaatagagaaaaaaatgaaaaaatatcaaggcatgccttgaatgtcattaactattttagatgatatcttttaagccataggaatcacagaacgcttttgtgtaggtataacaatgttgcattttaaaaagagaagtgaagcaggagtggggagtagagggaaggtgggtcaatggcacctacttctggacctagcaaggctgaggtgtgagaatcacttgagcccaagtcagaggttgcagtgagctatgactgcaccactgccctccagcctgggcaacacggcaagaccctgtctcaaaaacaaacaaacaaacacaaacaaaagggaggtgaatgaagggagaggtgtttacaaggctagtgcaatagttttggtgtaaggcaatgggaggggagaagggtttgaataaggatggcagcagtagaaaaaaaagcaagccatctgaatgaggtatggtgggacttaggcttttttgaaagaaaataatcaagtctggccctacaatttagagcctaggctgctatgtaattatttataaacaatttataaaattgattataaaaatgacttataatcaattattaagtgtgagggcaaaatacaattttagatttctataaacttagaaagttgattacccatgccctcagagttaaaaaaatgctaaaaacttcttagtaagattaaaaacaataaatgtaataatgctgatggcatttctataatatattaaatagtttaaatattaaatagttaaatagtttaacactcataacaaccctatgagattggtactgttgctatttccattttgcagttgaggaaactgagacagaaagagatttgtctaaggttacaaagctttccagagcagtctggtttcacagttcatgttcttaatcactacactagctgaaattacaatgttaggataaattaggaaattcaaataagagagatgaattattttaagtgtttgagctgcagctttctggcaagtagctgaacacgaggaaactcagttaaggaaaaatcaagaacagactaattttgggagacctaagagaaggcatgtagtagagaacagattgaagaaagaggaggtgctagcaaagaaatcagaagaccagcaaactaggtaggtgtagatccggggaagtgtcttaaaagaaagggaaaaagggtttcaagtaggggatggggattggtgaaaaccgtaactgtttcttttgagaatgtgtcaatgaaaggaacgttgatagcatagcaactggagggagtaacatcactgaattaaaaaaaaaaaaaagacaaaagaaactttttttttttgagacagagtctcactcttatcgcccaagctggagtgcagtggcgtgatctcggctcactgcaaccttcacctcccgggttcgagagattctcctgcctcagcctcccgagtagctggcattacaggcgcacaccagcacgcctggctgtttgtatttttagtagagacagggtttcaccatgttggccagggtagtctcgaactcctgacctcatgttatctgcccgcctctgcctcacaacgtgctggtattacaggtgtgagccaccgcacccagccaagacaacagaaacttctgagaaacagaaaggaagaagacagtggataagaacatatttacattataaggcgctaggaaagtagtggtggaaggagaaggtgggaagggatggcatagtttcaggcagagggagtggctttggagagaagggttctgggttaatttggttagaagttttgggatcacgaacaggaggtggtcacagatattttataatggaggcaaggtcaaaccggaattggagtcccatagctctgagcccaggaaactggatgaatttatctattagtatggactgggactggcatctttaacaacatggaaagcttgaaacagtctttgtggaaaataggagatcagccagagattagaagaaaacgcaagaaaattataagtaggagtccagtcacgaattcatatccaatctggtcagttatgacttcctccagcgaaaagccacacatcttgcaaacccttgagagagaaaacacaaataggggtaacctactggagacaggcccttaagactataaagtagttgagcgattccatactgaaatagagttggctatagcgatagagaagttagtcatatatggggctaatgatccaggagagtaaggattcacttttgtggtgaaaagttgtaagcaggtgaaaggtagggatccatggccacggacgggcaggtggagatcagggaagaggcgacgttaaacataaatagtttgttaatgatttcaccttactgattatttctcttttggcatctagaaggctaagattctcatgtgtatttcagagctactgaaagtagtcctaggttgtggagggagaaatccactttcacagctgagtctatcttctcagtctagttatattctcctctcacaaactagccaatgctgccgccttatgcaaagccgacaccacggaaagatgtgctttacagaggcaggatgacgccaatcggcctagggccggcggtgtttcgtctagattaatggcgagggaagtccccaatagtccttttgaaaccttttcactcttgcctggtgaaagcgcttgtcaaccgtaaatcgcgaatacaatgctaagctctgaggcccttgctaaatccaagtaggagcagggatctgcgcggcctcaccctcgggtttccgcagggcgtctcgagagctgcggatgggggcagcaggagccgggcgggaacagaggaaagcgccggccctgagacctagggaggagcctcggtgaaggaacccggggcgggttcctgcctagatctccaagaagctccaaaaatggcgggcggcaactcggcgagccggacgcgcaggcgccaccgtggccgtccttccgccagccgcgggcggcccaagaaccgtccacagcgcccttatccagaagcctacgcctctcgcgattggctgaactgcgcgagcgctccgtgtgggggcggggccgccacgcagcggccacgtttcccgccccgctggtgcgcgtgcgcgcaatccccactggaaagcgtttgcgcgcgcccctgccgcggcccctagctcgcgcctcagctccctcccctttccgggcaggcccgtcccgtcagcaaggcagtgagcaccgcggccagcagagggcggtccggacccaagtctgcagcggcgccattggcgtgtggaaaatgccaccagatggcgggttaggattgcagctccgttgaaggcgcggcccccgctcccgaacccccggcgaccaccccgtaacaacccccccacatcgggaataacacaccggagacttttggggggaaactaggtcgatggtcggcggcgcccggatgggcagctgaggtgagtgcgggcggcggcgacggcggcggggggcgggaaagagggggaatgcggcggcagcggcgcgggggctggaagcgccgatccaagatggaggccgggcgagagcgagagagcgcgagcggcgagcgggcgggccgggcgcgggccccgtgcgggggagggaggccgcgcgggcctgtgcggggtgcggcggtcgtgggccgtccgagtgcccggagagacgtctgtgggcgcggtgggcaccccggcgtcttcgtcgcttgccacccctcccgcgggcaccaaaaattttgcccccgcccgcccgggcactacggcgacaggcgcggaagcctttgtggcgcgctcgggcccgccgccaagcccgccctccgcccccccccgcccgggctctcgggagtcgcccgcgcccagcggggccgggccgacgcgggctggcgcgaatgccttccgccgcctgccgacctgcgtttctgcggtgttttaacggcgnnnnnnnnnnnnnnnnnnnnnnnnnnnnnnnnnnnnnnnnnnnnnnnnnnnnnnnnnnnnnnnnnnnnnnnnnnnnnnnnnnnnnnnnnnnnnnnnnnnnnnnnnnnnnnnnnnnnnnnnnnnnnnnnnnnnnnnnnnatgcatcaatgctgggctttccagctatctgccctctcagcccccgacgggggcctccttgtgaaacgtgtccaggcctaagcactgccccgctagtttgccagtcccctgagagacgaggccaataaaagttgttttccctcctttctcgaggtgggggcggggtgggaaactagagtgcttggagttggacctgagccccgtttgcagggtccgaactgggttcttcttgtatggtatgggtactaagaaattttcaggttttaggattgtcacgtcacccccatctacccacatttgaaatgttatctgtcgattctcttcacattgcagggaatcgtgctccgggagtataagtcataggatagttttggacacttacagacaaaaaaaaaacaaaaaaaaaaaacgcaatttgtsataaaaaaaaattatttgctgttaaagttggtgttaagatggatagagtttattctcgtgattctgactagaaagacttgcatcttcgcaaaaatagtgtttacttgagaaagtatctgaattggcacaaagttgtgtgatttgtaacttatctggaatttgaatgactctacattttagttttcctcgtgttttaagaaaattgcacattccgatggtgaagcacttagggaaatatacagaagagtgaaaataaaaataacttgtttattgtatggtaatgtaacgtaccttgttctaatattcataatgtatgaggaattcagactgaaaaattttaaccaagtagggaaatatggaatggaaagaagcagaaatgttatttccttgcttttgatgattaagaatacttataagacaaattgttacccaaataaagttgtagaagatctacaggtgttttgccacgcattttcctttacatatttaaaacgtacttcgagtaaactaaattaattcaagtgatctaccagtggtcattttcacaaacgaactgcttttgagtggaaatttttctgtatccacttcagtttcgatgttctgataaggctaaggaatatttaaatagatgcaaaatatggaagtttgttgtgttactaggattgcctcctttgaagagactaataaaatgactgtagatttgattggctcttttaaagccttaaaggcactatggtgtaggggagaaggagtgggtcctggaccgaagttactttgaacgtcccctgggtttgtggtgttcagggtgttacctttgagccttactttctttatctctaaaaatggggagctgggcccagtggtgcactcctgtagttccagctactctgtagtgaggcaggaggaacccttaaacccaggagtttgaggcttacctgggcaacatacaagactccatctctttaaaaaaataaaataaaatggggatagtatcttacggtgattgtgtaacaagatgtctgtgaaaaacacacatttaattgctgtaacttaaaatttacagaattttgtacagttttaatctttttttccttgattctgactctgtgtatgttcataatctcagtgctgtgagaagaaataatgtactctgggaaagatacgttcttgtttccccttttatttgttgttttgtcctgtatctttatatctttatttaggggggtatattagtttctttctttttttttttaatgcataacaaatttcacacttaacagattaacaattatttcagcttccataggtcagaagtttggggaggtatagctgagcatctcaggctaaaatcagggtgtcagctgtgrttgcagtgcatatctgaggcttagagttgtttttctttttttttttttttgagatggagtctcattctgtcaccaggctggagtgcagtggtgtgatctcggctcactgcaacctccgcctcctgggttcaagcgattctcctgcctcagcctcgcaagtagctgggtctacaagtgcgtgccaccatgcccacctaatttttatatttttagtggagacggggtttcaccacgttggccaggatggtctccatctcttcacctcgtgatctgcccacctcagcctaccaaaatgctgggattacagttgtgagccactgtgcccggccagagttgtctttcaaggtcactacttgttggcacaattaatttccttgtgatagtgtgactgaagtccccatcttcttgttagctgttggccaaggactgctctcagatccttgccgtgtggccacatagttcacaacatggctgttagcttttatccatgctagcaggagtcagtctccctatttcctgtgtgtctgacctctgactcccccctttaaggtcttttttaaaagctcaccagctaagctctgaggcccttgtggtaaacttaactgattaagggccttaattacatatgcaaacatatattttgtcatataatcaccgtaatgatatcccgttatatctacaggtctctcccacactcaaggggagggcatgatacaagggtgtgggttagtggaggcttttaagaattttgcctgccgtaggaaaagaagtatcttcacatttacctcttcagattccggacatacaaggagaggacctaggcagagcagtaaccccacttgatcagcttactcttacttatattgccttttcctcaccttttttcctttcccgtttcctggtaccttagtttacatgccttcctctatgaaataattttattgcattgagaggaaattaaaaataaaaacgaaaatttaaaacgttataaagaagggaggcaatgggagaagggagtttgtataattattttttctttcatttctgccactaagaacacctttttaaaaaatttwaaaaaattactattattggcctggtacagtggctgacacctgtaatcccagcactttgggaggccgaggtgggtggatcacctgaggtcaggagtttcagaccatcttggccgacatggtgaaaccctgtctatactaaaaatacaaaaattagccaggcgtggtagcacttgcctgtaatcctactactcaggaggccgaggcaggagaattgcttgaacctgggaggcggagcttgcagtgagctgggatcacgccactgcactccagcctgggtgacagagtgagaccccgtctcaggaaaaaaaaaaaaatttattattttttgagtgtgccccgaccagagtgcaatggcatgatctaggctcactgcaacctccaccgcctgggttcaggcgattcgcgtgcctcagcctcccgagtannnnnnnnnnnnnnnnnnnnnnnnnnnnnnnnnctgaaaccgtctgtccaccttggcctcccaaagtgctgggattacaggcatgagccaccgtgcccggccagttatttttattttttaaaaattacataattcttggccaggcgcggtggctcacgcctgtaatcccagcactttgggaggccaaggtgggtggatcacgaggtcaggagatcgagaccatcctggcaacacggtgaaaccctgtctctactaaaaatagaaaaaatcagctgggtgtggtggcgggcacctgtagtcctagctaccggggaggctgaggcaggagaatggtgtgaacccgggaggcggagcttgcagtgagccgagattgtgccacctgcactccagcctgggtgacagagtgagactccgtctcaaaaaaaaaaaaaaaattacgtaattcttgccattccttgatgccttttgttttacctgtttttgatatgatattgaatctcagagaagttaaggaatttattttttattttttgagacagggtctctctctgtcactcaggctggagtgcagttgtgcagtcacagttcactcactgcagcctcaacctccccaggctcaggtggggcctggagtagctgggactacaggtgcatgccactacgcccggctaatttttgtattttgtatagagatgagattttgccatgttgcctaggctggtctcaaactactggcctcaagtaatcagcccgccttggcctcccaaggtgmtgggattacaggcgtgagccagtgtgtgtggccgaagttaaggaatttaaatgccttggatcacactcctcttaagtggcagagtcacacaatcattgcgtcagacagttgctgtggtgtgattggtctagcagcttttgaggagagaattcttttttttttttttttgggacgagtcttgctctgtcgcccaggctggagtgcagtggcatgatcttcgcttactgcaaccttcgcttcccaggttcaagtgattctcctgycccagcctcctgagtagctgggaatgcaggcacgcaccaccatgcccggctaattttttttttttttttttttttttttttttagacagtttcactcttgttgcccaggctggagtgcagtggtgcaatctcggctcactgcaacctctgcctcctggatccaagttattcttctgcctcagcctcctgagtagctgggattacaggcatgtgccaccacacccaactaattttgtatttttagtagagacagtgtttttccatgttggtcaggctggtctcgaactcctgacctcaggtgatccgcctgcctcggcctccgaaagtgctgggattacaggcttgaggcactgtgcctggctgcctggctaatttttgtatttttagtagagacggggtttcagcacctgcctaaggccaggctggtctcgaactcctgacctcaggcagtctgcttgccttggcctcccaaagtgagccactgcgcccgactgaggagagaattcttatgaagagaatagttatttgcaagtctcagagtaggggtattattggtggaacaaagaaggcagcagaagtttagtcatggcatacggtttagcagtccaagaagcaaaatattttcatgaagaggcaattaagacaggttagccaaggataatcaagctttaaagcaagcttgtccaacccgtggcccaacacaattttatacactttcttaaaacattgtgagtttttttttttagctcatcatttataattagtttattttacaggtgacccaagagaattcttccagtgtggcccagggaagctaaaagattggacacccttgctttaaaggatataactgggaattaaaattgctagggagatatattttaacacagaaatgatataataggggcttggtaaatttttgttgactgaataaaaatataaatctttagaatttagatgattcttgctagagtggtagggaaaaactaggaagcagagagctaaaatgatattcttgcataagccacagaatgaggtgattcttgaaggaattagaattgtgtctgtaggaagttttctgttattttggtggttaaggggacagtcagcttcctgccttttagtgctgaaagtgtcttataattcagttggttttatagaatcttttctttatataacataccccttattgcttccctcagatttttctcctccttttctaaatcaagcttgtccaacctgtggcccatgggctgyatgcagcccagaatggctttgaatgtggctcaacacaaatttcataaactttttaaaaacattatgaggtttgttttgtttgtttgttttttaccttattagctatcattagtgtattttatgtatggcctacagcaattcttcttccartgtggcccagggaagccaaaagattggatacctgtgttctaaatcaagggtccccaaccactgggctgtggacccatactggtctttggcctggtagaaactgggctgcacagcaggaggtgagaggcaggtgagctagctttatcacctgtgctccatccacctcctgtcagatcagtgggagcattagattgtcatatgagtgcaaattctattgtgaactgcacatacaagggatgtacgttgcgtgctttatctaatgcatgatgatctgaggtggaacagttttatcctgaaaccttctgattccccaccccatccgtggaaaaatttttttccacgaacctggtccctggtaccaaaaacgttggggatggctactcctttttgccagtcagtagtgaaggatgtcataaatcttgccttcttccctgccccccgtttgttttttatttatttttaattttgtgagtccatagtaggtgtatgtatttatgggttatgtgagaatgtcttaccttctttatgaaatacattcctttgtgctatgggccaaaatgatgtaccatttagttgtccaagaatttcaatggaattttgctgtaaacataatagcaatggcttttaacttgttttctagcttctgctagcagttacaaaaacattttacattgtagcctagtacaaacacacacatccacacacaatgaaaataagtttcatgaaataatactttatctttatgcagtgcactctgatattttctgatcttttctattaggaatgctggttgtggctgggcacagtggcccacacctataatcctagcactctgggaggccgaggcgggtggatcacttgaggtcagaagttggagaccagtgtggccaacatggcgaaaccccgtctctactaaaaatacaaaaattagctgggtgtggtggcatgtgcctgtagtcccagctgctcgggaggctgaggcacgagaattgcttgaactctggaggcggaggttgcagtgagctgagatggcaccactgcattccagcgtaggtgacagagtgagactctgtctcaaaaaaaaaaaaaaaaaaaagatggttgcagtttacctaagaaatgtcacgactcacagcagctaacactgggaaaagcattgaattgtaatctcattggtaaaaaggaaagtgcaaagtagagccatgagaagaaaccatttcacttccatcagattgacaagcattaaaagtctgataatgtcaagtattggtgagaatgtagagaaattacattctcacttttgtcagcagtgtaaattgatacaatcattttctgaaagatgttagtaagatagtaaattcaagcttcatgtattttaaccccagcagttgtactcctgtctttatattcctgatgaatgaaatccttgtatttttattttggagacggagtttcgcccttgttgcccaggctggagtgcaatggtgcaatctcggcttaccgcatcctctgcttccccagttcaagcaattctccggcctcagccacccgagtagctggaattacagggatgcaccaccatgtctggctaattttgtatttttagtagagacggggtttctctatgttggtcaggctggtctagaactcctgacttcaggtgatctgcctgcctcagcctcccaaagtgctgggattacaggcgtgagccacgtggccagccaaaatccttgtatttttgtaccaggatgtgtgaacagaatgttcatagtagccttatttgcagtagccaaaattcagaaataaaccgtatgtctttagtggtagaatggttaaattaatgatggttttcaaaagttaaaataattttggttactgggataagccaacttggtcacagtgtattatgtatcccttttgtatttactattattttgataggatttttggcctatttcttcactaggcatattgctttatagttttattgtaatgtctttgtcaggttttggtatttgggttatgatggcttcataaaaaaggttgggacgtgttccctgtatttactgaaatagtttgtgtaatagtgttattcttccttgaattttagaatgtaccagtgataagccatctggacttggaattttctttttgggatggttttgataacaaaatcaaatttagtttctatactagatatagggctattcaaattttctgtttcatattgtgtcaattttggtctgtttcatcttgtatcagtttagggaaattggttcattttacttaattgattggcaggagtttgtaagatttccttgctatccttctaatgtctgtaggatctgtagtgatatctcttctttaatttctggtattgttattatttttttttttttttgagaaggagtttcattcttgttgcccaggctggagtgcagtggtgcaatcttagctcactgtaacttccgcctcctgggttcaactgattctcctgcctcagcctcccgagtagctgggattacaggtgccctccactacgcctgactaattttttgtatttttagtagagacagggtttcactatgttggccatactggttttgaattcctggcctcaagctgttcacccttctcggcctcccaaagtgttaggattacaggcgtgagccactgcatctggccagtatgttctttttatcttgaccagtctagtgatttatcggttattttttcaaataaccaactgaggtaattgtcagtatttgtctttagtatctcattggtttctgctttttaaaattttcttctgctttgctttctttccagccttttaaagtgaaattttaggttatagattttaggcactttttgttttctaataaatacatttaaagctatatatttttctctaagcactgctacattactcagactttgatgtgttttatgtttataatttaccttgacattctttttaatttgtgatatcttcttttacccatggattacttagaagtgtgtggtttaattttcttttcttttttttttttttgagatggagtcttgctctgtcacccagactggagtgcagtggcgcaatctctgctcactgaaacctccaccttccaggttcaggtgattctcctgtctcagtctccacagtagctgggattacaggcgcacaccaccacacccagctaatttttgtatttttttagtggagacggggttttgccatgttagctaggctagtcttgaactcctgacttcaaggatccgcctgcctcagcctcccaaagtgctcagattataggcatgagccaccgtgcccagccttgttgtttaattttcaatatttgggattattctagataacttattactgatttctaacttagtttcattttgagtcatatctttatgattttaatcctttaaaatttattgaaacttattttatgggccagcatatggtccatcttggttaatgtatcttttatacttgaaagtgtgttttgcagttgttgggtgtagtattctgtaactatcaattaggttaaggtgttttaatagcacttttcaaataatctatgtatttgttgttgttttttgttgttgttgttttgtctcattctatcagctgccaagaagaaagttaaaatatccaactatgactgtggaattatctgtttttcccttaattctgtcaagtttttctcactcattttgaagctctgttgtaagacatgtacaacttatgattattatgttgttttgacaaattgacctttttattgtgatgaaatgtctctctgtttctggtaataatcttttccttgaagtctgctttatttgatgttaatatagccactccagcgatcttgagcttactgtttccataatatatctttttctacctatttacccaaaactcttcattatatttaaattgcttttgatggtagtatatagtcgagtattgctttttaaaaaattcctggccaggcacagtgactcatgcctgtaatcccagcactttgggaggccgaggcaggcggatcatctgaggtcaagagttcaagaccagcgtgaccaacgtggagaaaccccatctctactaaaaatacaaaattagccgggcattgtggtgggcgcctgtaatcccagctacttaaaaggctgaggcaggagaatcgcttgaacccgggaggtggaggttgtggtgagctgagatcgcgacatcgcactccagcctgggcaacaagagcaaaactccatctccaaaaaaaaaaattccttccaacaacatggaagtggaatctttcagttataataatcattgatcatatgctaatgtctgtcaagaactatgaagagtttgaagttttaccctatttataggctgacaagttaacttggcatagtttaatggcttatggtagaagtcattgaaatgacttggtcatagatgaagaacgatgcactgtgtcagtagccagacagtcagcatttgcatcagatttctgagctccagtttgcataggtcattgggaagaggtccaggtgaaacctgcacaagtagtgaaatcccaagcttagagaaactcagatcttttataatgggtcataaatacgctttttgctctgggacatgtctttcttccaggacccttcactatataactatcctgaaaagattggaacaaaggcttccagtgcttctcttctcaagacaggcagaaaatcaagagactccatggagagttgtcttccaaaactgtctagtgaattttctcagtttcccttttgttatttgcttaagtttttcttttgtttcttacatggctacaacctagctttccagctttatctcttcattgtacttctctatggttatatgttatcaccaaattagattacatactcgtatcctgtctttccccacgtctttgttctggtgaatatgtgtgtgtgtaagaaaacgcttggctaggcatagtggcttccacctgtaatcctagcccttttggaggctggggcgggcgatcacttgagttcaggagtttcagacaagcctgggcaacatagtgaaaccctgtgtctacaaaaaatacaaaaaattagttaggtgtggtagtgcgcacctgtagtcccagctacttggggggctgaggcagaggatagtttgagcccaggaggtcaaggttgtagtgagctgagattgcgccactacactccagcctgggtgacaaagtgagactctgtctcaaaaaaagaacaaaagcaaaaaagaacattgagcatttactatatgccaataaacattttacaataaccctgtggggtagttattgttatgttggtgttatcccccttttactggtgaggaactgaggcttggattaaatttcccaagtttgtaattagggagggacatattatggagaagcttttgtagtagtctatttcttgaccttagtaataattacatggagtgtttgcgttaaaattctctcttttttttgagatggaatctcgctttgttgcccgggctggagtgcagtggtgtgatcttggctcactgaaacctccgcctcaagcgattcttgtgcctcagcctcccgagtagctgagattacaggtgcctgccaccgtgctttaaaattctttaaactgttatttagaattttacataatgtactgtataattgatatagttcacaaagaaaagaaaaagmaaacrcagagtaagatgtggaatctgtgtgaaatctttacagataacttcagccaatctttatcctctgtatctatcccgttgcatttattgttggcgtcataaggtttagtaagtggcagtgtttataaggcacagtatcctgtgtaatatatatgtgtgtatgtgtgtgtgtgtatatatgtatataattattattttttttgagatgaagtcttgctcttgttgcccaggatggagtgcagtggcgcgatctcggctcactgcaacctctgcctcctaggttcaagtgattctcctgcctcagcctctcgagtagctgggactacaggtgcctgccaccacatctggctaatttttttttgtatttttagtagagatggggtttcactatgttggccaggctggtctcgaactcctgacctcaggcaatcctctgccttgacctcccaaaagtgctgggattacaggtgtcagccaccacacctagcctttctttttttttttttcttttttttttttttttgacggagtctgttgccccatgctggagtgctgtgacgtgatcacggctcactgcagcctcaacctctcacctcatcctcccaactagctgggagtacctgggaccacaggtgtgtgccaccaggcccagctaattaaaatacgttttttcgtagagacagggtctcaccatgttgccaaggttggtcttgaactcctgggctcaacagtcccccagccttggcttcccaaaatgctgggattatagttgtgagccaccgagcctcacccagtgtgtagtgtttgaaattaattgtcccaaggccaaacagctagtaaatgatagagccagaatttgaacttaggctgtttcagaacccagtctctaaatttcttaaaaggccatttttctctcagcctcatttctgcatgttgaaatactttgcattttgaagtttattttagggagatttgattttcttccctattccattatgtaataattatcttgggtaggacattactttctggagtcctcgattttctcatttttaagatgggaatacagtttagagtcttttttttatttttagaaaaattgacttatttttaaatggacaaattatgtttatggtgaataactttggtatatgtgtacattatggaatggctaaatcatgctaattaattaatatatacttttcttcacatatttatttggtgtggtgaaaacacttaaaatctgttctcagcattttcaagtatccaatatacattgctattaactatagctatcatgtggtgcaatagatctcttgaacttattcctcctgtctaatgaaaatttgtatactttttttgggggagaggaggaaagcagtcttgttctgttgcctaggctggatggcagtggtacgatcgatctcggctcactgcaacttctgcctcctgggttcaagtgattctcatgcctcagcctcctaagtagctgggacctcaggcgcgtgccaccgtgtccagctagttattatttttgatatggagtcttgctctgtcgcccaggctggaaggcagtggtgcgattttggctcactgtagcctgtgcctccggggttcaagcgtttctacttcgtcagcctcctaagtagctgggattacagatgagtgccaccatgccctgctaatttttgtatttttagtagagatggggtttcaccatgttggccaggctggtctcgaactcccgacctcaggtgatctgcccgccttggcctcccagagtgctaggattacaggactgatccactgggcctggtgaaaatttgtatctgtttgatcagtgtcttcttaatccccatccctgctcccatccctggtaaccaccattcattattctctgtgcttctatgaattgagcattttttagtattttatattttattaattaatttattttttgagacagagtctcactgtgtcgcctaggctggactgcaatggcacaatctcggctcactgcaacctccacctcctaggttccagcgattctcctgcctcagcctcctgagtagctgagattaccagtgcacaccaccatgcccggctaatttttgtatttttagtagagacggggtttcaccatgttagtcaggctggtcttgaacccctgaccttgagatccgcccgcctcggcctcccaaagtgttgggattacaggcgtgagccaccgcgcctggccttattctatttttaaagtgctcatttattgtctatttcttccctctggaatgttagctctgtgatgagagaacttatctgcctcctttatactgctacctagaatagattctgacacagtaagggctaacaaatatttgttgaatatagtaagcggtatcattaactgaaagccaggaagcaagaggtagtatggtgaaaaaggcagactaggtagaagttgaaaaagtgaacataaaatgcagaggcaaggcctggcatgatggcccatgcctgtaatcccaacactttgggaggttgaggcgggaggatcacatgaggtcaggagtttgagaccagtctggctaacatggcgaaacccctgtctctactaaaaatgcaaaaattggcccggcatgatggctcacgcctgtaatcccagcactttgggaggctgaggtgggtggatcacgaggtcaggagttggagaccagcctggccaacatagtgaaaccccatctctactaagaatacaaaaaattaactgggcatgggggtcacgtggtggctgggctggggaagtggcggcttcaggagagagcgggacttcgtgtggcggaggcagcatttatgaccttctacagtgaggtgaaacaaatagagaagagagacttggttctaacgtgaaaaaatcagattgaaagactgacctgtcctggttcctcttacttcagtttcaccccatttgaggttcttcagatcctgaagttacagatgaagaaataaaaaagcggcagttatccatcttggtgcatcctgacaaaaatcaagatgatgctgacagagcacaaaaggcttttgaggctgtggacaaagcttacaagttgctactagatcaggagcaaaagaagaggaccctggatgtaattcaggcaggaaaagaatacrttgaccacactgtgaaagagcgaaaaaaacaaagaaggaaggaaaacctacaattgtagaggaggatgatcctgagctgttcaaacaagctgtatataaacagacaatgaaactctttgctgagctggaaattaaaaggaaagagagagaagccaaagagatgctgaaaggaaacgacaaaggggagaagagattgaagctcaagaaaaagccaaacgggaaagagagtggcagaaaaactttgaggaaagtcgagatggttgtgtggacagctggcgaaacttccaagccaatacaaaggggaagaaagagaagataaatcggaccttcctgagaccaccgaaagtaaaaatggagcagcgtgaatgaccacccggggtcacaggcacagaaccttccccctgctatctcccttcctgcttcgaaggactcattctttcctcccacttccaccccaacatagagtagtatttgcttttcagtccattttttcaatacaatttaatatcgatcagagtaattcttttgtgcattgaaatgcggggcttggtttaaaaaaaggccttcccctctccttgcccctagaacaaccaggattagaaggtgccgccattggtgctgccttctcttcccacagcctgtaactcagtgttttgtacttcactgaattgtgatggttagaaacttcgtgggtagwttgtggaactcatacagttaaacatattttttaaaatgatgttgctgtgacttcatagacaagcctggaaggggcaccttaggaagccccttcgcttcagttgcttgcttctgggtgtgctccctttgaaggcccagatgaaacagggaacacttgtgggcacacagagtggcatctgatgccctgatgccctgtggtgtttggcatgtgcccccgtctactgaccaatcagcgtggcatgaggcctacgccaccccaacctttcactttccaaagagctagccgtcctccacccagtaccatgtcctagcttgtctgcatttgttagtggtaatattctttatgtataataaatttttatacctcccaccacccccagaaaaaattagctgggcgtggtggcgaacccctataattccagctactcaggaggctgaggcaggggaatcgcttgaacccgggagttggaggttgcaggtagcagaaatcgcgccattgcactccagtctggaagacaaaagtgaaactgtctcaaactaaaaaataaaaaaacgcaaaaattagctgggtgtggtggtgtatgcctgtaatcccagctacttttggtggctgaggcatgagaatcacttgaacccaggaggcggaggttccagtgagctgagatcatgccagtgcactctagcctgggcaacaaaatgagaccctgcgtcaaaaaaggaaaaaaaaaatgcagaggcaaggctgggcacagtggctcatgcctgtaatcccaccacttcaggaggccaaggcaggaggattgcttgggctcatgagtttgagaccagactggacatcatagcaagaccctgtctctacagaaaatgcaaaaattagctgggcatgatgttggccacctgtagtcctatctactcaggaggctgaggtgggaggatggcttgaacccaggaggtcaaggttgtaaggttgtagtgagccgaggtcacaccactgcactccagcctgggcaacaagagcggaagtccatctccaaaaaaaaaagggagtaaggagggagagatagggtaggaaggaaggaagaagggaagttagctgccccaccatggaaactggaattggagagtgcaataataattgaggggagtttggttcctaggttagtgtcaagagttctgaccagaaactgcaggcctggtggagaggacgagttcactgtgtttagattccacatgtaagtgagatcatgaggtatttgcctggcttatttcacttaacataatgtccaggtttttccatgttgtcacgaatggcaggatatccttcagttaagattcagcaaatattttgtgagtacttattatatgtgtggcagtggtatacaaaattgataaatatgtaggttcttctcttaaaaagcttctattctgttgagagagattaaaaacaaaacaaaaaacacccctaaagcaacaaaacaaaccaatagggttaatgaaatgtgggtgggaggaggtgggaagcataaaaaatacaaaagtaaaaggagatgcccttctccctgtcagtgtgccccctgctgccccacgtaacaatagatcctttttatgtgtcaggaaatgacaaacataggtcagaagagtttttcaggggagtccctttattttctaatcaagataacatgaatagttaaatattacctgtactgttttttggctctttggcaagatttctcttcataattgttaaattggtttaaaggtccaggtggtagtttgagacactactgtctgcctcctcaatcttaggcagaaaagaaatgttttatacatagtcaaacatgagtttgacatggttctctcctttgaggtacctgcctctctcttttatcatgaagcttagttgaccatgattatatcaggttacaatttttcctgtcttatttggggcactgagaggtagtcagcccctattctttagcagagacagtacaaactggcaagtgtgcagaaaattttttttgttttgtttttgttttgttttgtttttttttttttttgagatggagtctctcgcactgtctcccaggctggagtgcagtggcacaatcttggctcactgcaagctctgcctcccggattcacgccattctcctgcctcagcctcctgagtagctgggactacaggtgcccgccaccacacccggctaattttttgtatttttagtagagacagggtttcaccgtgttagccaggatggtcttgatctcctgaccttgtgatccgcccgccttggcctcctgaagcgctgggattacaggcgtgggccactgtgccgggcctgcaagtgtgtagaaattcttatagtgccaaggtataaaagttgaacattttaggctgtgttctattttattcttatagcctaaattaactgttgggaaaacaatgccttagtttatgccatgtgctgctagttacagttaaaaatctcatgtgttcacagatgaagcactgtcacatgacagatggctaagaaatctattgtccattgtctgggagagttcctggtgcctgaatcacactgtatcaaattctaattgcgtgtttctgtctatgtaaacttgggcaacttctttaacctttctaagtctcagttttctcatctgtaaaatgggaataataataaaagtattccactgttgtgggctgcacaacagtgcaaatacaaaagtaaaaggagttgcccttctccctgtcagtgtgcgttaaaaagttagcctttggccaggcacggtagctcatgcctgtaatcccagcactttgggacgctgaggtgggtggatcatttgagctcagaagtttgagaccagcctgggcaacatagcgaaaccctgtctctacaaaaaaatacaaaaattagccaggcatggtggctcgcatctgtagtcccagctactctggaggctgaggtgggaggattgcttcagcccaggaggcagaggttgcagtgacctaagatgatgccgctgcactccagcctgggtgacagagtgagactgtctcaaaaaaaaaaaaaaaaaaaagttaggttttaaccactagactatattgtgttgtgcatagatccaaagatcatttatcttaaaagacatatcgtaatctaagtaaatgctgaggttactttctgtaagcaaagaattttagttaattggttctcatcagcaggtagggctagcaatagattaaaactttattaatgaggcmgagcgtggtggctcaagcctgtaatcccagcagtttgggaggccgaggtgggtggctcacgaggtcaggagtttgagatcagtgtggccaagatggtgaaaccccgtctttactgaaaatacaaaaattagcctggcatggtggtgggcacctgtaatcccagctacttgagaggctgaggcaggcgaatcacttgaaactgggaggtagaggttgcagtgagctgagattgcgccgctgcactctagcctgggtgacagagcaagactctgtctcaaaaacaaaaaatttattaatgagaatggtcagatgataaggtactctggttaattgagagatgaaggttatcaccagcgtgttctgctttttagtaaacatatttcggaaattaggctccttttctttcttcagaaaagtgctgcatcctggaaagacattgtaatgcttctttggtagttgataaattttgatggctttatcaggattatttatgaatcttagctttttctttattattctgcacacagaaggttaggcatgaaaccaagagcaaagttggaaagttacctctagacaaaataagatgatggcttactactttttcctcccattgggatgcagacaacaaaattgtgactaaggtgttttttttttttttttttttttagttgtggataaaagatttgattttatagatacaaaggcaacatggtgtagaagaacaaaaactagtgtagggccagagatctgagttttaattataactctgccactaactgtgtgtctttgattgattacttctctgggcctcagtttcttcatctctaaaattagtgtctttggccagatagctggtttccaagatttcctgtaatttttttagtccctgttgaaataatcatgaagttaagtctttatcaggtaatgcagtttttgatttgaaagtcattagttttgaagacctaggtgtgatattttgcctccacacctcccgtctgtttattggaataatttatgctttccactagctgataagtgcacaggccaaataaaatgttgatatttagatagcacttatagtttctggtgccaggtgtgggcatgtgtttgctacatacttgatgaaaaagagataggttagcaagtgttttcgtgtaattttgctcattgagtcattcatcaagcatttgttgaacatttacaatgagccatatagtgtggttataaagacattgaagcacagttcttgttttcccgaagtacacaaggaggggcatatgaagactcagaacttaggtagtaccttcttcggaaatctttacttgataggcttattgctcctctctttctcccatccagggttgatctaagtgttctctctgcctttgtattttagtggcacacagtgccggggctgccatgaatggttgtagaattggtaccctgcctaaagatacttggccaaagtggtaggggaaggctgaaatccagattttattctgcttgacaaattctatttgctttttccagctttttctagtttacctgcccagaggagagtgctttttctaattcttacaaaagaacctgtgtattccagcaaatatccaccctttgcattactgtatcataaacattctgtattgctttttttttttgtagtaaagttttgtagtgggtaatgaatgccttgaggtggtttgttgaagtgagcaaatgcttcctgaaggagatgaattgttatgtgagttttgaaagagaagtgaaagccagacaagggtagatgttggagatgagaatgacatttcaggtgaaggtacagtgtatatatgcaaagggacagagctgtgatatatagcccagtggttcttaaagtgtggtcctagcaccatggtgtcagcattacttagaaacttgttagacatgcagattcttggccttcaccataggcctgccaactcagaaattctggggatgagcaatctgtgtttttacaggtcttcaggtgattctgatgtaggctgaagtttaagaatcattgctatagcccacctcttcagaaagtgttacttgattgtgtttggagcatggggtgactagggaagagtgattaaaatacagagctgtaagtcatgagcagagtgaagtgccaaaggaaagtgtttgaactttgtccttaggccagtggctgcaccttagaattacctgacagctttaaaactatagcagtgtctgggatttgtcccagaccagctgaacccaaatctgagtttctgatgcacagtgagagttgtgaactatatatagttctgattataatagtgtacatatttattgaaaatgtatcaaacatggtgtcaagtagcttacatgcataataattaaacaacacagcagttttatgtaggtattattcctatttcacaggcaaggtagagaggttaagtaccttttcccaatgttacatagctggaaagtggttgagtccaggtttttgtgactctaaagtctaatgtcttaagcaattaaaacaaaaaaccttgggttcttgaatttggatggcaaaataatgacatctttatttttactaacctataactgaaatttagcagttccttcaatttcaaatgttggcaacaaatcacagttgtgttagcaatacttattttgtcaccaacagaaattagaaatattttcatattaaattacagattgggtgtggtggtgtgggcctgtagtcccagctacttgagaggctgtggtgggaggattgcctgagcccaggaacttgaggttgcagtgacagagggcctgggtgacagagggcgactctgtctcttaaccacaattagccgggcgtagtggcacgtgtctgtagtcccagctactcaggaggccaaggcaggagaattgcttgaacctgggaggcggaggttgcagtgagctgagatcacgctactgcactccagctcgggcaacagagcgagactctgtctcaaaaaaaaaaaaaaaaaaaaagcctggcgtggtggctcatgcctgtaatctcagcactttgagagggcgaggtgggtggatcacttgaggctaggagttcaagactagcctggccaacatagcaaaatcctgtctctactaaaaatgttaatacaaaaattagctgggcgtggaggcacatgcctgtaatcccagctactcgagaggctgaggcaggagaatcacttgaaactgggaggcggaggtttcagtgagccgagatcatgtcattgtactccagcctgggtgacagcacagctctgtctcaaaaaaaaaaaaaaaaaaaaaggaaaactacagatgttgtagatatttcaaagtacaatttcagtacttcaaaattagggtaattgttagactaacctctagatcttatttactgtgttaaagaatcatattacaatattttaagttgctttaatatattgataattgtatttgaatataattaattctcttataagcatggtaccattcacaaagagggagagtttagtggatagcttgatgtagggtagacaggaaattttaaattcataaatccctttgtctaggctgagcgtggtggctcactcttgtaatcccaacaytttgggaggctgaggctggcagatcacttgacctcaggagtttgagaccagcctgggcaacatggtgaaaccctgtctcaaaaaaacaaaaacaaaaacaaaaaaaccacacacacgcaaattagctaggcacgatggcatgcatatgtggtcccagccactctggaagctgagtcaggagaatcccttgagccagggaggcagaggctgcggtgagccaagatcgtgcctttcactctcgcctgggcaataggagtgaaatcctgtctcaaaaaaaacaaaagaatctttacagaagagactgtctctctttcccatccctcctttatttgttttgttaaatagaaatgaaacctaagttctttgttgttacatgtcaaagtattagattaaaaaacacttagggtttaggagtgctttttactaagcacttcctaataaattagggaagaggattatatgcatcatctcaccaggcattttaactatcctatagtttgatatagtgctgtttaatgtaactttctgcagtgatggaaatttttttgtttgtgctatccagtgtggtagttgttaaccacaatgatgcagaaagagaaagtaatatagtaatagttaacaggaacataataacattatataataatagttaacagtatgtgttagatgccaactactgttcttagcatattgtatatattgactcatgtaatccctacaatagccccatgtggtgggtagggctaagtctctttacagatgaaaaaactgaggcacggagaagttagttgactttccaaaggttatataggtagtaattagaagatctgggattcagactctggcagtctggcttcctttatgctccctttatacttctttatcattttccccatacccacaaatgcatttacatgctgctttcagaaacaagacattaaaaggaatttaagataaataattttgttctaattattaactaaaagtattgtggtactttatagtttatttcccctttgttacttgattctaatcatggactcaatttactatttagtgtaagtaaacttgtattcagtgtggtgtttttttgtttttgattttttttttgaaatgggctttcgcacttgttgcccaggctggagtgcatggcgcaacctcggcttactgcaacctccgcctcccaggttcaagcagctcccctgtctcagcctcccgagtaactgggattacagctgcccaccaccacacctggctaattttttgtatttttagtagagatggggtttcaccaggttggccaggctggtctcaaactcttgacctcaggtgatctacccgtctcagcctcccaaagtgctaggattacaggcatgagccaccgctcccggccatggtgggtatttttaaataaccaacaccgatattgttaataatctagatgtttttcctcccaaaggttaaagttaggttctaaaatttaataataatatgattattttccttactgaaacaaaatgtaattctcaggtcattttgtgatgagttggctttggttaatggatatttcgctttccctagagaacatatttgaataactaacctgttacacctagcatgttgtgttcctagagacccaaaagggggaaagtatctctcagagacagagttccatccttaactatattcaggccaacctggtggtagattaaaggggcgagagaactgtcatttctcaagtatctgttataggcattatttttggtgctttaaatacatagccatcatttattgaatacaagctttttattaaggctttcaagtgctttagattcattacatgccattttcttcacatataacccttcagagaatatggcaaagatgtttttacagatgagggctttgttaggctctttttcttctctctcctcccctccccttcacttcaaggggaaatgatcataaacatagatggggaatgagattggggtggtgctgggattatcactgctgccagctcgcctattacttaaggctgtccaagttatacatttttcatttcatttatatactggaaaagaaggcagatggtatttattcttacatgagagacagtatcatgtaaacaaaataatcatatattatgatgaatgctgtctatgaagggaataaatgaggtgttatgatggataataatgaggtacttaacattaaaaaaggccaggaaaggcatctctgagggtgtgaaatttaagctgaggatgtgtacagaacctaggcaagaatggtccagatacagggaagagcaaggataaatctttttagcagaaatggctctaggaattcagagaaggccatagtgactagagggaacataatgcaggaagagtacagtggtgttgcatgaggttagagaggtaagcagagtctggattatgtagggtgtatttgggatagttaggactcatagattttattataagtgaaatgagaagctgttagagagttttaagaagaggaatgtttaaaaaacattcttctaggacgggtgcagtggctcatacctgtaatcccagcacttttggaggccaagacagattgatggcttgaggccaggactttgagaccagcctggtcaacatggcaaaaccccatctctactaaaaatacgaaaattagctaggcaaggtggcgcacacctgtgatcccasctacttgggagactgaggcaggagaatcacttgaacctgggaggcagaggttgcagtgagccgagattgtgctgctgcactccagcccaggtgacagaacaagactgtctcaaaacaaaacatattcttctagcttagtggttctcaactgagggcgattttgcttcccaggggacatttggcaatgtctagatttttgattgtcacaactgggaataatggtttatgctgctggcatcagtggatagaaacctagggattatggtgtatgctactgacatcagtggatagagacctggggatgatggtgtatgctactggcatcagtggatagagatcagggatgctgctaaaccttctgtaatgcacagaacagtaaacaactattggcccaaaatgtcactagtggcaaggttgagaacccttgcttttgctattgtgtgaatattggatggtgggtggggtgtggggaatgcaagagggagggttaggttgttacagtgtacaggtgacagatacagtgccttggatgatggttgtaatagagataatactgagaagtgttcttattctgtatgtgtattggagttagagtagataagtgaggaaagggataagtcaaggacgatctccaggtttctaactaataattgagtgatttgtgatacagtcctaaagtagggaagactgggaatgaagtgttctgatttttaaaattttatttcattgaatttgagttgctattaatagaagacacaacactattttagggtacaataggaaggaagcagtaacctcatgctgtctatacttggtcacaccagccattcattgctttgaaatcttatctgttctcagggatatggcagtttcttctacctttatttgtattgcgtggcatatgataggctgtccttctgcatgtgtctcagtaacaaaacataatacagcttcatctacttgtggctgttctcatatcccataagtcatcactttactgttgctttgcaagaaaacatagaattggcgttattactagcaataattaatacttaacttgctaatacagattttttttgtgcctttctgcatacttaataacttttcagtgccaaattgtagagtagtattttgaaagcagttaaacacaacatgcatggaaccagcaatgttaatagctcaactgatgatcattggtcaagctagtcagattttagaaataggaaataattcttttgtcagaagaccttattttaaacacacacacacacacacacacccgtataattttgttttctagttcttgcctactgaagagtggtaatattgatgtatagagtgactcatttgcttagggtaagatttttggtaaaggttcactaagaaatttagaagcttccttagttgatttaaaatacgggaaaaaatatcactagatttacacagaaatgttgaggaacatctagatttgcaattataatactttaagtattagactacttccatttggaacctttctagttcactttaacaagacaatttgaattgtcagccaggagcatttcattttctaaaataagaagaaatgatactttggtatagaagacctattcatgattttttacataggtttaatgtttttttttgaacagacattcacagtctcttttcagccttatagagctctctggtattactgttctgtcccaatgtatcatcccctcctgcctttattttcttaactagctgagaaccttgtttacctctcaaaatatgttcatctgctttgcatttttgtcttttcattgcatttgtctaaaacccaaccacatcacttcatctttctgacttctgtgtacctggctctgagctactgagcacagctggagaaaataacaaacttgcagactggagccactaagtattcatgctctccaatcttttttttttttttttttattgatcattcttgggtgtttctcacagagggggatttggcagggtcataggacaatagtggagggagggtcagcagataaacaagtgaacaaaggtctctggttttcctatgcagaggaccctgcggccttcctcagtgtttgtgtccctgggtacttgagattagggagtggtgatgactcttaacgagcatgctgccttcaagcatctgtttaacaaagcacatcttgcaccacccttaatccatttaaccctgagtggacacagcacatgtttcagagagcacagggttgggggtagggtcactgatcaacaggatcacaaggcagaaaaatttttcttagtacagaacaaaatgaaaagtctcccgtgtctacctctttctacacagacatggcaaccatccgatttctcaatcctttccccgcctttccccccccctctattccacaaaaccgccattgtcatcatggcccgttctcaatgagctgttgggtacacctcccagacggggtggtggccgggcagaggggctcctcacttcccagtaggggcggccgggcagaggcgcccctcacctcccggacggggcggctggctgtgcggggggctgacccccccacctccctcctggtcggggcggctggcctggcggggggctgacccccccacctcactcccagacggggcgactggccgggcggggggctgactcccccaccaccctcccggacggggcggctggccgggcggggggctgacccccccacctccctcccggacggggcggctggccgggcggggggctgacccccccacctccttcccggacggggcggctggccgggcagaggggctcctcacttccaagtaggtgcggccaggcagaggcgcccctcacctcccagacggggtggctggccgggcggggggctgacccccccacctccctcccggacggggcggctggccgggcagggggctgatccccccacctccctcctggacggggcggctggcctggcgggggctgacccccacttccctcccggatggggtggctgccgggcagagacgctcctcacttcccagatggggtggctgccgggcggaggggctcctcacttctcatatggggcggttgccaggcagagggtctcctcacttctcagacggggcggctgggcagagacgctcctcacctcccagacggggtcgcggccgggtagaggtgctcctcacatcccagacggggcggcggggcagaggcgctccccacatctcagacgatgggcggccgggcagagacgctcctcacttcctagatgggatggcggccgggaagaggcgctcctcatttcctagatgggatggcagccgggcagagacgctcctcactttccagactgggtagccaggcagaggggctcctcacgtcccagacgatgggcggccgggcagagatgctcctcacttcccagacggcgttgcggccgggcagaggctgcaatctcggcactttgggaggccaaggcaggcggctgggaggtggaggttgtagcgagcggagatcacgccactgcactccagcctgggcaccattgagcactgagtgaaccagactccgtctgcaatcccggcacctcgggaggccgaggctggcggatcactcacagttaggagctggagaccagcccggccaacacagcgaaaccccgtctccaccaaaaaaatacgaaaaccagtcaggcgtggtggcgcgcgcctgcaatcgcaggcactcggcaggctgaggcaggagaatcaggcagggaggctgcagtgagccgagatggcagcagtacagtccagcttcggctcggcatcagtgggagaccgtggaaagagagggagagggagaccgtggggagagggaaaggggggagagggagaggggagaagggagaggggagaagggaggggggagagggagagggagagggagagggagagtcatgctctccaatcttaattgaaccctcagcattacccagtaattctcctttgttcctagttttttctcattcctcatacagttacttaaaaacttgtaatctcctatagcccccttactttaccacttcccttctctttttcagtagatgacctcatctgttcactgtgaaacttgaatttaattattattttatttctgggagatgttgaaaaagtttgaaatgagaccacatagacatcaccttaacatttgtgatgcatgttgcttggaggcatacagaaaactaaagtataaattttaggacaaaaacggaaagatatatctttgtggtaattttagtgaggctactatgaggtaattttagtacatcatttttttttccttttttttggagacaggatcttgctctgttgcccaggctggaatgcagtcatggcttactgcagcctcaacttcctgggctcaggtgatcctcccatctcagcctcctaagtagctgttaccacaggtgtgcaccaccatgcctggctatttttttgtatttttattagagatggggtctcaccatgttgccttggctggtctcaaacttggaagctcaagcgatctgtccttcttggcctcccaaagtgctgggattacaggtgtgagccaccacacctagccccatagtgtaattttttttttttttgagatggagtctagctctgttgcccaggctgaaatgcagtggcactcactgcaagctctgcctcccgggttcatgccattcttctgcctcagcctcccgagtagctaggactataggtgcccgccaccactcccggctaattttttgtatttttagtagagacagggtttcaccgtgttagccaggatggtcttgatctcctgaccttgtgattcacccacttcggcctcatctcctgacctcgtgatccgcccgcctcagcctcctgaagtgctgggattacaggcgagagtcaccgcgcccggccccatagtgtaattcttaataccacttttataatggaaccaaattatttaacttcaccccttctgatctgtaagcaatttatttcatttcttttgataaataatgtaaaaagagtgctcactttggcagcacatacactaaaatgggaaccatatagagattagcatggcctctgtactaagaaaaaaataatgtaaaaagagtattagatattcaacaagattctaagataaggggcttcattattttcgtttacatataaaattaaaatgatttacttagttccaaattgaactatttgattctgttatactgccttcagtattatttttaaatcttctatttcccttttttatccaaattctgagcgtttctctttattgtgtcctatcttgatctcttgtctgtaagcttattatcttttttgaagactttctctgactgctttataagactgcagaaaaataatcattgattttcctggcagctcaggctttcttggttttatttggttgaccttttatacacttccaatgtctaaggaaggaactgctggattcggagaatgacttggattctaatccagattagtcaatttattagcatcatgtgcttctgtaaattacttttacctctctgcgtcacttgtattggtaataaataggtatgtctgtgtcatctcagagcatattggctagcaaatgagctaatgttaacagtgctctgtaaactatgaaatatgaatataagtggtagttcttttggggggacattttgtacatccacagatttcttttctttttctttttcttttttttttgagatggaatcttgctctgtcacccagactggagtacaatggcacaatcttggctcactgcaacctccgcctcctgagttctagtgattctcctgcctcaacctcccgagtagcaggattacaggcgccagctattatgcccagctaatttttgtatttttagtagagacagggttttgccatgttggccaggctggacttgaactcctgacctcaggtgatctgcctgcctcggcctcccaaagtgctggtattacaggtgtgagccaccgtgctcagcccaagttggttcattttagttgtgactgttattgagctcagatagcttgataaatctgtcttcactatagcagatctgggtcaggacacattctcctgggactgtgttggagacaaactgccaaatttaatttgtttgaatactcctcaccattgagttaatttggtttcagcttgatataatcatttacaagatctgggttctgcttcccatgccacctattttggattttatgtatttactttgttcattccacacagatggtttatcttgtttcattcttcttaatttaatgctcagtgttcacttaagatttttttttttttttttttgagacggaatttcgctcttgttgcccaggctggagtgcaatggcgcgatctcagcttaccacaacctctgcctcccgagttcaagcgattctcctacctcagccttccgagtagctgggattacaagtatgcactaccatgcccagctaattttatattttcactagagatgggatttctccgtaatggtcatgctggtctcgaactcctggcctcaggtgacctgcccgccttggcctccgaaagtgctgggattacaggcatgagccaccgctcccggactcacttcagttttaaaagagccacttgtggattggatttatccttacaaagttgagtgagatatatattgcttctagtgcattcttgcttttgcatctaggaagagtatggattttgcagtccatcctagattgccctgtcaagtatttagctgaaactttggagcaagttacttttttgagatcgatccatccatccatccatccacccacccacccacccatccacctacacgcccagccaccgtacccagctacccacctacccggccacccacctacccacccacccatacatccacccatctacccacttatcatcccagaggcactgtagtgctgccgctccttgcttttctgtttttccttgacagatacgttgaggtataatttacataacataaaattctcccattttaagtgtacaattcagtgatgtttagttaatttggaaaactatgtagccaacactacctaatttcagaatacttctatcaccccccaaagaagaaaatctgtgcccatttgtagtcatttctcattttctaatcttagggtactactaatctattttctgtctctatagatatgcttttttgggacatttcataaaattggaatcatttatatgctcttatgtttggcttttatttagcaatgtttttgaggataatccatgttaaggcatgtttcaatactttcttgtattttgaagagttcttcattttattaatttgtttacttcatggacatttgagtttcaaacatttggctgttgtgaataatgctgtgaacattcatttacaagtcttggtgtagacatatgtttcattcctctttggcagatacctaggwttggaattgctcggtcatgtagtaaatttatgtttaatattttaagaaaccgctaaattgttttccagaatggttgtactgttttgccccctccctgcctgccttttttttatttgaggtagagccctgctctgtcacccaggatggagtgcagtggcgtgatcttggctcaccgcaacctccgtctcccaggttcaagtgattctcttgcatcagcctcccgagtagctgggattacaggccccccccaccacacttggccaatttttttgtattcgtagtagaaatggggttttgccatgttggccaggctggtctcaaactccggacctcatgtgatccacccaccttggcctcccaaagtgctgggattacaggcatgagccaccacgcctggccacctctatttatctgaatatttaagataactatttgattagaattcagtatcacatgacattagctgttaccatagaagaagaatcatagatagcatcacaggattctattccagctagtaaaaaataataaaatacaagtatgtcacatgcaaaaatgtaatgtttaatgattaaaacctagatttctaccaggtgagcatgattgcttgaaaatttcacttaaagacactccttagaacagtgtaaaaatgtattattaattattaaaaaaacttttaattatggaaaatttcatacaatacagatgaagacaaaatagtttattgcctcctcacataatttttacccagcttcaaaattcactcattccagttttgtttcatctatactcatacctagactcttctccccaatatcgtaaagataaatatattcccattatcacatctaaagccttccataataattctttactaagaattggttacttttgattagtgagatacagaaataaaaatttcaatttctttttacctttgtttaaaaatggaaatattttggagtggttttttacagtaaatacacgagtctgtgtgtgtatatgttttaaagaaatctctttagggattttaggtcctgtgctttcctccccttctatcagaaaaagattataacaaaattttgagggtgtggaggctgagaggatgttttcatttggtccatttacatgagaataaatagctttagaacatgggatgaggtccaatttgaattcattttattactgctttagaggaattatttctatcatttgcattagaaatccaattgctttaaaattaaattctaaattttactttccatacgtgattccttgtttggattatggatctcactggatagtctgagatccatcatctcttttctgtgttgttttctgaaaactacaatttttttccgtattaattaatttattgagacagagtttcactcttgttgcccaggctggagtgcaatggcacgatctccgctcactgcaccctccacctcctgggtgcaagtgattctcctgcctcagcctcccacgtagctgagactacaggtgcctgtcaccacactcggttaatttttgtatttttagtagaaataggattctgccatgttggccaggctggtctcaaactcctggtctcaagtgatccacctgcctcgacctcccaaagtgctgggattacaagcatgagccaccacacccgacctccatattatttagaattgatttctcattagtaacaaaatgcttttaacaccaaaatcaataactgtttatagtaaatcttggctttgattttgttctatgtctgatctatataggcagctctgcttttttgagcctcagtccatatataaaatagggatattataatatcataagataatgagaaggttaagtgtgtgtagatttcttttggtggtgggaataggtgttgaggcagggttaacaataccttgtggttttatgcrgtatgcatttacaaagaagagcaaagagaaatagaacagacaaaaacgattaagtgttgctgtgtacacgttgctgttataaaccatttatgtaaattcccatttgatccctgtgacaatgatggtggtatatgttgttgttatcattccaaaccacaattcgtaactgtgaagtaatttacagaagatatgtattgttatcctcacttcatatatgaggaaactaggcttggaaaaatatagtaatttgcagaaagtcttacaattagttagtgcagctttaattggaaagtttatgcttctttttaccaccatggtatactttccactgtgggcagttgtcttatcagggagggaatgcagttgtttttgctctccttttttaaagcactgaaatgttagaggttactttgataattggattggttagctaattagaatatagagttttttgtttgtttctttttaaagagacagggtctcactttagttgtcccggctgaagtgcattggtgccatcatggctcactgcaccttcagcctcctggcctgaagagctcctcctgcctcagcttcccaaagtgttggcattacaagcatgagccagcgtgcctggcaggaatgtagttctttttttctttttttttcttttttgagatggagttttgctctgtcgcccaggctggagtgcagtggcgtgatctcggctcactgcaaccgctgcctgtagggttcaaataattctactgtctcagcctcccgagtagctggcactgcaggcacccgccaccatgccyggctaatttttgtatttttttttagtagaggtggggtttcactatatgttagtcaggctggttttgaacttctgacctcaggtgatccacccatctcagcctcccaaagtggtgggattacaggtgtgagccactgtgcccgccatgacttaagtgagatgaaccatgaaaagtgaaccatgaaaattcaatttatgtttttaatttttattattattttttgagatgaagtctctctgtgtcgcccacactggagtgcagtggcgccatcgtggctcattgcaatctccacctcccaggttcaagcaattctcttgcttcagcctgctgagtagctgggactactggcatgcaccactacactggctaattttttttatttttagtagaaacagcgttttgccacgttggccaggctggtctcgaactcctcacctcaggtgatctgcctgccttggcctcccaaagtggtgggattacaggcatgagccactgtgcctggccatcatttcagtttatatatatgttttatacatactttaaaaaaaaaaaactacagtagttattgataatgtctggtaggtttttcccatttatttgccttttgtaaaaacgtttttcacaattcccttttattgtgaaataaaacacataaagttaattagatataaatatactgcttaaaaatttttttcttttttgaaatggagtcttgttctgtcaccaggctggagtgcagtggtgtgatctcggctcactgcaacctctgcctcccgggttcaagaaattctcctgcctcagcctcctaagtagttggcactacaggtgtgtaccaccatgcctggctaattttttgtatttttagtagagacgtggtttcactgtgttagccagggtgatctccatgtcctgacctcatgatccgcctgccttggcctcccaaagtgttgggataataggcgtgagccactgcaccgggcctaaataattattataaacacaaactagccctggtgcagtggctcatacctgtcatcccaacactttgggaggctgtggcgaaaggattacttgagccctggagtttgagactagcttgagtaacatagcaagaccctgtctctatttaaattaaaaaaaaaaaaaaaaagttaaaaaaccccacatacacaaattttatctgggtcaagaaccagaatgtcagcaccaccgaactctcttactgtgcgcccctttgtatttcatacggtaccctccctttcctctaaaagaacaattatcttgacttttattttatatatatatatatttatatatatatatatttaatatatatatttgtttttttttttttttgagatggggcttgctcctttgcccaggctggagtgcagtggcataatcatgactcactgcagccttgacctcccaggttcaagtgatcttgccatctcagtctcccaggtagctgagaatataggcatgtgccaccatgcccagctaatttattttatttatttatttatttttatttttgagacggagtctcgctgtgtcacccaggctggagtgcagtggcacgatcttggctcactgcaagctccgcctcctgggttcatgccattctcctgcctcagcctcccaagtagctgggactacaggcgcccgccaccacgcccggctaattttttgtatttttagtagagacggggtttcatcatgttaggcaggatggtcttgatctcctgacctcgtgatccacctgcctcggcctcccaaagcgctgggattacaggcgtgagccaccacgcccggcctaattttcttatttttcctagagatgagttctcggtacgttgccaggattctcagactcctaggtttaaacgatcctcctgccttggtgacccaaagtgctgagattacaagtgtgagctactgtgcttggccagttctcttgttcttaaaaaatattttcacaccctaagtctttattgctaaatactgtggtttgacgttctgtttttgagcttcacatagatgaaattacacttttttggggggtagggccttgctttgttgctcagacgggagtgcaggctctgtttctcaggctggagtgcggtgatgcaatcatggctctgggcagcctccacctcctgggttcaagtggttcttcctgagcatgagccaccttgccctgctaattttcaattttttgttctttttttgttttttttgagagagagtcttgctctgttgcccaggctggagtgcaacggcacgatcttggctcactgcaacctctgcctcctgggttccagtgattctccctgcctcaggcacccgagtagctgggattacaggtgcctgccaccatgcccagctaatttttgtatttttaatagagacgaggtttcttcatgttggctagggcggtcttaaatttctgacctcaggtaatctgcccattgtggcctcccaaagcgctgggattaaaggcttgagccacagcgcccagccaagttataaattttttrtagagacaggatcttgctatattgcccaggctggtctctaactcctggcctcaagtgattctcctgcctcagtctcctaaagtgttgggattacaaatgctagttaccgtgcttccccacagtgtatttttttttttttttgaggtggagtttcgctctgtttcccaggctagagtgcagtggcatgatctcggctcagtgcaacttccacctcccggattcaagcgattcttctgcctcarcctcccgagtagctgggattacaggtatgcaccaccacgcccggctaattgttgcatttttagtagagtcgggattttaccacgttggttagactggtcttgaactcctgacctcaagtgattgtcccgccttggcctcccaaagtgctgggattacaggagtgagccaccatgcttggctgcacactattttttgtgtcttgcttccttggctcagcattgtttgtgagattcatccatgttgtgggacccgtagttcatttttaggaactatatacttgtgtgattacgccacatttatccattctattcttgatggatattacattatttttagtttgggaccattgtaagtattactgctgagaacactcttgtggttttgttttgagacggagttttgcttttgttgccctgcctggagtgcagtggcgcaatcttggctcactgcaacctctgcctcccgggttccaagtggttctcctgcctcagcctcctgagtagctgggatgacaggcacccgccactgtgcctggctaatttttgtatttttcgtagagatgaagtttcgccatgttggccaggctggtctcaaactcctgacctcaggtgatccacctgcctcagcctcccagagtgctgggattacaggcatgagccaccgtgcccggcctcatatgtgttttttaatgcacatgtgaagccatttctgttggatatatatctaagatcgaaatctcttggtcataaggtatgttgttagtagaaaaggccaaattgttttccagagtggttttactgaacttttcttccaacagcagcatgtgagaattcccttttatattctcctgagtgcacattattgccaatcttttaaaattgtagccatttttgatggctttaatttgcactatctctggctactaatgagtttgagcatctcagtgctgaccattttgatgtcctattctgtgaagtgattgttctcatcacttatctatttttatttttaattaatgcatattttgattcataggagctttttatatattcttaatataaggcatttgtcagtttaagtaggttacttatgtcttctcccattctgtagtttgcctgtggtgcctttttatatggtatcttttggtgcagaaaagttctctgtaggctgggtgcggtggctcacacctgtaatcccagcacttttggaggccgaggcagttggatcatgaggtcaggagatcgagaccatcctggctaatgtgatgaaattctgtctctactaaaatacaaaaaattagctgggtgtggtggcgtgcgcctgtaatcccagttactcaggaggctgaggcaggggaatcgcttgaattgggtaggcagaggttgcagtgagccgagatcatgccactgcattccagcctggcgacagagcaagagtccatctcaaaaacaaacaaacaaaaaaagttatctgaataggtacatacgtcaggtttttttccgttaaacagtgcttttttgtgttctgttttaaaattttttttcttccttggaggtaatggagttattcacatcatctataaattttatttacttctctcatttagatatgtaatatgtaattcacctggaatagatttttgtgtgtgtgtagtttttaggtcaagttttatttttttttcaaatggatatccagttgttccagcaccatttatgaataaacaaacaaaaaaacttttgccatcactctggagtgttgtgttttcataagtcatgtccatagatgcatgctatgtgtctgggcctttatcctgttacattagtctgtctagccttgtaccaatatcactgcctcatttattgagcttaataaaataaatctaaatatcctgtagaataagtatcctttttttttttccttgaaacatgctctcgctctgtttcccaggctggcgtgcagtagcgtgataacagtgtactgtagccttgacctcctgggcttatacgatcctcctgtctcagcctcccgagtagctgggaccgtaggtgtgagccaccatgcctggctaatttttaaaattatttgtagagacgagagctccctatgttactcaggctgcccagcttgttctttttaaagatttgctagtctgttcttttgcatttccatgtacattttagaatcactgcattaatttctccccctaagtaaacagagtaaccaacttaacctccaaccaaaccacagaatcttttggacttttggttgggattatactgttgccttagatcaattttggaatgggcagaattgacatcctttatggttttctagttagaagtcttgcatatcttttgttagatttattcttagatacttgattttcttatgccatagtaagtatatatatatatatwtwtttttctttttgtaagtgggatttcagaaattgtcatactttaaccaggagttttatagcaaaggtttttgtgaaaaattatattctataataggtttaagtcattgtctaaagcatctccagtatttataaagccaaagggagtccaggatggtacacaaataatgcttctgatggtgtcattttcctttttgttttcaagcaggactgggtaaagtatcatatattgaaatacaaacacaataacatgaccatttcacttcattttttttttggtagggggactttggcatttagtttcatttatggttttaatctattcatgaaagtagttggttaaataaaatggtttatttactatttttaagttttagatttttcttcttggcaaactttattttgggttaggtagtttcttcgctcgatggttggaggggggaggggctataattaaaccaacatcgaagtgaaatacagtatgcacattgcaatcttgtttcagtggaagtgaagtaaaaagacttgaaattctggtactatggaaaagaagcaaagtaccgggtaggcttaatactgcatagtgttgtgtgtgagagagacagaaaaatgcttatttctgaatacttgaaccagagctttggaattggagcactgtaatagagaggaagaaaaggatcagaatacagggaaaatgaaatagcatggagaagagaatgataaaacaaaattttaacagcttagtttctggaaaaccattataaaatcagactgtattactgtgtgaaagttgataagcatttttataaaaacttaatgttggaattgtgtttgggtgaacttttctgggtcttaaggacaggttatccagaaaggaaggaaaaagaacaaaaaccccagcatgtttccaggggtatatgtagccccccaaaaatgctgttgtattgttttatgaataaagtctgatacttatctggagttcccaatccctcctccccaccttttaaaaatttattttattttattttttgagatggggtctcactctgttgcccaggctggagtgcagtgttgcaattttggctgactgaaacctctgcctcctgggttcaagcgattctcatgccttagccttcccagtagctgggattacaggtgtgtgccaccatgcccagctaatttttgtatttttagtggagatgaggtttcaccatgttggccaggctggtctccaactcttgacttcaggtgatccacacactttggcctcccaaagtgctgggattacaggcatgagctaccttgtccggccccccaccttctttctttagagagagggtcttgttctgttgcccaggctggaatgaggtggcttggttataacttactgtagccttgaactcctgggatcaagtgatcttcctacctcagtctccctagtagccgggacaacgggtgtatgccaccatgcctagctaattttattttatttttttagagatgggtctcatgatgttgcccaggctggtcttgaactcctgacctcaagcagtcctcctgcctcgacctcccaaattgctgtgattataggagtgagctgggccccttcattgattagagaaaaattcaccaaaactcagaaataactggagttcttctatgtaaatgatatggtaacctgctttcctatataataaatttgtcttcatttaagttagttataaattaggcagcctgggcaacataatgagaccctgtctttttttgttttttttgagacagagtctcgctctgtcgcccaggctggagtgcagtggcatgatctcggctcacttcagcctccacctctcgggttcatgtgaatctcctgcctcagcctcctgagtagctgggactacaggcatgcgccagcacatccagctaattcttttatttttagcagagacagggtttcaccatgttggtcaggctggtcttgaacccctgacctcatgtgatccacccatctcagcctcccaaagtggtgggattacagatgtgaaccaccgcacctggctgagaccctgtctttaaaaaaaaaaaaaaaaaaaaaaaaaagccagctgcagtggtacatgcctgtggtccaactacttgggaggctgaggtgggagggttgattcagcctcgaaggttgaggctgcagtgagctgtgattgtgccactgtaccccaacttaaataattgtcaggatttactacatgttacaaaacttccatgacttttaactataaataacttgttgacgaatgggatgggaggggtgaaactaagcacctaacaattttaagtagctatatagtagtaataccaacatagtaagcctagaaactgtttatttcatattagtgtttgatacttcatactggctttccagtactgagtctttttttattgagatgaaattcacataacatatatttaaccattttgaagtataccatttagtgtcatttagtgcaattgtgttgttgtgcaatcatctctagtttcaaaatgttttcattataccaaaagagcatctcatatcygtaagtaataacttcctatttccttgacaccctcccccccagtctcctggcaatcactaatatgctttctatctctatggatttgcttatttattatatttcttataaataaaattatataatatttggcttcttttacttagtgtcatgttttcaatgtttatcgaagttatagcatatattagtacttaatttttatggctaaataacattcaattgtatgtatataccacatttatttcttagttcatttgttgatgcaccttttggctattatgaataatgctgctattaacatttatgtacaaattgctgtgtggatatatattttaatttttcttgggtgtatacctagaagtggaatttctggatcatgtggtaattctgtttatctttttgagaaatgccaaattgttctcgacagtggctggcatcattttacatttctactagcaatgtatgagagttcctattccttcacatccttgctaacacttgctgttttcctttttttwaaaaaaatatagccgcctgctattgtttgaatatgatttgtttgtaccaccaaaactcatgttgaaatttgatccccagtgtggtgatattgggaggtgggacctattgggaggtatttgggttatgagggcagatccttcatgaattgctggtgctgttctcactgtagtgagtgaattcttgctttctagagactgtattaattcttgagggaatggattaattccggcaagagtgtgttgttgtaaagccgcgacatccctcacactttcccctctttgcatgtgtccacttccccattgaccttttctgccatgttgtaaagtagcacaaaagctgtcgccagaagctagggccatgcccttgaacccttgaacttctcaggctgcagaaccatgaacgaaataaacttcttttcattataaattaccagtcaggtattctgttataagcaacacaaaatggactaataccctattctaaagtttgtaaagtagtatctttttgtggttttgacttgcattcttttaatgaccgatgaagttgaacattttttcatgtgcttgttggccattcgtttatcttctttggaaaaatgtcttttcaagtcctttgcccatttgtaaattggattgtttgtcttttgttgttgagttgtaagagttctttatgtagtctggatactggacccgtaagtattttctctcattttgtgagttgtcttttaactttcttgataatgtcctttgatgcacaaagcttttaagtttgacaaggtccagtttatataatttttctttaggtacatgggcttttggtgtcatgtaagaaaccatttccaaattcagtggagtaggttacttctatgttttctcttaagagtttataagagcttataattttagcctttatatttaggccactgatccattttgatttaatttttagtatggcgtgaggtaagggtccaacttcattcttttgcttgtgggtatcacattatcccaataccatttgttgaagagactatttcttccccgttgaattgtcgtgtacccttgtcaaaaatcagttgaccatagagtgtatttttgaactctcattctattccattggtctatatttctgtccttatgcgaataccacactgttttgactcccttggctttgtagtaaatttgaaattggaaagttttagtctcaaattttattgtgctttttcaatattrttttgactgtttgggaccccttgcaattctgtatgagtttgaggattggactttccatttttgcaaaaaagtccattggaattttgataggggttgcaccgaatctgtacgttgttttggagagtattgccattttaacaatattaaatgatctaattggggaatgttagatgtctttccatttaattaagtcttaatttcttttaacagtgttttatagttctctgcaaatctttcaccttcttggttaaatttgtttttagatattttaatttttggatgttatcataaatttgttttctttcctttttggattattatgtgtaggaacacaactgatttatgtatattgatcttataccctgcaactttgctcaatttttttatcagtttagtgggaattttttgttgattctttggaatattttatatataggattgtgtcatgtgcgactagagatagttacacttcatcctttccaatatgaatgcctttaaattcttttcttgcctggctagcagtgttgaaagtgggcttcttgtcttatttctgatgttagagggacagcttttagttattcaccattgagtatgatgttaactgtaggcttttcataaatgcatcttatcacattaagctcccttttattgctggtttcctgagttttttgtttgtttgtttatttctgagacagggtctcactctgtcttccagactggagtgcagtggcatgatcatggcttatggtagccttgatctcctgtgcccaagtgatcctcccaccttggcctctgtctgggcaagacaggctgttgttgaactcctgggctcaagtgatcctcccaccttggcctctcggtatgctgggattataggcatgagccattgtgtctggccatttgtttgttttttagcctgataatatgttgtattagttcattctcacactgctaataaagacaaacctgagactgggtaatttataaaggaaagaagtttaattgactcaattccaaatggctggggatgctttagaatcatggcagaagacaaaggaggagtaaagtcacatctgacatggcaataggcaaagagagcatgtgcaggaaagctcttctttataaaaccatcagatctcatgagacttatattcattatcacgagaacagcatgggaaagacccacccccatgattcaattacctcccatctttccttcctacaatacatgggaattatgggagctacaatacaatacgtgggaattatgggagctacaattcaggatctgggtggggacacagcaaaacaatatcatacgttgaacttcgttgtgtgtgtgtgtgtgtgtgtgtgtgtgtgtgtgtgtgtgtgtgtttgatgatcatgtgatatttttccttctgttaatatcatgtattacattgattgattttcttatgataaaccatccttcattcttgggctaaatcttacttgttcatggtgtatagctgggattataggcgcatgccaccacgtgtggctaattttttgtattttttagtagagatggggtttcactgtgttggccaggctggtctcgaactcctgaccttgtgatccgcctgccttggcctcccaaagtgctgggattacaggcgtgagccactgcgcctggccaggttttttaattttcttaatgatcttctgtctagatgttttagccattattgaaagtgaagttttattattgttatattgaagtttattatatattgaagtttattgttaggtattattgttgaactatttctacttttagttctctcagtgtttgcacacaatttcggggctccattgttttgtgtgtaattgttatatcttcttaatgaattaacccttttatcactatgcattcttctttatctttttttttttttttttttttttttgagacagggactcactcttcacccaggctggagtgcagtgacatgatctcagctcactgcaaccccccaggctcaagcgattctctcacctcagctttctgagtagttgggactacagatgcatgccaccacgcctggctaattttctgtatttttggtagagacggagttttgttatgtttcccaggttggtctggaacccctgagctcaagtgatctgcctgcctgggcctcccaaagtgctgggattacaggcatgagccactactcccggccattctttgtcttttgtaacaacttttgatttataatctgctttgtctactatcagttttgttgcccttcctctcttttggttactgtttgcatgatataaataattccatccttttacttttaagttatatgtgtctttgaggctaaagtgaatctcttttaactagcatatagttgcatctttaaaaaaatcatgcctgggctcgttggctcacgcctgtaatcccagtactttgggaggcccaggcaggcagatcannnnnnnnnnnnnnnnnnnnnnnnnnnnnnnnnnnnnnnnnnnnnnnnnnnnnnnnnnnnnnnnnnnnnnnnnnnnnnnnnnnnnnnnnnnnnnnnnnnnnnnnnnnnnnnnnnnnnnnnnnnnnnnnnnnnnnnnnnnnnnnnnnnnnnnnnnnnnnnnnnnnnnnnnnnnnnnnnnnnnnnnnnnnnnnnnnnnnnnnnnnnnnnnnnnnnnnnnnnnnnnnnnnnnnnnnnnnnnnnnnnnnnnnnnnnnnnnnnnnntcactgcaacctccgcctcccaggttcaagcgattctcctgcttcagcctccctgagtagctgggactataggtgtgtgccaccatgcctggctaattattttgtatttttagtagagaccaggtttcaccatgttggccaggctggtcttgaactcctgccctcaggtgatccacctgcttcagcctcccaaagtgctgggattccaggtataagccactgagcccagccccagtctacgttttttaattgtcgattttaagctgtttacatttaaagtaattgctgataaggaagaactcttgccactttgctatttgtgtgtggtcactgaagcctatgttctgttatcttcgtggtcagctagtgacctgtcagatccttgagtgtctgaatccagtaaagaaaaaaagttttctgtgttttatgtttactgagcaatgccgctcaataaatcactttagctcaatgggattgaaacagtggtcagcctccatgcaggtcccttagtgatccaccaggcagataaaaacacacaaccccaatttttgaacaaggcacttattgtccaccctgacatcagcaagctgaatcagaaaggtgggctgctgtcctgataagtgcttgcctcctagctggtgaatgggggatggtagctgctacatggaatatagaaattcaccagtgttaaccaatgactttcttcatcctgcccactcatggacactataagtgtttgactagacttttagagttctggaatagttgatttcttgtagttcttgccagctttataattgtttcagtggaagaactttttcttggagcttcttaacttggccatcttccatgatgtcacctcagcctttactttttttttttttttttttttgagatggagtcttcctctgttgccaggctggagtgcagtggcgcaatatcagctcactgcaacctgtgcctcccgggttcaaatgattctcctgcctcagcctcctgagtagctgggattacaggtgtgcgccaccatgcccagctaatttttgtatttttagtagagacggggtttcaccatgttggccaagatggtcttgatctcctgacctcgtgatctgcccgcctcggcctctcatagtgctgggattannnnnnnnnnnnnnnnnnnnnnnnnnnnnnnnnnnnnnnnnnnnnnnnnnnnnnnnnnnnnnnnnnnnnnnnnnnnnnnnnnnnnnnnnnnnnnnnnnnnnnnnnnnnnnnnnnnnnnnnnnnnnnnnnnnnnnnnnnnnnnnnnnnnnnnnnnnnnnnnnnnnnnnnnnnnnnnnnnnnnnnnnnnnnnnnnnnnnnnnnnnnnnnnnnnnnnnnnnnnnnnnnnnnnnnnnnnnnnnnnnnnnnnnnnnnnnnnnnnnnnnnnnngcagggcatggtggctcactcctgtaattccagcactttgggaggccagggtgggtggatcacctcaggtcaggagttcgagactagcctggccgacatggtgaaaacccatctctactaaaaataaaaaattagctgggtgttgtggcgggcacctgtaatcccagctacttgggagcctgaggcaggtgaatcacttgaacccgggaggcggaggttgcggtgagccgagatctcgccattgcactccagcctgggtaacagagcaagactccatctcaaaagaagaaaaaattgtaagtgattttataactgaacttggtaagtttatttgtggatttaacttagtaatttgttaatttaatattgaccaatatttattggaaataattttataagtagtgatttttacttaaaaaataaatgtaaaagcactttgggaggatgaggcaagaggagttcaagaccagcctgggctgaacatagtgagatcatgtctttmcacacacacattctcattctctctgtctctctgtctctctgtctctctgtctctctctctctctctctctctctctctctctctctttcggcatggtggtgcatgcctgtagtcctagctacttgggaggctgtggcaggaggatcacttgagcttgggagttggagactgctgtgagcttacctcaaaaaaaaaaaagagtaaaagaatacctattaagtttgacttagcagttaaaatctaatttatcttgcacagtaaaactctgggggaaaagaagtagaagtagctctcgataatttttttctctagtctgtatcctgttgaagctcttgataattttgtgataacaattttcatttgaagtttcagtgcctataaagaaggagtttgtataatgattctctcagaagcattaactgccttttattgagtgattgctgtattccagggatactgatttattagatgatctattttaatcctcagagaattcctgtaagataggtgttatcttgattttttcagttgagaaaattgatgctcagagagattcaacatatttacatccggggggcataccggctgttaagtggcagaggtaggaagcgagttcagatctttcttattttttattttactgagctgcttttgattataggatacaataacttctaggatttgtctgaaaatgtgtagggtaagcactactttatagagactattttccttttaggattttatacacacacacacacgaggatgggaatggtggtggtggtgtgtcagtttgaggttaagttttaatcaagaagcaaaaaggtcaaggataaaattcagtttttacaaaaataggagtattttaatatgtttttcctgataagttggatattaaaaaataaggacaatattcagagttttctgaagatgcactaaatcaaggtagggattgtcatgtcaacttaaaatagttgagagcaggctgggtgcagtggctcactttgggaggccaagcactttgggaggccgaggcgggtggatcacctgaggtcaagagtttgagaccagcctggccaacgtggtgaaatcctgtctctactaaaaatacaaaaattagccaagtgtggtggcatgtgcccgttgttccagctactcgggaggctgaggcaggagaatcacttgaacccgggaggtcgaggttgcattgagccaagatcatgccgctgcactccagcctgggtgacagagtgagactccatctcaaaaaaaaaaaaaaaaaaaaaagaaaaaaaatagagcacacacacatttatgtttttttaagttgttcttgagagaccgtgtgttaatttctgctagtaatcccattataaatgaacaggatcgttgattcatattttcagtaactggaagggacttttgaaataatttagttctgtggctagctctatggtctattatgcctgtaatcccagcactttgggaggccaaggtgggtggatcacctgtggtcaggagttcgagaccagcctggccaacatggtgaaacccgtctctactaaaaatacaaaaaattggccgggcgtggtagcgggcacctgtaatcccagctgcttgggaggctgaggcaggagaattgcttgaatctgggaggtggaggttgcggtgagcagagatcacaccattgtactccagcctgggcaacaagagcgaaattctgtctcaaataaaaaaaaaaaaaagaagaagtaatttagttgtatatgttcatttaacagatgagaaaattgaatgagtttaaaagattaaatacttttagttattcagcagaccgagattcgaaacctagtttagtgatcctttatcttcaagtctttcttagttctttattgctcaaaattaggaatgaggatagcatgagcatccagaaataattttttctgaagaccatattctaggcaaagcatcctagataggagaaaaagaaacaatttgggagggtannnnnnnnnnnnnnnnnnnnnnnnnnnnnnnnnnnnnnnnnnnnnnnnnnnnnnnnnnnnnnnnnnnnnnnnnnnnnnnnnnnnnnnnnnnnnnnnnnnnnnnnnaataaatggtttctcttcaacacagggcaattttagatattttaaagtaaacttacaggcaagaggaagaacagagggctgtgaatagtaataggcatagcatttaaagcagatgtacatgtgatatggctccttgggagggttctttgtatttcctcggatgtatcaaacctgcttgctcttaatttcttaccgcttcatctgaaagtatttttctttcagaaaaacctgggatgtggaagtgatcgttttgtatattttaatttagtggttgtcatcaacctagtgatttggattatatattacattagtatcatctaggattttttttttctgaaaggatacacaaaggatgtgtcctgatagcttagctcccacttcgaagtgagagcataaccatatttggttttccattcctgagttacttcacttagaacaatggcctctacctccatccaagtagctgtgaaagacatgtctcaccctggtaatccagaatgtggtgaaaccccatctaccataaaaaaaaaaaaaataaattagacgtggtggcgcttagtcccagctacttgtaaatctgaggtgggaggatcgtctgagctcgggaggcagaggttgcagtgagctgtgattatgccattgcattccagcctgggtgacagagcaagaccctgtctttaaaaaaagaaaagaaaagaaaatgcagttgactaattctagagatagtaataatatttgatggtgtggataaacagaccagaaattcttaagtatttgaataaagcagtggtctcagcaaagacattttcttcctataaaattaagtaggctattgagacattaaaggaagtcattctttcttttttatttcaatagttttgggagtacaggtgatttttcgttacatggataaattctttggtggtgatttctgagattttactgtacctgtcacccaagcagtgtacactgtgcccaatatgtaggcttttaaccctcacacccttccaaaccttcctccactgcccaaatccccaaagttcattatatcattcttacgcctttatgtcctcatagcttagctcccacttcgaagtgagagcataaccatatttggttttccattccttagttacttcacttagaacaatggcctctacctccatccaagtagctgtgaaagacattatttcattcctttttgtggctgaggagtattttatggtgtatatatactatattttctttatttcatccactcattggttgatgggcacttaggttggattcatatctttgcaattgtgaattgtgctgctatatagatgcatgtggatgtgtctttttcatataatgacttttcctttgcttagatacccagcaagatacccatacaaacggaatcatttgatatgtaacctttttagcctggcttctttacctttacccagcagtgggattgttggatcaaatggtagttctacttttgtttaagtaatctccataccgttttccgtagtggttgtagtagtttacattcctaccagcagtgtaaaaatgttgcctttttaccacatccatgctcctctgttggttttttgactttttaattatgactattcttgcaggagtaaggtggtatctcattgtggttttaatttgcatttccctgatgattagtgatgttgagcattttttcatgcttgttagctgtatatcttcttttgagaaatgtctcttcatgtcttttgcccactttttgatgggattgtttttttcttgctgatttgagttccttgtagattcaggatactagtcctttgtcagacacacagtttgtgaatattttctcccattctgtaggttgcctgtttgctgattattttgctgtgcagaagctttttagtttaattaggtcccatttatttttatttttgttgcatttgcttttgaggtcttagtcatgaattctttgcctaagccaatgtctagaagagtttttctgatattgtagaatttttgtggtttcaggtcttagattttctttctttcttttttttttcccaagacgtaatcttgctctgtctatatagttataatgtgtatttcataagaaaacagtaaaatatggctgtggacatctgacttctgctaaatgcacctgatgtttatttattgaaacatttgtggtgcagtcccatttctataaatgtatcttctaatccctatattaacacaagatacacttcctgggaatgtaatcaggctgaagatgttttaatctctttatattctgttcctcttagttggataattccagatttcaaaatgcctgggttgtgtctaattccagggagctgaagtaaacggagttttccagtgagaaaaagtacattgcattatagcagaagatggtagtcagtatttgtgagagaatgctttattttctactttaggctattgacattagaaataattggaattgttaaaaatatgatgtctggtgccctcccaagattttctgaatcaaaatcaactgtgaccacacattagaatcatctagggagttaaaaaaaatgctggtggctggatctcatccccagagaacctgatttaattatttagagggtaaagatagtgattcttaaactgttttagaatcacctggaagatcccaaactgagtgtgattcagttggtcgggtgggaactgagattttgcatttcgaacaacttgcagttgatgcagatgcttttagtttcacactttgagaactgtaccctgactgggattgggaactacctgcttaatttggaacatatgcaatattaagtgagaaaactaagttcataagcaacatagaaagtgtaatagatttcaaggtaaaaaatgttaagtgtggaaaattttaatttataaagtggaaaggctttattcattgtaagtcagaaataaactttaaaatttcatttgcaatgaaaagtcccaagcatcataaatactaacttagcaaaaagaatatcgccacagatgttaaagacaacaaaygttcctccaccctgagtataatttacatacggtaaaattcaaaactttttttagtgttcagtttcatgagtttcatgtgcatccgttgtgcaaccatcaacagaatcaaaatatagaagagttttaacatttccctcataccctttttgatcattcctttcatgaacctcaggtcctagcaacagtgacctgttttcttattcgtggttctgcttttctcagaatgtcatacatacggaatcatttgatatgtaacctttttagcctggcttcttttattaagcacagtgcatttgagattcatacatgttgtttgtttattaatacttcattccttttattaaaaagaagtttaagatttacagcaaaattgagcagtaagtatagagggttcacaaaaaacccctcttcactcccccaatatgcacaacctcccccactgtcagcagattggtacatttgttatagttgatgaacctacactgactcattatcactcaaagttcatagtttacattagtatttactcttggtggtgtacattctatgggttttgtcaaatatagcatgcacccaccattatagaatcatacactgttgtctgactgccctaaaaatcctccatgctcttatgaaaatcatttatacaaattgaggttaattgtcatacctagctaaactggagtcaaggggccaaggaggaaaaagcatttatggtacaaagcacatgcttccagggattgtctcacaagcccagccaccaaaatgaccttgtataaacttaagcccagttttacctagtagctgctaaaaccacctgccttgactctaaggcaacttttacctactgctgtcacttaccagttacagcttggtggttccagaaaaactttgctaatgtcaacaagctttttatcaaagcaattaatgcaacatttctctttcctaataaaaccccaatcttttgtttgttctttagacataccaaagattatcctgctctgtgtgtatgtcctgaattgcaattctgtttttatatattcccaaataaaatgtcttgtttagagatgtgtttctgtgctttatttgcttttgacatacctggtgtcagaagtgggatccaaggtgagctcacctggaggggtttagtggcctccccatccccccgccccagaactatgtactctttgatcctcctgcttctgtgtgttgctttttttcccccacttggtaagtctctttcggattgaactcccatttcttgtggtttgaactttccagttttattttggatttaatttttgagggatctttttcctcttgtttatgagggattttccccttcctgtgtatggggactttcaccctcctgttaaagaaagttttgtctttttttttttctagtgagtactttactctttttgcacttggtttttatttcgacttttgtgtgtttgatgttaaaccaagtcacctagatttatttacaaaatgggctttcagggttcaaaggcatgcgaaagtaactcccccattgaggactccagctggttatrtgcttaaacattacggtctgtctctctcttttttttttttttgagacagagtctcactctgttgcccaggctggagtgcagtggtgcaatctcggcgcactgcaacctccacctcccagtttcaagtgattcttctgcctcaacctcctgagtagctgggactacaggctgcaccaccacacatagctgattatttttgtatttttagtagagggtttcactatgttggccaggctgaaacattatggtgtgctatcacatatcttcttatcttgataaactgattatactaaagataatttgagattacagtggccttcattgggttcttttgaccttcctaaatttgttttcctcagagataaattagaaggccaaggccaaaaaacagtctaaattggacatataccttagttggtatcttcaggcatccaaatgcatttaagagtcggaatttgccttgctccaaaatacttctctgagtgatctcagacaaacagagaaaaaggacttagaaattcaaactttttctatttctcaggtgccaccttttcaagcttctgttctattgtgatatttcctcacttttcaaaacttttcttcttccatgatatttcttaccctactattcttcctccctctgcttcccagcctctacttacaaaaacttttccctttattattaggccgtttaacaattgtgaggttccccagatttcctgtgtcccttgagctaaagctgaactctgtgctcaaaccaaggaatttcgtaggttattgaggtcccttgtcattttgctgactaatttaacattacatttcaagtttaccagactgtcttctccaatgttttttttttttttttaaagagatgggagcatctcactctgcagcctaggcagtggcatgatcatagctcactatagccccaacctcctgggctgaactgaacctcccacctcagcttcctgagtagctggaaccacagagatgtgccaccacacccagctaatttttttttattttgttgagacacggtctcactatgttgcccaggctaggttcagactcctggcctcaagtgatccttctgcctcagccttccagaatgttgagattacaggcatgagttattgcacccagccactttccaatctttatcagtgtactcatgtgcctgtgggagaccagcccaacactcagtggtcagttgcatctatcccctgtgagacctgtctccacttcctcagcttctggcctacgatattgggataagtatcaacttgcaaagaatttacatagggttatcctcaaagcatttcctaaagccattgattggaataaaattcaagcttgtatcctagagccaaatgaactggttcataaccattataacagactccaggtggtattcagagaaaattctggctttcctgtggatgttgactctactagaattggtcttaattttgtcagtggtctcccaagaagagctaacatagaatttctcagttaaaagagctaacatggaatgggagactgtacaaacccctgaccttgttaacttggtaaattaattgtctcactctaaaaaaatatcagcaaaggccaggcatggtggctaatgcctgtaatcttagcattttgggagcctgaggtgggaggatcaatggcttgagcctgggaatttgataccagcctggcaacataatgagaccccgtctcttaaaaaaaaaaaaawaattagctgagtatgggggtgtgcacttgtggtcctagctgctgagaggctgagatggaaggattagttgagcccgggaggtcaaggcttcagtgagtggtgaacgtacctccagttaaaacagataaattcacccacagaaaacaattagggctctacgtggcacaactgtagttcacaaaagcaacctcctgaaatctgtccttaatgtaaacagccatcccactgcaaaaaaagttgccataaacttaagctatctaaatggacttcttcatttatctctttggcttctcctttagaatgaaggggttctgaggacacattggggtttttcccagtcctttcttttaatcacctcacagaaaactttcttcaaattggcagtgaagttctgactattcttgtagacacaggagcaaccatattggtcctcagccccaccagtctcaaccagccacggtgttggaataataaaaatattcaaatagtgggagtttctaataaaccattgacaacctttctgtcccagcccattactttttgccttggacgtttacaggatattcatccctttttattggtgaaatctgcttcagctcatttattgggacaagacttaaaacaaaaaataaaatcatgatgacatctctttctccttaaaagggagacataattttagagtttgataaactggatagttcactggactcttccagtcatgccctgcttttctattacggtgtcccacacaccgaagacatctctgctggctcccaaaattccctattgaaacatacatctgtctctttatgggccacatcatcatcagatgcttgtgtaatacatccctaattgaaatccaaattgatccagccaagcttttgcctaatatctgttgagccaatctgccttacaagttggaaaacctataattaaggaatacaaagctgaaggtttaataattccttttaccagcccctataagacttctattctcccaattaaaaaaaacttcatggttgagggtagagatttgtttagaacaccttactttcatatcaactgatagtaaatttttcactgtaattgacttttttttttttgagacagagtcttgctttgttccccaggctagagtgcagtggcacgatcttggcttgctgcaaccaccatctcttgggttcaagtgattcttctgcctcagcctcttgagtagctgggattacaggcatttgctaccacgcctggctaatttttgtacttttagtagaggtagggtttcaccatgttaagcaggctggtctcgaactcttgacctcaggtgatctgcccacctyggcctcccaaagtgctgggattacaggaatgagccactgtgcctggcccactgcaattgactttttttttttttttttttttttttgagatggagtcttgcttagtcacccaggctggagtgcaatggtgcgatcttggctcactgcagcctcttcctcctgattttaagcgattctcctgcctcagcttcctgagtagctggtattacaggcacctgccatcatgcccggctaatttttctatttttgtagagacagggtttcatcatgttggccaggctggtctcaaactcctgacctcaggtgatctgcctgcctcagcctcccaaagtactgggattacaggcatgagccactgcccctggctgtaattgacttctgcagtgccttcttcattatccttgttgttcaaaccagtgagtaactatttgcttcactggggaaggacaatagttcatttagacttatgcctcaggactgtactgaaagtcctttctatttctctcaagttctgaagcctgatttaggagatggaagttttccccgggacttgtccttactatgatatgtagatgatctacttagttcctcttccctgtagctggcttgtaaggaagatggtgttgatttattaaaacatctagctgcgaaatgtcataagatttctaaagaaaagttataactagtaagacacaagttaaatatctgggccatctaatttcttgaaacaagactacatttggacgctgaatggattcaggacatcctgcacttccctaaacctgaaatgaaatggcagctttgagggtttctcagacacaccagctactactggacaccaaacttttctttgattgcttaacttctacatgccctacttaaggctcaagtgaggctcttacctcaggctccccagtagctgggactgtaggaatgtgccactgtgcccagctaattttttttttttttgagagtctcgctctgtcacccaggctggagtgcagtggtgcagtcttggctcaccgcaagctccacctccctggttcatgccattcttctgccgcagcctcccgagtagctgggactacaggcgtctgtcaccaagcccagctaattttttgtatttttagtagaggtggggtttcaccgtgtcagccaggatggtctcgatctcctgacctcatgatctgcccgccttggcctcccaaagtgctgggattacagacgtgagccactgcgcccaaacaattttttttgtattttttgtggagatgaggttttgccatgtgtcccaggctggtctcgaactcctgggctcaagtgttccacccgccttggctttccagagtgttgggattgcaggcttgagccaccatgcccagccaactgtctttctttttgtgaaaagaaagaaaatgcatgtctgactcagaaaaatcgagataacattgccccgttggatattgcagtcagcaactagatccagtagctcaaagattatcccccattcgagaactatcccagccactgccctactagtcaaatccaccaaagaaattatcatggtatctcccttaaccacctttgtttcccatagtatcaaagctcttctaaatttacatcataacaacacatctttgccagtcatcttacctcttatgaaattcttttgctgactcttcctcctcacagaactcttcttgatgtaacagtcttactcctgtgactcttttaccccttccttctgatgagacacccctccaccttaatgattgtgtgtgtatatgtgatatacacacagatagcagatatgcctttggggttgctcatgattgtaaaatgttataggaacaaataggatttggccgggtacggtggctcacgcctgtaatcccagcactttgagaggcccagatgggcagatcatgtgaggtcaggagtttgagaccagcctgcccaacatggtgaaacctcatctctactaaaaatacaaaaattagttgggcatggtggcgtgggcctgtagtcccagctactcgggaggctgaggcaggagaatcacttgagcacgggacgtggaggttgcaaagtgctgagattgtgccactgcactccagcctgggcaacagagtgagactctctctcaaaacaaacaaaaaaagccaaaaacaaattggtttccttatttccactggaggagttgacccttgtacgagacttactggatgtcattcagccaccagctgtgttgactattaaaagaattcctggacattcagggttagactaactcttagacttttttctctcttttctttacttttttttttttttttttttttggggtggcttttttttttgttacagaatctcaccctgttgctcagggtagagtgcggtggtgctatcttggctcactgtagcctctgcctcccaggttcaactgattctcctgtctgcctcctgagtagctgggattataggcatgcgccaccacgcctggctaatttttgtatttttagtagagatgggattttaccatctaggccaggctggtcttggaacttctgacttcatatgatccgcccaccttggcttcccaaagtgctgagattacaggtatgagccattgtgcctggccatggttagactcttgaggctacaggaaaccaccttgctgataatgctgtaagaaatgctgctattaaagcttgtcagtcagatctctgtcgtcccactgaaagagatttcagaagataatttaagagcgatcagccagaggtgtacaaaatttggctccagaagctgaaaaacagaattagaaaaaycatggctactggtttgatgataaaagaaaactatgatttggacctgataataaaccttttctcccaaattcaataaaatatccactgttaactatagtatataatttgattcctttgataactgacaaattgatttcttttataaaacagtattgagaagcaacataaaacaaagaaaaacctgccaagattccttatttggcttattatgccatttattctgagtttaatccaggaaaagctatatgtacacattcttcctggagattgtaatttatgtaataagccattctaggtttggcaattgaattttatccagttacctccttcccatgggtatgcaatatgtattggttatgatctgtatgttttcttaycaggtggaaatttttctttatagacaagccattgcttcaaccatggccaaaattattcttgagaaaattattcccatttggggaactccccttgaagttcatagtgttttgtaaagttctataaagaacaccataaagaatctgcttttctggccatgtaattaaacaggtacatttaatttggcaaattttacaggattttcattgtgcttatatcatcccccatcttattcctggcagaacaaagaaatgcaactgtaaaaacccagttggcaaaatttatggaaacctaacagcttttttggcctcaggttcttcctttggtgttaataaatttgaaagctgtccatcctttggggctcacaaactttcatctttaaaaacaatcacaggctgttttgtacatttaggtcactctgcttttttagtcagagttgataaaaggagatatactccagtatcgtaaggacattgtcaaaacaacatataaaaattatactcttggccaggcgtggtggctcctgcctgtaatctcagcactttgggaggccaaggcaggcaaatcacttgatgtcaggagtttgagactagcctggccaacatggcaaagccccatctctactaaaaatataaaaattagctgggcgcggtgacatgcgcctgtaatcgcagctagatgggaggctgaggcaggaggcttgcttgaggcggaggttttagtgagtcagtattgtgccactgcactgcagccttggcaacagagtgagattctgtctcaaaaaaagaaaaaaaaaattaaactttttgtactttggtagaacgatctttgcttagtgcactcctggtagatgaagatctgaaacaccacagtctgcaacctgttgactttgtctactggagaagacacttacataagaactcttgtcagtctcattgaaagggttcatattgctccctgtcgccagtccctatgtcgacatgctgaaaggtattgactcctggatccacatttcattttaaaaaggccctcactcctgactgaaacagtacctcaacaggtgacttaaaactaaagttaacctggaatcaaaacagacatctgtagtatactgtcatcccaagatgcttggaccaggccagtataaattagtctcttctggctgggcaccgtggctcatgcctgtaatcccagcactttgggaggtcgaggcgggtggatcacatgaggtcatgagtttgagaccatcctggctaacatggtgaaaccccgtctgtattaaaaatacaaaaattagctgggcatggtggtggacgttggtagtcccagctactcgggaggctgaggcaggagaatcacttgaacccaggaggtggaggttgcagtgagctgatatcatgccatggcaatctagcctgggcgacaaagggagactctgcctcaaaaaaaaaaaaaaaaattggtctcttcttagataccttcatttttctagaaagacaatgtataatccacgtttcccagtctcttgccaaaggggaaaacacaactgactcttagatttatcacccaaaaccctcatctatccatgatccaaatgaacctttagtttactttataacaaatttttactaatgttcccagtgcaactattcagattttgtataggaccttttttttcaaggtcgagtttttggacccacttatgcagattccctgcttcaccgtaatacctagagtctacacaaaagactttaaaattaaattcaaattatgtaaagaaaaatatggtaatataattcaagaaaaaaaatttaacagattacaaaaacatttatgaccctgttcctctaattttttatgtcttccaacaatatagtagtttaataatagaaccttaaataagtattgctgtcacctccctacaagtaactatgaatacacacagactgtagatggaattacctgttgtgctctatcaagatacagtttcatttgagggggattcagtagtcaaccatatgcatggacaacataatgtctcagtcaattaaagaaaaaataccagtgtggtttgagatatttctggatttaaattagcaaaatctgaacattggttgtcacctcttaacttacaccatcatattaaaagagatactttaccaagaaacatgcatccaactggatggtcccagttgttagatcctttttcccttggatcagttagccccttataaacagtggtcaaaaatttgtgactaattgggtctgtagctgactccacagcttaagccattgcatctcaacagacttcactagattctcttgctaaagtgaattaggattgctctgaattacttaagtagctgaacaaggaggcatttatgcatttgctgcctctacttactacacatggataaattcctctggaaaagtaaaaacacaattatagaagattaaaaaaaacaagtcacctggttccaacaagttcatcaaatacatctagactttttgatctgttcagttggttactttcaaaattgggttcatggattagagctgtttttcaaactagatttattatgttactgttstttaccttatgatctttaagctctgttcttgttgcctaacctttgtaaagccagttctcccaacaagatgatgttggcctaacggttcgaggcgattgctaatgcctgtggctctaataagatggaattcaattctgaactccaggcaaacctgccatgagggtttttccttttgtcctctttgtaactaacttgtggcttggatccctgacattgactgtcatattttctccctgatgtgggaccagagacaacaaggatacatccatttccacactgagagacaattaaagcctaaattcaggatagttgatgctttcagagaaagagtttgaggaaaagggaaaaatgtgaaaatcgattatgtgaattggagttactgtgacacccaactaatttggagttgaggcaccaggtaggggaaaaacactcagagcataaagtgcctgtgccaggaattatcttccaagcccagctgccaaaacaacctgctgtaatcttaaggccagttttgcctagtagctgctaaaaccacctgccttactctgtggctagttttacctactgctgtcactcaccaatcagagcttaccaayacttgagaactctcactagcaccaatgagctttctattaaaacaatatacataacatttatctttcctacttaaaccccaatcttttctttattcttcagacatactaaagaccacctcagtctttgtgtttgttccaagttgcacttctggttttatatattcccagctraaatattttgcttagagatttgtctctatactttgattttgatactcggcatactagtccccccaaccctttgcagtcatggatctttttactgcctttttcgttttgccttttccagaatgtcatatagttggaatcatacaatatataatcttttcaaattggcttctttcacttaataatatgcatttaaagttcttccatgtcttttcaagrcttagagctcatttcttttagcacagtttatctgtctattcacctaccgaaggacrtcttggttgcttccaagttttgtcagtcagttgtgtgtaaagttgctataaacgtgtgtggacatatgtttcaactcatttgagtaaattctaagaagtacagttgctggatcttatgaaaagaatatgtttagttttgtaagaaactgccagatgtgaggtgtctgtttaaggtctggctcatcattattgggttcattttcttggtgagggcttttgtttgtttgtttgtttgtttgtttgtttgtttttggagaggaagtctcattctgtcgcccaggctggaatgcaatggtgcgatcttggattactgcarcctctgcctcccgggttcaagcaattgtcatgcctcagcctcccgagtagctgggattacaggtgtgtgccaccacatccggctaattttttgtatttttagtagagatggggtttcaccatgttggccaggctgttctcgaactcctcacctcaggtgatccacctgccttggcttcccaaagtgctgggattacaggcgtgagccaccgggcccagccaagagttcttaattttaacgaagtccaactttttgattatttctttcattgattgtacctttaaaaagccatctccaaacccagggtcatctagattgtcttctgtgttattgtcttaagagttttatagttttaccttttacatttgggtctttaatgttattttttgtgaagagtttaaggtctgtgtctagactgatgttttttgcttgtggatgtcaaattgttctagcactttttttttttttttttttttggagacagggtctcactctgttgcccagtctggagtacagtgtcgtgatcttggctcactgcaacctccaccttccgggttcaagcgattctcccacctcaatctcccgatgattctcccacctcaacctcccaagtagctgggactgcaggcacatgccacgacgtccagctaatttttgtattttttagtagagacagggtttcaccatgttgaccaggctggtctcgaactttggacctcaagtgatccacctgcctcagcctcccaaagtgctggaattacaggcgcgagccaatgcaccccgcctgtttgggtccagcactgttttttgaaaagcctatcttttcttcattgtattacctttgcttctttgtcaaagatcagttgactgtatttgtgtgggtgtatttctggactcccttctcttctgttgatctatttgtcgtattgttttgccaacactacatcgttttgattactgtagatttatagtaaatcttgaagttgctacggttagttttccgactttgttctgttatactacttcagtatcatattggctactttagacctttggcctcttcagtaaaccagaatcgctttgttagtattcacaaaacaatttgctaggattttggttgggattatgttgaatctataaatcaagttgagaagaactgacatcttgataatactgagttttcctatccacaagcatgtaatatttctccttttacttagttctttaatttctttcatcagagttttatacatttcctcatatatatcttgtacatgttttgctagatttataccttagcattttatgttttggggtgctaacataaatggtattgagttttaaatgtcaaattgtttgttcattcctggcatataggaaagcgattggcttttgtatattaactttgctacaatcactttttagttcaaagagttttttggtcagctcttgtgtggattttctgcaagacaatttcgtctcctgggaacagagactgttttgacttttttcttcccattctgtatgccttttatttccttttcatatcttactgcattagctaagacttccattacattgtcgaaaaggtgagggcatccttgccttgttgcttatcttagtaggaaagtttctagtttctcaccagtacaacattatctgtagtttaaaaaaaaaaatcacgttgaaggctgggcactgtggctcgtgccagtaatcctagcactttgggaggccgaggctggtggatcacctgagtccaggagtttgagaccagcctggccaacatggcaaaaccccagctctacaaaacatacaaaaattagctgggtgtgttggtgtgcacctgtggtcctagctacttgggaggctgaggcaggagaatcacttgaacccaggaggaaaaggtggcagtgaacctagatcatgccactgtactccrgcctgggagacagagccagactccatctcaaaaaaaaaaaaattgtgttgaaatacacataaaatttactatcttagttatttttaaatatacaattggtaatatttaaatatattcccattgttgtgcaaccaatctctagaactcttgttttgcagaagtgaaacgttgtcacctgttaaacactaactttctctttgtagcccctggcaatcctccattctgttttctgtctctctgaatgttgatggctctaggcacctcatataaacagaaccatataatatttgtatatttgtgtctgacttatttcgcttaacacaatatcctcaaggttcatccatactgtagcatgtgtcagaatttccttttttaaggctgaataatattccatgttatgtatatactgcatttttatccatttatccgttagtagacacttgggttgcttctgccttttggctattgtgaatgatgctactgtgaacatgggtgtataaatatctcttggagagccttcttttaaatcttttgggtatatattcagcagtggaattgctggatcattggtgccttctttaatgtcttttggcaacatttatagttttcagtgtttaagtcttttgcctttttcagtaagtttattccgaggtattttatttcttttcatggtattgtaaatggaattcttttcttaatttcattttcaaattgtttaaaagtgtatcaaaatgtaaatttttggtaatttttgtatcctgcaacttcactgaatttattggttataaaaagtgtttttttygtgtgacatatttagttctctttctcacctctctgtccatatgtgwatatatatatatatattttattttttttttaattttgtgaaacagagtcccactctgttgcccaggctggaatgtagtggcatgatcttggctcactgcaacctctgccttccgggttcaagtgaacctcctgtttcagccttcggagtagctgggattacagacacccaccaccacgcctggctaatttttgtatttttagtagagacagggtttcaccatgtttcccaggctgatcttgaacttaggtgatccacccacctcagcctcccaaagtgctggtattacaggcatgagttttcggtatatatattttagagaaatctgtagatttcttatattttcacatgtaagatcatgtcttctgcaaatagagatagttttatttcttttttttaaaatttggatgttttttatttcattttcctgcctagttgttctggctaggacttccagcaccatgttgaatagaaagggtgactgtggccatccttgccctctttcaggtcatagaggaaaagatttttatctttaaacattgagtatgatattagctgtgcgtatttcatatgccacctttgttatattgaaaaaatttcctttattactaatttgctgattgtttttatcatgcaaggcttttgaattttgtcattttttttcctgcattgagatgatcatgtgactccctccctttctgttaatgtagtgtattgattttcatacgttggatcatcctttcattttattaatgaatgtcatttggttatggtttatagtctttttaatatgaggttgagttcagtttgctagtgttttgtttaatcttgaaacatttgaaaaatgaagttatcttttttaaaaaaatgtaatgccaatttttgmtgtaaatggcagtggctgtgttcattttatagatactttatatagcctggtatttcagctcttatttataacctcatgccttgtatactaccttgtttggattgtgcctgagttaagggagtgtatttttcccccaaggctacaggcagattgatcatataaggaaggcttaatttcacatatcaaagctgttcatttaaatcgttcaattaaatatttgtgattaatacagttttcaattctaatataaagattcatattcttcaattagggcataggtaaattgctttttgtagctttctgaaatgtaattcacagattgattatattctcctcagtgaattttgatactttatgtgtacagtcagccctgcatatcatatacataacttcgtacatgggttctatatctgtggattcagccaactgtgggtagaaaatattttggggaaaaaagaatggttctgtctgtactgcatgtgtatagactttttcttatttcctaaacaatacaacaattattaatatagcatttatgttttattaggtatcataagaaattttaaaaggttgcaagaatgattttaaaatatatggacagatgtttgtaggatatatgcaaatactacatcattttatataaggcacttgagcatctgtggattttagtattcacaagggtggggtgggggtggggtcctggaaccaatcccccatggatattgaggaatgactgtatatataaatgtatacttttatacgtatataggtatatgtaatatatatatttctttatatatatatttaccactagttataatttttttgtgttattcaatggttactttaggtttctttatcttgttatgtgtaagtgtaaatctttcatccttatcttggacaaaatttatatcttgatgtatctgcttaaaattaaaaatattttatttataattttacatgaaataataaatgaggatttatcactcatgccattgtttttgacttggttttcaactttccttcccgttgtatcccttccctaatccctgcccctgtgcctcccaaaaattcttgtaaatagtattacgtattactccattttactgtattactaaaaatgttactctttttctctctactcatacaatcttttagttatgtgtatttttacttatataggcctttatgtgaagatttttaaaaaagggattgttttgcacacttttctgtaacttgctttttcactaataacagcttggagggaattcccccacctaaggtatagctctagtttattattttctttttttatttgagacagggtctcgctctgatgcccaggttggagtgcagtggcacgatcttggctcactgcaacctctgcctcctgggttcaagtgattctcatgcctcagactcctgagtagctgggattacaggcgtgcacggctaatttttgtatttttagtagagacaggtttcgccatgttggccagactgtagtttattattttcatggctgtataatgaatgcttcatgttgtgttgtataaaatttatttagccattcccacatttatgggaatatattttatttctagttctttctcattttaaataatgttgtatctttgaatatatgtcctgacttcatgatgcttttatttatttctgagacagagtctcactctgtcgctcaggctggagtgcagtggtgcaatctcgggtcactgcaacctccgcctcccaggatctagcaattctcatgcctcagccacctgagtagctggaattacaggcgtgcaccaccatgcccggctgattttttttttttttttttttttttaagacggagtcttgctctttcgcccaggccagactgcagtggcactatctcggctcactgcaagctccgccttgtgggttcatgccattctcctgcatcagcctcccgagtagctgggactacaggcgcccaccaccgcgcccggctaatttttttgtctttttagtacagacggggtttcactgtgttatccaggatggtctcgatctcctgacctcatgatccgcccgcctgggcctcccaaagtgctgggattacaggcgtgagccaccgcacccggcccatgctgggctaatttttgtatttttttttgtagagatgtggtttcaccatgttggacaggctggtctcgaactcctgacctcaaggaacccatccgcctcggcctcccaaagtggtgggattacaggcatgagccaccgtgcctggcccatgctgcttttatttctgtgggatagatttccaggagtaaaattgctgggttaaaggatttctatattttttgtttcacttgatgttgccaaattgctttccacaaaaatttgccaccagcaatgttggagaattctttctcctacatccttgccagcagtagggctgtaactttttaagtttgccagcccaataggtgtaacattatgtctcctagtttctgttactttgaatttyttgggcaggcataagtttgaacatcttttttatgtttgtagacatttgtttttttttttttttgtgaagtatttttgatattctttgttgaaataaaatttgccctgctytccccactgccaggtagctagtactacagcaggcacatgccatcatgcctgattgttttttttttttctttttcttctttttcttttttttttttttttgtgagcatgggggtcttgctatgttgtccatgctggtctcaaactcctggcctcaagtgattatcccaccttggccttccaaagtgccgggattacaggcatgagccaccacacatggcacctaattttgagttgtttatctttttcaaattgcagaagctcagtgtgtgttaaaagcattagttcttcattaccactgttgaaatatttttacttttccctagatacaaaaacttaatttttaatatgaattttttatagttctacttttgagtagtgaatgtttctcatactgttttcctataagatttttttttttttttgcaattcatgtttacctcgtttatttttgtatgttggataacataagggaatctacttttttctgcttggagattctcaacacttaaaaaaattaagccatctatttcccactgacttgggtgattgccctatttcatttaaaatctttatatttatggattttttcatcattgggtactattttatttatatattgatgtgtttctatatcaatactatattgatttattttctgtgacagtctaatatgcactgttatttgaagcagtttcaagtttacaccttttttttttagcattagctgttctctagcatttgttcttatatataaactcgatttttttcttaataaagtagaaattgttttgattctaatttgaattacataaaattaataaattaatatgggggcaattgatacttctatcactgcttttcaaatacatgataaagtttatgcccttcactaagaatgtgtattttcttcatactagtgccaacttttactaaatttcttcagaagtcatatataggtattgttgctgttgagaatatatatatattatatacatatataaaatataatatataatatatatcaaagtactaaatatatataatatatattatatatatgatatatatatcagaaatgatctgatgttgagagtattttaatctcacttccttctctaagattattttcttagtctattcaggctgctataacaaaataccttatactgagtaatttataaacaacagaaatttattttgattctagaggctgggatgtctaagatgaaggtgccagtaaattcagtgtctggcgagggctcactctgctgcaaagattgtgttttcacatgttagaaagggcaaggcaacttacatcaacctttttaataagggcactaattccattcatgttggtagagtcctcatgccttaattacttcacaaaaggaccccacctcttaataatttcacattgggtattaggttctaacctgaatgctggcaggataccaacattcagaccatagcaattctcgtttctccagtagaaaaagctgttgatttttatatatagtcatatgtcatataatgacatttcagtcaacagtgaccttgcgtgtgacagttatttcataagatgatcatggagctgaaaaattcctatggcctagtaatattttagtccttgtgatctcgtaaccttcctaatgtcatagaactacaaaatagtcaacgtttgtggtgatgctggtataaacctattgggctgccagtcttacaataaaagtatgggacgtatacaattacatatagtacataatacttgataataaatgactatgtcactggtttgtatatttattgtactatacttccaattgttattttagagtgtactcctayttataaaaaaatgttaactgtaaaacagtctctggcaggtctttaaggagatattctagagggaaggtattgttatcataagagatgacagcttcatgggtgttactgttcctgaagaatttccagtgggacagcatgtggaggtgaaaggcagtgatattgatgatcctgaccctgtgtaggtctaggctaatgtgtatgcctgtgccttagtttttaaggcacagtttmaaaaagaaaaaactttaagtttttataacttaacttaaaaaaagtttaaaaaataaaaaaagtctaagaaataaaatcacaaaaaagcttagtaatagaaaaaaaattatagaacaaggatgtaaaacaaacaaacaaacaaaaacttgtaatcccagccctttgggaggcttagttcggaaaatcagttgaggccagaagttcaagacgagtctaggagacatagtgaaaccctatctccacaaatacaaaatttaaaaattagctgggtatggtggcacatgcctttagtcttagctattcagtaggttgaggtttgaggatcacttgagcccaggagtttgaggctacagtgagctatgattgagtcacttcactttagctgggtgacagaacaagaccctgtctcaaaaagaaagaaaatatttttgtatatccagacaatgtgtttgttttaagctgagtgttattaccaaagagtcaaaaagtttaaaaagtaaaaagttcataaagtaaaaaagttacagtaagttaaggttaagacattattgaaagaaaagtaaaattattttataaatttagtgtagcctaaatgttcagtgtctgtaaagtctacagtaatggacagtaatgtcttaggccttcacattcactcactactcactcactcacctagagcaacttacagttctgcaagctttattcatggtaagtgccccatatagatgtgccattttaagtcttctgtaccatatttttactgtaccatttctatgtttagatacacaaatggcttactattgtgttgcagttgcctgcagtgttcagtccagtaacatgatgtacaggtttgtagcttaggagcaataggctataccatatagcttaggtgtgtagcaggctacaccatctacatttgtgtaagtacattctacaatgtttgcacattgtaaagaaaattttctgagaaaatgcatcattagataatttcttcattgcacattgtggagtgtttattcatcagttgatggagaaaagagaaatacagtcaagcaacatatgactggacacaaatgttaataataatatatgatttcatgtatatgaaaatgtttaaaataagcaaatccaaatagtagtgattgtcagggagtaggggtggggaggataatgagtgatttaatggatatgggatgtctctttggtatgatgaaagtgttctgaaattagacagtggtaatggttatgcaaattggtgaatatagtaaacctactatattgtatagtttgaaagggtgaattttatagcacgtgaattgtatatctcaactttaaaaaaatgataacagtggttctatcagttagggttgaatttggcattagataacagaaaaccagactgcacttgctttataaaacagagctttatttttccttcataataagcagagttgcagtgttgctggtattgattcactggcgtggtggtatcaggacagatgtctctatgattaatttttggcctgtcactcatgtttgcatatggctgttgtggctccaagcattggaagcaagaggacagggaagcaacattgactgtaccaggaactccaaaacagtcttcacatcttaatggttggacaatgccaaatggtcactcttttctggaagttgactggggacaagatagtggtaagggaattagattttggccagaaagtttctgccacagtgagctttcctgtctaaatccttattttaactgttgtcacttaatattcacactttggaaggacatctactgttggttacaattatgaaaccaacttgaatactttttagttgaacatttcagtagtcttaattatgtttaaataggtttcacaatttactgtttttagtttagtttccggctccccccaacccccaacttttgctagagagttactctcttaacttttgctagaaagtagcaaagttctctactctacatgttcagggctggctgtagaatttcgttttttaaggaaacaggaagacagaactaattatgcaagtcttcatttagctttttaaaaaacagctttattgagttagaattgacatgcagtaaatggtacatatttaaagcgtacaatttgttaagttttgacataagtatacattgtgaaaacatcagtcaccacaatcaggatacttattttaaaaaacaactttatttaggattagtatactgataatgtgtccattgtaagtgtacattttcagttttgacaaatgtatagatttttgtaactaccaccaccagtcaagatgaaaacgtttctagcactccagaaagttcccttgtgtcccttcttggtcagttattcccaccactgctctcaggcaaccacagttctgcttctatcactatataagtgacagaatttttctacagaatttcacatagatggaatcatacaatatgtactgttctgtctggcttcttgaggtaagccaaatgtcttttaagagtcatgcatgtttttgcatttattagtagtttattctttttttgttggtgagtagcattcattgtatggatatattccagtctgttttattcattcactttttggacatttgggttgttatcaattttgggctcttttgaattaatccctccctccttccctccttccctccctccctccctccttccctccctccctccctctctccctccctccttccttccctccctccctccctcccttttttttttttttgagacagagtcactccctatcacctaggctggagtgcagtggtatgatttcagcctactgcaacctccacctcccaggttcaagtgattctcctacctcagcctcctgggtaactgggactacaggcatgcaccaccacgcctggccaattgttgtatttttagtagagacggggttttgccatgttacccaggctggccttgaattcatgagctcaagcaatccacctgcctcggcctcccaaagtgctgggattacaggtgtgagctactgcgcctggcctgtatttttatattttctataatcaattatagttattgtatttgatgttcagattgttccacatttagcaagtatgttataaccatgtctttcatgcatagagacagcaaagttggagacaaaagcattatcatcatgggcaggctttgaggtgaaaaatttttctgtttccctttagataattgttatgataacaggttgacataattgaggtagagggattgtggcatgtacatacatacaacatgtaatacagatgttgggcctattttattacagtttttcaaaccacacatcaagcagtcatttctcatgactaaatttactttttaaaccttcatgaagctccttttggatcttaccattcatgttttctagttatattacaactagtactcatttttcccccaaaataaaataaaaaatgaaatactgttcatcctaggctcagtacatactcaaccgtgtcatacagtgaagagattttaaggtacaaactataactaagaattgtcagcaaactcattcagtacatttttaagctaatattagccatctgttgtctaaccctttgctacgtattcttcctcatttttgaaaacacagtttacagatttaagtggcccaaattcaactttgctgcttctagaaatttaaaactaaacaggtttaccctatttctttgaagtaactctctatgttgttttgatattaaaacgaattcttattccctttttcaatccagtagaaaagaatgatctcttcattgagatgccccatctcttaatgagaatgttccatgtataatgacattggaaagttactttcagtataagagtagataacatctagtcttgctttgggagtcacctgttcttcattttctttcttctgctttagtgagcttgaatattccatgtcagtatgtgctgcataatagtaatttttcttctgtccaaattatttgtttagccttttcaccatggtctttgtctaacaatactgttatattttaaaatatgaactttacctgctgtatgaattctctgtatcttcttttgactggcacatatgactagcatgtatcttggatctcccccctctctgtgtgtgtgttgcggggtggagtggagtggttaaaacattggctaaatgcttatcatgttctaagtactctagttgttgacttttacactgtgatgacaagcttttttaatttttgtgttttgtggcagcttttttattgtggtaaacttttaatggaaatgtgtgagtgctaaagataaaaaatagccaagctttgtgatagtctttttctctctctaaactacatatatactcctagatgcttgtttaggaatacaatatatctggaaatatacagacaaaattggtcacagtgggtttgtttgcctttggggtcaagggttgtagaagttatatttctcactatgtatttttattattnaaccctcactttttcaatttaaggttttgtgttgaaacacacatctgtgtgcacatacacatctattgaaaatgctgtttccatcttaactgatgtgtttaacaagagtggtaattttcattttgtaggcctcatttttgtgagctaatctgaattctcatgacatttctgttcttgtagtcagatgcatgtgtattggccagactgccagctacaggttaagggaatggaatccttgctttggtaaacagtaaccaaggaaaagaaaaatgtttctggatatttatttgagtgaaactccagaaatttattggtggattggttatgtgagtcagttcatacttcagcagtgaaatttactaccaccccctgtgtcactgatgatgaaaatattagtttatcttttttgttctacacttacattagtgaatgatggtctgtttactttttttctttttctttctcttttttttcttcaaggtaatggtctcattctgtcacccagttcagtaatgccatcttggctcactgcagcctcggcgtcctgggctcaagtgatctgcccacctcagcctgcaaaataacacgaactacaggtgcacaccaccatgcccagctaatgtttgtagaaatggggtttcaccatgttgcccaggctagtgtcgaacttctgggctcaagtcatccacctacctcccacagtgctgggattacaggtgtgtgccactgcaccaggtccctgtttgccagtgtaatacattgctttttcattaaactccttcttcaagagtcctgtttttagaaccttttcttttcagtttacttctacatttttattagtactatcaaaggcattatctagagataatctcgcattcctacactagtaacttttagccttttcttcctattcctctgtatttgtgaagatgataggctccattgagacccaaatagagtatgagaatactgcctgtcataggtatacaaagcatctagaagagaaaaaaatgcaagctatatggcacgtatgattttttgtgtgtgtgtgtgctttctttttatttttgagatggtgtctcgctctgttgcccagggtggagtatggtggcgcagtcttggctcactgcagcctccacctcctgatttcaagcgattctcctgtgctagcctctcgagtagttgggattacaggctgcgccaccatgcccagctaatttttgtatttttagtagagacgaggtttcaccattttggccaggctggtcttgaagtcttgacctcaagtgatctgcccgcctcggcctcccaaagtgctgggattacaggcgtgagtcaccacacccggccggtactttccttttaaagagaaaatctcattaaaatattaagagcctcttcacttttgagtaatttctggcatatacagatgcaaaacaaaaagaaaacaaaattccaccaacatctggaaaatacatccattattgaaatctcaggtggtgtcagctaacatgtatttcaacatgtgttaatatagatgattttacttgaaaatataagttgattaaaaagaaaaaacaagtccgggcatggtggctcagacctgtaatcccagcactttgggaggctgaagcaagcggatcacttgaggtcaggaattagagaccagcccctgccaacatagcgaaaccttggctctactaaaaatacaaaaaataagctgggaatgctgcctgtaatccctactcttcaggaggctgaggcacaggaatcgcttgaacccagtagaggttgcagtgagctgagattgtgccactgcactccagcctgggcgacagagtgagattctgtccttctctgctccacccaccccccaaraaaggtataaaaccaaaatgaaaaatactagtttttttggttcttttcttataaaatgattgtactttctttstggtaaattaaattagggtcttgttggaaatgcatgagttctacaggagctctaccagtgtagttttaaaatcacttaattatgaatcactgtttttccatggcattgtcacttgtgaccttggcttcatacatcacattctgcatttgttaaatgggaatactggaaactttcttggctatagggttgggaaaacaaaggcagttacatatacctatgtgctttttaccacaggcattgctgctaatattggatgattctataatatcaaaatgattagtgaataacttgactgtagactcctgggctcaagcagtcctcctggcttggcctcccaaagtgttgggattacaggtgtgagccactgtgccaggtcctggaatttatatattggagtcattgaaaatttcctgaaaactatgtgatatattttagttatttgtgtgttaccaattagtagcacataattagttgaatattctttaactattatggtatatggagtaaattcatatatcaaatgagtagtctttgaagtaaatgttataccttgtaaatacggtttttcctactagttaatagaaagccacattattttctgcagcaatatagctctgaagttgtgagaagtcagtttgttagattagagctttgttttttaaacacaaaattttgaaatggcgtctttttatttttatcaccgaagtcttgtaatgtcagttgtaaaatgtatagaaaatatgtcttgagtgtggtggctcatgcctgtaatcccagcactttgggaggcwgaggcaggcaggtcacttgagtctaggagttggagaccagcctgagcaacatggtgagaccctatctctacaaaaataaaaataaaaatttagttaggcatggtggttgtgcgcctgtaatcccagctacttgggaggctgagctggggggattgcttgagcccgggggttcaaggctgcagtgagccatgattgcaccaccacggtctagcctgggtgacagagcaagacatcgtctcaaaaaagaaagaagaaagaaaattcaagtaagcaaaaacaacaacaaaaaacaacaacgaccattaatgttattaatttcaccacccaatagggtaaccactgttaacatttccgtgttgatcttttcagcgttttttgtgtgttagaagcaggcaagtggattctaaatacagtgtgttgcctttttcaattggaagttcctttttgtgacagaggtaatactacaactgttactagcattgcaactttttgttcaaacagatcttacagagaaatggagtaaatacaacaaaactagagctgttgcggttgaaggagggattgtaatagaaaacctcagtatttggctttcttcaccagtctgaacattctgccttggaggtaccactgaagaagtatagggcatcatgtagaaagcaagcatagttggaaaattactgacctctaatatttttaatggctgcatcatattccatcctttgacatctgtgatagttctggaagtgttttgcttcgatctcccttgaaggaagtctctattgaggagtgttagctgatagcttccagctgcagarcctttgggattggctacatcattgagccacattctcctcaggcagctccctcccagtgactgatcccagtagatactacggtctgaccatttctgctcaacatggggcttctctcgagttctctgctgggctggcagatcagaactgtactgttccgtgtcctttcctgatttcccctccttcctcctctgctttcacagttggcagcctgcattgcagcctgaaggctttctctatgcttactcctcttgctttctcctttcattcttcgtaggcatttctcacaaaatgtttcttaaagttttaactccatcttgggcctactttatttttttatagatatataaatataaatataatatataaatgttatatattttatatatattatacataatatatattttatatattatgtataatatattatgtataatatatatcatgtataatatatggtatatatcatgtataatatatatgtcatgtataatatatattatatatcatgtataatatatattatgtataatatataatgtgttttatatatatatatatttgagacagtctcactctgttgcctcggctagaatgcattgtggcatgatctcgcctcattgcaacctccatattctgggttcaagcaattcttgtgcttcagcctctcgacatagctgggattacaggcacatgccaccatgcttggctaatttttgtaattttagaagagacagagttttgttctctactaaagagaaccaattggccagttatctactattctctaccagttggccaggatggtcttacctcctggcctcaagcaatccgcctgcctcagcttcccaaagtgctgggattacaggcatgagccaccatgcccggccaggtctactttctagagaacctgaactgacacacaaccaggtggtttttaaaaaataagtatttaaagacattatcattcattcttatggtttaaaaaacacagaaatggggccaggggcagtagctcacacctgtaatcccagcacttcaggaggccaaggcgggcagatcacttgagatcaggagtttgagaccaccctggccaacatggtgaaaccctgtctctactaaaaatataaaacttagctgggcgtggtggcatgtgcctgtaactccagctactgggaggctgcggcaggggaatcactggagcttgggaggcggaggttgcagtgagccaagatggcaccacaaaaacacagaaatgcacaaaatgaaaaataaacaatccaccccttctccaaactctaagaaaaccattttcatatgttcataatcatacctatgtcataatctcactgatatcattatttcattttctgtctgtctgtctrtctatctatctatctttcttttttgttaagagatggggttttgctatgttgtctaggctcgacatgaactcctagactcaagtcatcctcctgcctctgccacccagaatgctggaattataggtgtgagtcaccacatccaactttagatagtgtctgttattatcatgtgtgttctgaaagataagggaattagtatatctaacattcttttaccttttctcctccatttttaaatttttgtttactggtgatgttatttttaccttgttaaagcttatgtttatacttagttgtatatattatttagaccgcctattgagtaaaaattgattttaaaaattgaaaatcagtaattttatttgctataattacataaatataacttagtccagaagtgagtggtttggttgaaactatataggtggaatataattccatgtatctcagctttgccaggttcagttttctttctagatgctcagctgtctctgttccttgttgcttatattgtcttcttcatttaagagcacaagccacactacttggagttgaatcctagcatcaaacaggtttttttttttttttttaaagacagagtttcactctgtcacccaggctggagtgcaatggcgtgatctcggctcactgcaacctccacctccagggttctagcgattctcctacctcagtctcctgagtagctgggattacaggtgcccaccaccatgccttgctaatttttttgtatttttagtagagatggggtttcgccatgttggccaggctggtcttgaactcctgacctcaggtgatccacccacctcggcctcccaaagtgctaggattacaggcgtgagccaccgcgcccagtcgtatcaaacagttattcatcatgtgatctttagcaagttacttactctctgtgcttaacatttatgatctgcaaaactagtgttacagttctgagttcttatacagttcttattgctacagtaaattaccacaaatttagaagcttaaaacatccatttataatctcatagtttccataggtctgaagttcagagggctaggcaaggtctctgcttaagagtcttataagaccaaaatcgaggtgttggcagcgctgttttctttcaggaggctctaggggagaatcagcttccttgattgttcagattgttggcagaattgatttctaagtgcttgtaggactaagccctatttccctgttggctgttggcttgggggaggaagtgtcacactcagcttctatagaccacttgcatttctttcttttttttattttttccctttttcttttctgttaatgagatggagtctcactctatcgcccaggctggagtgcagtggcgcaatctcggcgcactgcaagctctgccttccagattcacgccattctcctgccttagcctcacgagtagctgggactacatgtgcccgccacctcacccggctaattttttgtatttttagtggagacggggtttcactgtgttagccaggatggtctcgatctcctgacctcatgatctgtttgcctcggcctcccaaagtgctgggattacaggtgtgagccactgtacctggccttttttttttttttgagacggaatcttgctctgttgcccaggctggagtgcagtggcgtgatcttggctcactgcaagctctgcctcctgggttcacaccattctcctgcctcagcctccccagtagctgggactacaggcgcctgccactacacctggctaatttttttgtatttttagtagagatggggtttcactgtgttagctagggtggtctcgatctcctgacctcgtgatctgcctgtctcgtcctcccaaagtgctgggattacaggtgtgagcctctgcgcctggccttctttcacttctaaaggcctgtttgattatatcatacctacctggataatctaggataactgccttattttaaagtctgtaaccctaacgctatgtagtacagtatatagaagagtaacagcaagggacaaaaatcataaagggcctaaatcttgcctagccacagtccttcctctggcttccatgatccatatctatctcacatacaaaatacaaccaccccattccaaggtcctcaaagatctcattgtataacagttcaatatctcatctcaagcttttcagctcagaagtccttaatctcacatctagatcatctaaataaaaatatgggtgatgctctttattgatggacctgtgaaactaaagaaacaagtttacttcttccaaaataagtgttgggacagtaatagacattctggttcaaaaagggagaagatgtaaaaaaggagtcgcaagtcccaagcaatttcaaaaaccagctggagaaactccactacatttcaaggcctgaaaataatcctttgtggtttgcagtttcaccctctgggcttgcagctctgcctgctctcttagatacttttgttagtttttaaaaaaatatcttttctttttcctcaggtttgatggttcttggttgcccatccatattcatgaaaggaggattaagttggtctgtttaagtaactggaatgagattctctgttgcaggtttatttcatccacaggtctttctcttggctgtggcatgtggtagtctttaatgccttctcaaaggcatgcgtttctcaaaaaattggttttgggggcaaaaaaaaaagttgctctttttgtgtgtaaagcacagatatacatacaatacacaaatgtatagtatatctgtggttctaaacttttcatggagggagtgattagggaataaccatctaaaaaagctccattggtgttagtaataggaagaaaggttgagaaacagtgctctaaggtatatggttgactaggtggcaggcttctaggtacccccaattgctaaaataatcatgccttattttgggagtggaatgctttagtgtctgaagagctgcccttgtttacttttaggtctcaacatctacctcaagagctcttcacagacctgcccattttgtttagagcagtagcttccaaacttttatgcactatgttccatagttcaaaatacattttacattgcaatttagtacacacatgtatattaacttgtaaatctataactaaagaaaaattccgtgaaataggacatagcttcactttgtattttctgttatatgcattccagatcattaaaaattactagtaacccaccaaactgtttgaaaccccatagtttgaagaatactttagaccagtacctgggcttaatcctgaagctgacagccttgctgtcaactctttaagcaagaagaggaggagaggcctagttggctaagtcatttggaatgcaaattttacatgataaaattgatgatatcccacccctaacccctgctctttgcattttaagcttggatcctctctttatctcctttgggaagacctaaaccactatctttgctgcagtttcctttgcttactttttcttagttggatctcggttgttttatattttctaggtatcacccacattttctgatctgagagtggagtttttttccttccatatgtttatgatttgatttctgagtttaaaaacaaaataaaacagctttctgttgttacctgaagatcaagggtggaacaaagagtacatttgtatgctcagtccaccgtgttcaattggaaaccttatagtttacttaacagtcctaagttagtgttacattttggtgttttccagtttttctaagagtttatttttgctatatctacatgaggagccatgcttatttttaggaatgatgaaaacatgattgcttgtctgaagcctacctgtaaaatctttcattccccttatctctggtgctaactgattgggtcatggttaagagtgaatctatctctgatcaaactgtcaggtttctatctcacttattaaattctgccacttataatctatgtgctcttgagcaaattgcctcatttctttgtacctatttgcttattctaaagtaggaatagtaatatctacttcatagggttgttgtgagagttaaatgttaagggcatataaagaaagttcttaggacagttcctggcttatattaagcatttgataactgctgtttgtcaacatcatcatcataactatactcatccatacatatatatcctttttaaaaaaacaaacagcttttttatcctcttacacagtttttgtataggctgtgtaggtttatttattttcaacccacttgattttattttaatttaatttaatttaattttactattttattttatttatttgagatggagtctcactctgctgcccagactggaagtgcagtgatgcgatcttggctcactgcaacctccacctcccaggttcaagcgattctcctgcctcagcctcccaagtagctgggattacaggcgcctgccaccatgcttggctaatttttgacatttagtagagatgcgatttcaccatgttggcaaagctggtcttgaactcctcacctcaggtgatccacgcacgttggctccccaaaatgctgggattaacagatgttagcgaccatgcccagctgattttatttttaaaagaatctaaggctgggtgcggtggcttttgcctgtaatcctagtactttggggggctgaggcaggggactcgcttgagccctggaatctgagaccagactgggcaacatggtaagaccccatctctacaaagaatcaaaaattagttgggcatggtggcacgctcctagagtcctggctacttgggaggctgaggtgtgggaagttcacttgagcctgggaggttgakgctgcagtgagtcatgattgcgctagcacactcagcctgggcaacagagtgagaccctgtctcaaagagtctaaggccaggcatggtggttcatgcctgtaatcccagcactttgggaggccgaggcaggtggatcacttgaggtcaggagtttgagaccaacctggccaacatggtgaagccctgtctctactaaaaatacaaaaatttggtgagcatggtggcaggtacctgtaatcccagttacttgggagcctgaggcaggagaatcgtttgaacccaggaggcagagactgcagtgagctgagatcatgccactgcacttgagcctgggcgaaagagcaagactccatctccaaaaaaaaaaaaaaagagtctaactgtgttttgctttactggaattagtaaactggaaaattggcctagctaagactcagttagctgaactaaggagagaaaaggtgtgaggtgattagagaaacgtcagcttattaggatgaaggatagtaggttgcaaaccatatttacttacatttgctttgtggataatagttaagggtgtgggatacagagtcagactatctgagttagatcattggttccacaacttgctggctgtgtgactttgagcaagttacttaatttttctgtgccttgtgtaaaatggggatgataatacctgcctcacagggatactgtgaagatctcatgaattaatgcatgttagttgcttacaagtgcttaagagacaacagctattagtagtattaatattgtgcttggattttgaattcattttgcttggatttgaattcagtatttgattttgttcagagtttgttgagtctcccttatgtaaaatgcttggggaccagaagtgttttggattttggattttttttggttggrggggttttggaatatttgcatatacataatgagatatcttggggatggaacccaagtctaaacgcaacatttatttatatttcgtatgtgtatacatattttatacacatagcctgaaggcagtattatttttcccttgttgacactgaataaactgttgtgcacctttgttttgactgcaacccacgacctaaggtcaggtgtagacatttccgcttatgacatcatataggctctcaaaaagttttggattttgaagcactttgaattttggatttttgggttaggaatgttcaacctttataaagaatacagagttgaagtaaagggtgagattttcatattgatagaaatgtactatattttctaccatctagaggtggaataatatttaggacacaggagttagttgggagattaataaatactttatgaatacaacaatacttcaaacattaggccttctagagttattctaagatatttggggccatacctaggcattgctatggtggtttgttgctagcctgttcacttagtcattaaaacaatttacctttttcatccttgttatacattattttctgaatttctgctttaatagttaacagtagtccccaggttttatttttatttttgtttccttcttgagacagggtctcgcttgttgcccaggctggagtgcagtgacacaatcatggcttactycagccttgaactcccaggctcaagcagtcctcccacttcagcctcctgagtagctgggactacaggcgtgtaccactatacctggctaattttttattttttttttagagattgggtctcatcatgtgtccagactggtctcaaactgctgggctcaagtgattctcccaccttagcctcccaaagtgctgggattacaggtgtgagtcaccatgcctcgccagtccccaggtttaaaaaaaattctccctttgaagttgtaggaaacttagaatgtgtatgaaacaggattttctatcacattaatttaaagtctctctttagagtatgttacccarcgtattttcctttcctgtatttgagtgttacagtataatcattagtgttttcagtatgttttgtctaattatcctatttgtagttttttttctcgtgaaaaacatcctgagtagtactttttgaacattctgcttattcacttgaattaattgtttgaatatagttttagaaattcattttttaagattgctaaattttattatcttttttcttcaattgtgggccatacgttaaaagtaacagctttgatgttattttgcagagacaagtttttgaattttcttagttgcagaattgcacactgtggaaatgactttactggtaaaccctgggtagctgtacatctctctatgagaaagagttttataggaagagacatctatcgccaatgaattgccaaaagaatgatttttcctgaaaatagtagaatgtcttttctgtttgcctccacatttgtcatgtatctgtgaagtatgtatacagacacacatgcgcacacgcacatgctgcatgtatgttgaaaaacattaatttttaaaaatttaaaaaattttatagagatggggttttgctttgttgtgcaggctgttctgaaactcctggccttaagcagttctcctgagttggccttccaaagttctgggattacagatatgaactatcatgcccagccaaaaaaaaattcagtataccacatttggaccaaccttttcattagtaagatttcatgacaatttttctagtatattatagcatatgttcattcattacccttgatggcccattgctaaattttagtcctgattattcttctcctttactgtatcagttttgcacgttactaaacatggtattcaactattctgtcattaattatagacttcatttagtaatttacaaaccatgatagcattttgggtcaagaataccagacattccttttattacgaagtagttgccctttaaggtagttgagttttccgtttcatttggatartgtgctgtgttgagctttggttgttaattgataaatgtggtatcctctctgtgaaagcttttaaaatgcataacacgtatttcagaaagcagctgttgctatggcaactctcgggtcacttgcagctcagcttacatgattggctgttaatggagtctaatatgcttgagaagagaattgagcaaatgaaagagggttttgaaggaatcctgttaaagctcttgaagttaacagaacagctcacaaaaatttaacacttatattactgttaacacaattttgctggaagtagttttatgaataatgacagtgagacaggacaaatttttggaaaaataattttcaaaatccttttaggaatgttgtaatcttgtcacttttccttattttactgttgtttaaagaaacactttcacagctatcactcgcgttctgtgctctattctctgaagtacctgtctcagaggagttaattacaatgaggcgtgagaaggttgttaattgtgcagggtcaaaaagagtggtaaaaccaggaatagcgtcaaaattttactctggttacatgaattagattagaattgcctcttacttgattcttaagatagccccatgaatacttgcctcattcttaggggtatttggatggtgtgaaaagggaggttgtggtgtgtactgtggattttgaggccagtaaagtaagtaaaattaagcataattaactaccataataaaaattaatagagccatggaaaatggcacagtaacatatatcttgttaaatgacagaattttcatcagtctccacctactactacttttgacagttaaatataagtaaaacataattatcagaatttataattcagatgaaatttactaatcaataatttaacatcacctcggaaatgatttcactttgtaaaaacttcagttggttagttcagccatatgtacttggaaaagagtactaaggcatgtagcttattttacatatctgctgtttctacttagggtcttaaaaaattattgattatggtgctagtgttgaaattgatgaactgattatgttacagctatgctggtgtatagttatatttggttttttggttttgcaagcaaaaattggtgatacaaatcaatatctaccaacaccctaaattacctttgatttttttttttaaatttcctattcaagtaacactcaggaatattacagaaaaacttttcttaatagacctacctagatatgtgggatgccctcattactttttttgacaaaacaccttaaagttcaataaatgttcctctaaacaccaaaatctgtaagttcgttaatcatcagtattaccccttggaaatgcttttttttttttttgggtggaagatacaggacctggctctgtcacctaggctggagtacagtggcacgatcatagctcagtgtaacctggaactgctggtctccaatgattgtcccacctcagccccccctgaagtgttgggattacaggtgtgagccactgcacccagcctcattttgtttttaaatgatagtgtgcaggtgaccataagtcctggtctgccagttctggtagtactggattattcttaatagtgttccctttttatatttaataccaagagataaaagaaaagtacaacaagtcaacagggaaatccacaactcatagctactattgcattctagtgcatttcattccttttcagccttttttgtttgtttgttttttgagacagcaacttgctatgttgcctaggctggagtgcagtggtgccatcttggctcactgcaacctgtgccttccaggctcaagtagtcctcccacttaagcctcaggagtagctgaaactacaggcatgtaccatcatgcctggctcatttttgtgtttttagtagagacagggtattgccatgttgcccaggctggtctcgagctcctgggtgtaagcaatccactggctttagcctcccaaaatgtttggattacaggcgtgaggccaccctgcctggcccgtttcastctttttatgtgcatgtgagtatatatgaactgtgtaggatggctgggtgtggtggcttatgcctgtaatcccagcactttgggaggctgaggcaggcggattatttgaggtcaggagtttgagaccagcatggtgaaaccctgtctctactaaaaatacaaaaattagctaggcgtggtgggatgcacctgtaatcctagctactcgggcggctgagggacaagaatcgcttgaacccgggaggtgaggttgtggtgagccaagatcgtgccattgcactccagcctagacgacaagagtgaaactttgtctcaaaaaaaaaaaaaaaaaaaaaaagaaagaaagaaagaaacgtgtaggagaggacgttctttatatttgcatctatacactggccacttttttttccatataagtattgcatatcataagcaattcttctcatagttcttaatagtgtataaaaaatattcacaagtaattgctctccatttataggacattgtttcttttttttttggctattataaagtagttcagagtggataatacatttaagtgtaaatatattttcatttatgtatttatttttgctttaggaaatatttttagaagaggaattgctgaactaaagattattgatttttaaaggtcttgatacgtattaatattagatgctttctggaagagcttttacattttttttgacgtgtaaattactttaaatttacttgtaggacctcaggtgcggagggctgaattaatcctgaccacagttcatggcatgcagtaattgactcattcaaagccttgctttcattttatttatttatttcctttatgtgggttattcactcattctccttttctccataggtttgatmcacacacacacacacacacacacacacacacacacacaaataaatacagagagcacacgtttatttgtatgtgttcttatatatattgttgttttgtgtggttatatttgaagtcaaacataaagtggattggcattgctttgttctggggacccctctgccaccaccgtttctacccccaccgctaatgttgggaaaaaaaaatgataaaatacacacaacctaaaatttactatcttaaccatttttaagtgtatagtttagtggtattaaataggtccatattgttttgcagccatcaccgctgtatgtatccaggactctttttcatcttgcaaactggaaactctatacccgttaaataaaaacccttcagtgcccccaaccccagcttcaggcaactaccattgtactttctgttcctatgaatttaattactcttaagtatcttatgtaattggaatcatacagtatttggtgttttttttttttatttttttgcgactcgctaatttcacttagcataatgaaagcaagtttcattcataacatctgtcagaattatcttttttaaggctgaataatactccattgtttgtgtataccacattgtgtttatccatttgtcagtttgagttgcttccttgattgaagtactgtgaataatgttactatgaacatgggtgtataaatatgtcttcaagacctcattttcagttctttggactacatacccagaagtaaaattgctggattgtatggtaagtctattcttaattttctgaggaaacaccatatttttttacactgtggctataccattttacatccccaccaacagtatataagggttctgatttctctacttgttactttctggattttttttttttttaatggagtcttaccctgccacccaggctggagtgcagatggtgtgatcttggctcactgtgacctctgcctcctgggttcaagtgattctcctgcctcagcctcctgagtagctggaactaccggcatgcgccgccatgtctggctaatttttatatttttagtagaaatggggtgtcaccatgttggccaggctggcctggaactcctgacctcagctgatccacctgccttggcctccaaagtgctgggattacatgcataagccacagcacccagcctactttctggatttttttattatagccatcctaatggatgatgagtgttatcttactgtggttttgatttgcatttacctaattactaatgatattgagcatcttttcacgtgcttactggccattcgtgtattttctttggagaatgtctattcaatctctttgcccatttgtgaatcaggttatttgtttttatgttgttgagttgtagaagttatttgttctggatattaatctcttatcacatgtatacttggcaaaggttttctcctgttctgtgggttgactttttaccctgttggatttgtttcttgatgcacaaagttttaaaatttttgtgaagtccagtttgcctgtttttcttttgttgtctgtgccgatgttgttctgagaaatcattgccaaacctaatgctgtgaaagttttgtcttatgttttttctgtaagagttttataattttaggtcatacatttaggtctttgatccatttgagttaacttttgtatttagtgttaaataagggtccaaatttgcatgtggctacccagtttttccattactatgtgttgaaacgactgtcctttctccattaatagtcttggcaactttcttgtagatcatgttaccatgcatgcaagggcttatttgtgggctctcttttctattccattggtcaatatatttgtatggcagtgccacacagttttaattactgtagttttgaggtaagttttgaaagtaggaagtgtgagtcttccagctttgttcttcaagattcagtatcttgttcctcaaattcaagattgttttggctatttggatcccttgagattccatataaattttaggatgagtttttctatttctgcaaaaaatactgttgttattttgaaagggtttgcattgaatctgcagactgcttttggtagtattgatacatttaaaaagattgtctcccaatccaaaaacgtgggatgtgtttttacttatttgtgtctttaatttctttcatccatgttttcagtgtactacaagtctttcaccttgttggttaagttattcattaacatttcactgctttagatgctgttataaatggaacagtttttgtaattgtttttcagattgttcattgttagtgtatagaaatgcaactgattttttttatgtgtgttgactttgtatcctgctacttggctttatttgtttattctaaagcttttatgtgtgaaatctttagggttttctacatacaggattatgttgtctgaacagaaacaattttacttctttcatttcaatttggwtgcttttattttaatttctttttcttgcctaattgctctgattaggacttcagtactattttaaatagaagtagtaaaagcaggcattcttcttatgttcctgatcttagatgaagagctttcagtctttcagaattgagtttgatgtttgctgtgtgtttttcatatatcatctttattatattgagaaaattcccttatgttgctagtttgcttagtgttcttgttatgcaggggtattgaattctctcataccttttctgcattgagatgatcatgtgattttattttcttcattctgttaatgtggtatattacattgattagtttttgtatattgaaccatccttgcattccaggaataaatcccacttggtcatggtgtataatccttttatatgctctggattcagtttgacaacttttttgggttgtatttttcagtgttttctcagcaaagttaagagcatgtactctggacccagtcagcttggggttgaatctgtcatttagtaactgtgctactgtgggccaaccactcaatgccacatttttataatttgtaaaatggggttaagagtagttcccacccttttggtgaggattaattagtaaatatgtgtatagtgtttagaatagtggctggcacacaataaatgttatataaatgggttagtgttaaaaaattagaaaaaaatggaattttcatctgaatttcatatttgaattgataaattttggagaaattaagttaagttgccccatccaagagaatgtaatggctgtctattgctcaaaacttttaacgtattttaatacaatcaaatttccttttttcctgcatagtactcattattctcaattgctagttcttttttctttgcttttcttttttttttttgagatggagttttgctcttgttgcccaggctggagtgcaacagcacgatctcggctcaccgcaacttctgcctcctgggttcaagctattctcctgcctcagcctcccgagtagctgggattacagacatacaccaccacgcctggcaaattttgtatttttagtagagacagggtttctctatgttggtcaggctggtctcaaactcctgacctcaggtattgcctgcctcggcctcccaaagtgctgggattacaggcgtgaaccactgtgcccggctgctagttcttaactaggggcagtgtctcccacccttatttcctccgtgggacatttggcaatgtgtggagacatttttggttgtcacagtttaggaggatgctacttcatctagtagcatcaacaggctagtctccacaacaaatagtttatctggctaaaaatgtcaataatgccgaggttgagaaaccctattcttgaggtattgtttttgttgccattttgaatggagtttattttaatttctgattggttattgctatcggagggagatgttaacagattttttctgttaccttttatctggcacttgtgctcaactaaacttactrgaacttgagtctaatartttgtagattctggttgtttttctttgtagatgatctggtctcttcctttctaatttttatgtgtctgtctctaactctcttataacattggccagaacctttactattttattaaacagtagcagtggtaataggcgtctttgtagtgttctgaactttatggaatgagtttcaagtttcttaagatgaagtaacaccaaacaatataggaggatgtcagtcttagtttatcctgcctaagtattatcacttaaaatgtgttcttgaggcaaaaatgcttaacttcattgttgatcaaaaaaatgcaatttaaatcagcaatgaagtgatgttttgtatttcctagttatattgagaatttttctacaagtgcgttagccctttttcctctgtgagtatatttgtcttttaacaatttttcctcctctcagaattgtataagttatgacttgcagctgttatttgtggtatacttttaacttgttcgttttgatgtgaaaggttttaatttttatgaaaacacatttacttttttcctttgtgaaatcttttattgcttttatgcacaagaaggccttagctcctgaaactttcttctgagactttcctgtgatctttctactttctgctgtgatgttttcctggttgaaccaasggcacacttatcctttttccttcattctgaatcactcacctgacttcaggtgttacctcttcccctgacatgctaaaattgtaggtgatcataaatattattcactgtgtgtgtgcctccccaccccctgccttggttttcacagagcttaggatgtcatggaagtatctcagggtccgttggagatatggcactgaggtgtaggcttgataattgggcagcgttccaagtttcctccccttcttgaggtactttgagctcttttctgttggtagtctacatatgatcatctctgtgtaggtggtctgcataagactattggtttatatcttctgccatgagagagagaaagttggaaatatatactgatctagcatgagaaattagtaaatattaaagccaagttagtaaatattaaagccaagatcaattttgctacaaaattttactacaaaaatatttactaacttgtaaatatttactaactttttaatatttacaagatttttaatattttaatatttacaagttagtaaatattacagccaagatcagagtctgtttctgttgaatctaatctactttacatgattcttttttttttttttttttaaatttttggtgagatagggtcttgctctttcactgaggctggagtgcagtgacataatcttagctcactgcagctttgacttcccgggctcaagcagtcctcccacctcagcctctgaagtatcaggagttacaggcaggcaccactacagtgggataattttgtttattttttgtagagacgagagctcactgcgttgcccatgctggtcttgaactcctggcctcaagaaatcctcctgccttggcctcccaaagtgctaggattacaggtgtgagccacagtgcccagcacatgatactttaatattatatctctgcattggatatttctgacagaacgatccattgtcatcttccctttcttctaaaaccgagcccattatctttaccctttatccctgtggggagtgcttttctccccagtgctgcatcttccttgtttttttttttttaattctaccaccattctcttgtgtgtatactttgaaataaatctctcttaatggcacttttttaggccaccacattcagttgaactgctcagggctaccagtttattttttcttgagctcattgttgcttacctgctactagattcatgattaagtcccataatatctcctcacagtactatcataagagctttatacttgtttgccttatagctaggctgtaatcsctctgtcctttccaccactgtgcctcaaattaacatttatatagatagcttcattagacaaaatgaaatcttaagttccctggactaacattgaaggccttttacaatttgggtaggccctgggaggtgtgtatatgtagagataggcatttgtaactttttagcagtgtgttactaactagttatttagatctatccagattttaaaaatctttcgtttttattgcatatgtaatacttgtagtatgtatggagatgcaaaagcaaagaataaaagttgcccttaatttcactgtttagaaataatcattagtcaatctttaaaaatgactattttcttcatatttattctgtatattttgataagttgatacatttttatttttgtattgttattatgaatggaatatttatttctattattatttttcctgtctctctctcttttttttttttttcttgacagggtctcactttgtcacccaggctggagtacagttgcgcaaccatagctcactgcagcctcgactgcctgggcttcagccatcctctcacctcagcctccagagtagccggggctacaggcacatgccaccttgcctaactaactttacaaaaatttttttttggctgggcgtgatggctcacgcctgtaatcccagcactttgggaggcctaggtgggtggatcacgaggtcaggagatcaagaccatcttggctgacacggtgaaaccccctctctattaaaaatacaaagaattagccaggcttggtggcatgtgcctgtagtcccagctactcaggaggctgagacaggagaattgcttgaacctgggaggtggagattgcagtgaactgagattgtgccactgcactccagcctgggtgacagagtgagactctgtctcaaataaacaaaaaaaatcttttttttttttgctacggaaacgaggtctcactatgttgtccaagctgctctcaaatttctgggctgaagtaatcctcctgccacatcctcccaaagtgctgggattacaggcacgagccactgcacttggcctgttattttatattagttttttaaatatacaaacaaaagttactcatttttctgtatttatttcattggctgccctattgaaatatttattaagtcaaactggaccctttctttttttttttttttttttgtttctgtttttgtttttgttttttgagatggagtctcactctttcacccaggctggagtacagtggcgccatctccactcactgcaacctccgcctcccgggttcaagcaattctcatgcctcagcctccagagtagctgggattacaggcacgtgccaccatgccctactagtttttatgtttttagtagagatggggttttgctgtgttggccaggctggtcttgagcttctgaccttaggtgatccgcccacctcagcctcccaaagtgggattacaggcacaagccaccgcccctggcctttcaattaacaaccctttcaattaacaaacaaaatagtgaatagaatgtttcagggaggaaatagtataagcaaaggcatggaggtctgaaccataaaggtatttgggatgaactacaagtatataatttgatattacagagatgtaaattacagtgtcagagagagattggaggtgagaccggggaggacccagaacttaaaatttttgcttgctatgtttaggaattggaatattatcctcgaagtggtagagagttatttgaaagattttaaatagggagctggtgtgattaaatattttaaataaatcagtctggctctagggtggagaattgaattgcggcaagcaagaagactaggagactattgaaatattcaacaggacagcaggggcgtttatttattaggacagtataagattagagagaaagaggaagggatggatttaacatacattttacaggtaaaatagtcaggatatggtagaaggggaagaagggtaggtagaaggggaaatcaagactgatttcagggttttttattttctagcttggatgactgcrtgatttcattacataaaatgaggaatttggataaaacacataatcttaaattttacttaggttcttgttttggaggacagagagggtagaggattgttagaaaagaagctcaatttgtgggatgtcctgaccaaggtcatggtgttacatctaagaaaatttttacaggaagcagtagtaaaattaggatgtgaaataaagatgttggagtcatcaggtgctttgaaaattaatgttaacaacctttttactacctaacataactaaagggtacatcacatttcatcagtagaagcagtttactggtgcttgaggagcaaggattggggagtgtttgaggagtttgggagaagggaatactccccaaacccaggtgactcaatgatttctgttctggttaacaaccatggtctagttgaaaagactaggataatgtggagatctatgggtttattatctttttgttaatggaaattcaaagcatatacaaaagtagatggaattctatgaaccccctagatacttactgtccagcttcaatagttatcaactcatggctctactattatttcatctgtataccactcattctatatttatttgaagcaaatccctgacaatctgtcttcatctgtaaatactgtagtatatatctataaaagataagaactaagaagcactataaacatcaacaataatttcttaatatcatacaatactttgtagtgattgtttttccaaagagtattttcaatggagaattgggattatagtaaggtttttttctttattaaatgagagggaatgaaaaatgagaaggtagaagcaatgaatataaactgcctttcttcaaaggaaaacaaggtgtatagtgcctaacatgtatacgaaattacaggctatatgttttaagtgataagggatagttgggtggtttgtagacttagcaaaagagctagtagggaaatgaaatattgacatggggacttggggagcaagaacaagaagaatatctttttttccttatttttttttttgaaggaaaaatatttttgttcttcttggagaccgagtttcgctcttgttgcccaggctggagtgcaatggcacgatctcggctcacagcaacctctgcctcccgggttcaagcgagtctcctgcctcagcctcccgagtagctgggattacaggctagcgctaccaggcccggctaattttgtatttttagtagagacggggtttctccatgttagtcaggctggtctcaaactcctgacctcaggtgatcgcccgcctgggcctcccaaagtgctgggattacaggcatgagtcaccatgcccggccaggaaagatatttttatttcatttttaaataaccacaatatttactaatgggatgtatgttgggcactgcatgacttctcagaccctggaatcatattgaacaccattacctcattttctgtgccacaattatttatgcatggtatttatttttaaaaaaataggttaaatttaacgatttaagttttttaaaaaattgacacaattgtacctatttaggtgtacatagtggtgttgcagtatacataatgtataatgatcagatcagagtaattagcatgtgtatcatctcaaacattcattatttctttgtgttgggaacattcaatattttcttcctagctatttgaaactttattattattatatatttttttcagatggagtctcgctctgttgcccaggctggagtgcagtggcgtgatctcggctcactgcaacctccacctcctgggtcccagttcaagcgattctcctgactcagcctcccgagtagctgggattacaggcatgcaccaccatgcccagctactttttgtatttttactggagacggagtttcaccatgttggccaggctgatcttgaactcctgacctcgtgatctgcctgcctcggcctctcaaagtgctgggattacaggtgttatgaaactatattatttttaactactgtcatcttatagtgctatggaacactagagattattcctcctgcctggctgtaattttatatcctttaaaaaatctatcccacaaggataccttattttctgagatagtattgaaggataaagagtgattgagggagagacaaaaagttgaaccgataattcataactaatgacttaattatttttggatgaactttggagagtattgaggttgtccctaggatgggttctcaatattagtaaaactttgaaatagttgttgaagagaatcagaaagggagccacggacaaatacaaagattgcttagtgggattaagattccacctgagccaggcatggtggctcatgcctgtaatcccaacattttgggaggtggaagcaggaggattgcttgagcctagaaggagtgtttgtgagaaagtggtttaggtaatcattcatgtgtagattgactaaggaaatgagatgaagaagagacacgtagacagtgaaaggagtaagccctagactgtgtgtatgaaactgaggagcagatgccatggtagtgtaagcatgagaaagctgtgaatgttggaagattaggtcatattggttaaagtgtcgggctgtggagtgtagcacatgaagtaggtctttggaattgaaaatgtctaggaatcctgagacttgggtttgcagtggacattgcctatggttgtgggacatatggtagggcagggcagaaataagactaagatgcagataccttcagtgaatgtgaggagcagtggtaggtggtcagaaagtgagtagatggcactgataaggaagattaaacggtggtatatatgtcgaatggaggagagaaaatggtttgggagagacactatgggtaactaagagaattcagagtgtaggagactatttctctgagttttcagctatgttccagatagttgagctatttctgtaaacagatgtccaagaccttgggtttacccataaagcttaatattttcatgtgcaaattaaaataaagcagttacttgctatgaacagcatggacagtaaattttctaggatacttttgaagaaaagatttattacttcatccagtaacatttgaaatgttgagayctagaggtatggaagaagaggaagagtgatgtgatggaggtgaaatggagatggagagtggtatgagcagaggcagttggggctgaagtcaatgaaacttaccatttaacctagaatagagcatggaggaaggagtagttggggaagaaaggaagcaggtttagcaccaggaaacctacctctcacatgttcaggcatttcacccaattctctcaaaccacagttctcgcataaagataccccttatagctgtttttggggtgcagagatagaagatgtatctctgagcagtgaaatcaggggagtataatttaggtttgccattcaatatgcttaagtgttttgggacttaaaaagcaaaatatcaattgtcccagataactacatacagaatcacccatacactatttagccagtagaggtgttgctgtttctctggagagcctaatgtttaataagagtacatgacaggccaggcatggtgattcacacctgtaatcccagcacttcgggagatcgaggtaggaggattgcttgaattcagcagttcgacaccagcctgggcaatatggcgaaacccaaaccctgtgtctctaccaaaaatacaaaaaattagctgggcatggtggcaggtgcctatagtcccagctactggggaggctgaggtaggaggatggcttgagccggtgaaggggaggttccagtatgctgagatctgccagcacactccagcctggtgacagagtgaaatcctgtctcaaaaaataaaagcagaaaaaataaaagcaaaaaaaaaatgacagaaatactgcatgtttgtaggaattgagatgtaagaaatgagtctagtaaactgttaattccacataacagcctgcattaaatctgatcattgtattatgctatactaacctacatcaataatcatatcccagaattttgtacttagtataacagtttttgcattcttactaattccgtgggttttttatatctcattgatgagagtgagcttgtcagtgggaaacactagagaaataaagaggagaarcctgatcagaggcatccctggagtatatttaatcaagatgattgccttgggcagctggcaggcatggtgctccagtgagcagtgataaaagtgtatggttatgattattctgatacttttatacttcacttaacttgttcttcccctaattttacagtctgtgggattctgaaaaaccttctgttgggggaatactccagttcttgaaccatcctcaaagtttttcaccacctagaaattaattttcttatagtagtgaagcataatatttatttaatagtaaatatgctactgtataataactaccacagtttcatattataaaagtacattgtcatgacttagcctacactgtgttattggtgtggtttactgtgtccttcaggtttgtgataagcaaatgctcacaacatgattatggtctgtacaaatttagccaaaattgaaatgggtgtaatattaaaaaaattaagtatcgaactttgttgtgcaaaattgatgattctttgaaaattattgtttacgaatcacataattttaaggttggtaggtctagtaaattgtaaactgtctatacctttgctacacggtcatattaagtaaacaaacatctttcctcagttgtcaagaatatcattcaggcttggcgcagtggctcatacctataatcccagcactttgggaggctgaggcaggtggatcgcttgagctcaggagtttgagaccagcttgggcaacatggcaaaaccctatctctacaaaaaacacaaaaattagccaggtgtggtggtgtgtgcctgtagtcccagctacttgggaggcagaagtgggaggattgcttgagcctaggaggcagaggttgcagtgagctgagattgcgctgttgcactccagcctggacaacagagccagactctttctcaaaacaaacaagaagaatagttgttctactccagcctcctgccttggtcattacacttgcatgtccctcaagtcttagctgaagtgtcacctccttagaaatataagaccatccttttgaagtaatttatcacctcatagaacttctcatctgaaactctcatgtttatctctttattgtctgattctatgaactagaaatagcaacttcttaaatacaggaatttcatctaatttatttaccattgtttgtagctaattagaatagtgcctagcatagaggagttgcttcgtaaacatttcttaaaatgatcttgaataagtaatttcaaaacaatgcttttatagaacagagagatgtcgtatttgtgatttgtgtcccccaaatagatacgttgaaatcttaattcctatacctatgaatgcaaccttatttggaagtagaatatttgcagatgtaatcaagttattaaacaagctcataggcatttagcgtaggccctaatccaatatgactggtgtccttataagaagagaagacagacacagggaagagaatacagtgtgatgacacagaggcacacagagggaagatggccatgtgaagatggaggcagagattagatttaatgctccaacaagccaaggaacatctggggttaccagaagctggaacaagtccagggaggatcctcccctagaggcttcagggagagcatggccctgccaacaccttgattgtggtcttctagcttccagaactgtgagaataaatttctgttgttcaaagccatccagctttttgtatgttacagcagccctaggaaactaatacaagggaagagccttgcaattgcaaagtataagaataaaagataaagggagaaattattcccatacaaaattatctggttttatcagcagtttcttttattgtccatcaagggttgcttgaaattgtgggccgggtgcagtggctcacgcttgtgatcccagcatgttgggaggccgaggcgggtggatcacttgggagtttgagaccagcctgaccaacatggtgaaaccccgtctccactaaaaatataaaaattagctgggagtggtggtacatgtctgtaatcccagctacttgggagtctgaggcaggagaattgcatgaacccaggaggcggaggttgcagtgagctaagatcgcgctactgtactccagtctgggtgacagagcaagaatgtctcaaaaaaaaaaaaaaaaaaaaaaaaaagaaattctgtctgttacacagtacgtgttccatagagttccatcgaactctatgggatatgcaaatagttttaagtgcagtttatttgtaatgagtagttataatttttgatcttcaagagatagacaccatattgactaggagtagggagggggaacttacatagcactaatgccaagcttttgtaagtgtattactaagagtaaagaaatgttttgaaccttggggagaaagttggaaggtcatttggtaaagtacctcacctctttttcttcatgtccttagatcttttattgagttgtattttagtgtagagttgggagttagtttgggttctattccttctctcctgaaataatgtcatactttaataaagttgcaaaaatagcacagaggttttcaaccctgtacccctcacctagcttccccaactgccaatatcttacataaccatagtaattgtcaagaaatcactgatatgatactattaattaaaatgtagaacttattcaaatgtcatcagttgtcctactaaagtcctctttctggtgcatgatccagtgtgtgatcacacgagtttagtttttatgcctctcctgtaatcagggacagttccttagccttactgtttcatgaccttgacacttttgaagaatactggccagttattttgcagaatatcctgcagtttgggtttatctgattatacttgtgattaaattcaggttatgcatttttggcaagaatgctaaagaaatatagttgtgtcctttgtttatcctattaggaggcccctgttaatatgtctcactattagcagtgttaactgtaatcagttggttatggaggggtctgctggatttcttcactataacattaccattttcctctttataattagtttcctcaggggagatactttgatattctgtgtaagttcttttaatacgttttaaaaaaaaggatttcctggagttactgtacttttgcccattagtattcattattgattcccatctgaaaaaatattgtgatgttcctcaaatggtgattttcctatttctgtcattttgtttatatttattctacttgaagaagaatctttctcttctcccccaattttcattcaactttgtatctgtaaaaactcttagacagctcttctattcattatgttaggatccattacagtttcatatttatatgaaaaccatgaggtttttcctaattatagcagtgttcaagatgtggaagatctttcagattttcagataaaatgttatttaatggggccgggcgcagtggctcacgcctgtaatcccagcactttgggaggccaaggcgggcagatcacctgaggtgaggagttggagaccagcctggccaacatggcaaaacctcgtctctactaaaaatacaaaaattagccgggcatgttggggcgggcgcctgtaatcccaactactcgggaggctgaggcaggagaattgcttgaacccgggaggcacaggttgcagcaagccaaaatcgcgccactgtaccccaacctgggtggcgagcaagactctgtctaaaaaaaaaaaaaacaacaaaacaggccaggtgcggtggctcatgcctgtaatcccagtactttgggaggctgaggcgggcggttcacctgaggtcaggagttggagaccagcctgaccaacatggcaaaaccctgtctctactaaaaatacaaaaattagccgggcatggtggcgggcacctgtaatcccaactactcaggaggctgaggcaggagaatcgcttgaacccgggaggtggaggttgcagtgagccgagatcgtgccattgcactccagcctgggcgacagagcgagactccgtctcaaaaaaaaaaaaaaaaaagttatctaatggtggaacagtagttttgagaagaactcacaaatagctctctttggatttaaagtaaccacacaaaattagatactttatttttcaataaacaatatttgttcggaattttttgttataaaataacttttcctaaatgaatcaacaaaataatgaaccactacaacttgttatcttttatttgattttggccttattttaaaacgttcatttagccatagaatttattaagaactcatttattctggattgtggtcccagagaatttttcactgcatcatcaaactcaataggtacatattctttcttcaaaaacttacaggtttttgtgagtgatttttgtagtaattatgtggaaagggggttgattagataaggcctttaagcttgagttataaattgtgggagaaattttagtgtttatgggaagtttcatttagtgggtttaatatatacatgtatactttttcacacacatacatagtttaaaggaaattgaaaatagaaagattggtcttcagtgatgctttctttaccatattaaaaacaccatgtgtatttttgttaaatgttgtaattttttcttatggctgtggtagtgccaatgtttgtttatatgaacgcttgaaatgatttctgtatgaaaatcatggggctatacaaacttacttattttggtaaggttttgttgtatttataaaagacagttttctcgtaagtactgttagttaattcttttaggatctctttaatagtagatgtttattttcttaagccagaggacatttttggaatatttttattgttccttatgtacagccactaaactagtgatatgcttttcctaatgaagctattagttgtcacacaattcttatttgtatgagtatgtagattgatttgtaaaatatttaaaagcatgtaatttttaactggagagaggttgagtgatagtggttatttgaatttggggaaaattgtagtttttaaaaatcataataatttactttccttttttctttttggtgacagggtcttgctctgtcatccaggctggaaggtagtggcccaatcatggctcactgcatccttgacctcctcgcctcaagtgaccctcccacttcagcttctggaatagagtagctgggactccaaggcctttttttttttttttcttttttctttttttgagatgggagtcttacttatgttgcccagactcacttttcttataatatgcatgggaacataaatacttgtaattttgacaggaaggtgtgtgtgtgtgtgtgagcattctctcatatatttagtgcagggtgatttaggataaggcaagttaattgtcttgaggttcatttttacttgttagctgttttaaagactgtgacatttttaatgctgcttaaatttagagcaatccaatcaataacatgcatttatttatttatttagagacggacagagtctccctctgttgcccaggctggagttcartggcgtgatcctggctcactgcagcctccgcctcctgggttcaagtaattctcccacctcagcttcccgagtagttaggattacgggcgcatgctaccatgcccagttaattttgtatttttagcagagacgagttttcaccatgttggccaggctagtcttgaatttctgacctcaggtgatctgtccgcctaggcctcccaaagtgctgggatttcaggcgcgagctaccgcacccagccatgattttttgttttttaaaagaaagctgctaactttgattagtttgctaactctaagagctttccttgtttttaactttgtgtactctccttaaaaataaatatatccataaacacatatacacacacatatttttaattcaacaactgtttactaggtttcaagcattaagaatatagaagtgaggttggacttggtggctcatgcctgtaatcccagcactttgggaggctgaggcaggcggatcacctgaggtcaggagtttgagaccagcctgacaaatatggtgaaaccctttctctactaaaaatacaaaaaattagctgggtgtggtggtgggtaattgtaatcccagctacttgggaggctgaggcaggagaatcgcttgaatctgggaggcggagattgcagtgagctgagatctgagatcgcgccattgcactccagcttgggcaacaagagcaaaactctgtctcaaaaaaaaaaaaagaaaatgcagcctgggtaacaaagtgagaccctgtttctacaaaaagtttttaaaaaattagccaggcatagtggcgtgtacttagtcccagctacttgggaggctgaggccaggatcacttgggcccaggagttggaggctgtggccaggatcacttgggcccaggagttggaggctgcagggagctatgaattgctccactgcactgtaacctgggctacagagcaagacctcccatcttaaaaaaaaaaaaaaaatgtgttcacacatatgtagaagtgaacaaaaaggacaaacaataccttccctcatgaaacttacattcctttatgcttttgtcttcctcctgtagctgtgaattaatattcattctrgagttccaggtactcttccagtcacttaccacaataactgtatgctatatgggttctttttttattccagtttgatgtatgagaatacttaggcatagtgagttgcaaagctagaaagtagaatacgtggtatragaactcaggtaattgagccccagaaccgaaactcttaaattactcttacatttcttttgattttaaggtttatgttactgagatattttaaaaatagtcttttacagtacaacattcagagagaaagagcagaataatgatctaacctgctgttgccagtgaacctcatcgctatcccattgagcacatcattcagttttggcttaaaatatccttctgtctgcttaatgtttgagagtttctaggctgatattttcaaaagatttattactcctctctttcttgagtcttaatgtttcctacttatttatcttttcgtgtgaattgctgtgcaacttggaaaatccaattttatttttggcattctttttgttcactgaaagagctacaaaatctgtctcacaggctaaattttactgggaaaagagtttggaactttattttcttgatgctacttaaacctttatgctacagagaatttaagtatacagtaggctgtcaaatatcattttgttataatgttgatgagggaaagaaaaatagattgcttgctggggccattgtgcggagtttgcacattttccccatgtctgtgtggatttcttttctttgggtactctggttttctcccacataccagatatgtgcatgtgcctgttaattgacatgtctaaattgtcctagtatgagtagtttaggtatgtatgtgagtgccctgtgtgatggaatggtgacctgtccagggtttgttcttaccttgctccctgagctgctgggataggctctggccacctgcgattctgagctggaataattgggtaaataattatctgacttgttaaaaattaatctttcttaaatatatgtaaagcttaacatttattttagtgtttaatattttaaatgttttggtgtttgtttagaagtttgctgatttttttgtgaccagaagtatgctgtaggaacttaactattgtttatatcagttagcctatgctaaaattggttttgttacatgtcattttgctttaactcttagtttccaagaacccatggttgacgttaagacttagtgtatattcatgtatgttatattcaataaaaagttttctgttaatatacttgatttgatataaacatgagtaaaatagttaaattccattaaaaatagtaaatgagtctatctcttctatgtagatggagtaccacttacagaaactgttgaaaagtggcttcacaaataacatcattgtcataattataatttttgatttgcttagcaaatcatgtggcaccccactaccaccacctgcgttgtatgtctgtgtgtgtatacattgctaagagattcttttctttcttttttttttttgagacagagtttctttcttggtgcccaggctggagtgcaatggcgtggtctcggctcactgcaatctctgccttctgggttcaagtgattctcctgcctcagcctcccgagtagctgggattacaggcgcgtaccaccatggctggctaatttttgtatttttagtagagatggggtttcaccatgttggccagtctggtcttgaactcctgacctcaggtgatccacctgcctcagcttcccaaagtgctgggattacaggcgtgagccatggtgcccggcctctggatttcttacattacaattttattgtttttcttatatagattctacgtattttgttggatttacacctaagaatttaattcattgatgtgaatgcaaatgatactgtgtttttcatttaaaattatatttgttcatcgtctacagcaaagtgattgacttttatatattagccttgtatcttgaaaccttgctataatagcttattagttccaagagttgttttattttgcctttgtcagttctttcagattttctatatagacagttttgtcatctggaaataaagttttatttcttctttcccaagctatgtaccttttgtttattttctttctcttgtcgcattagccaggatttccagtgtgatgtgaaaaaggagtggttgagaatagcatcctagcttttttcctggtttaaccggaaaagctttgagtttctctccattacatgtgatgttagctgcagcgtttggagatactctttatcgagttgagaatgttcccctatatttctcatttactgagagtatttattatgaatgggtgttggattttgtcaagtgcttttcctttgtcttttggtatgatcatgtagtttttcttttttggctctttatatgatgtattatattaattgatttttgaatgttgaaccagccttgcatgactgagataaatcccacttggtcttcatgtaaaattctttttacacattgtgtgttttgatttgctgatgtttctgttgaggattttcacatatatgtttattagagatattgatgtgtaattttcttgtagtgtttttgtgtagtttggtgttacagaaatgcctcacagaatgaattcgaaagtagttccttcttgtctcttttttggaagattgatgttaattctttttaaaccatgtttggtataattaagcagtaaggccatctggtcctgggcttttcttcctggggagatttttgataactgattcagtgtctcgttatagttcttttcacattttttgtgttttttgagccagttttgacgatttgtgcatttctaggaatttgtccatttaatatgttactaaatttgtggacatatgttgtttaccgtattcttttgccccttctctctttttttcaaaagtcattttatttaaagatatgtcaattttgtttaccttttccaacaacaaacttgtggttttattgattgtattgtttttctaatctcaatatagtttatctgtgcactaattatttcttcagtttgctgcctttgggcttagtttgccctttgtattttttttcttcagttgtagaattaggtcatttatttgagctttttttttttttttccctaaaagcttgatttttacaactgtattttcctctgagcactgcttttgctgcatcccatacattttgatatattgtgtttttgtttcatttatctccaagtattctaatttctctggtttttaaaaaaaaattttgagattctgttgttaagggtttataactttatgattttttatatgtttgtaaggaaatgaattggggacccccccattatatggtgccctggttttttttttgtttgtttgttttgggggctgacgcagggtctctgtcaccccaggctggagtgtagtggcccagtcatggctcactgtagcctcaacctcctaggctcaagtgatcctcccacctcagcctctcgaatagagtagctggaaccacaggtgtgtgccaccacgcctggttagttttaaaattttgtttttgcctttttaaaattttttttatgtttatttatttattattttttgaaacaaggtctcactctgtcaccgagactggagtgcagtggtacgatcttggctcactgcaacctccgcctcctgggttcaagtgattctcctgcctcagcctcctgagtagctgggacttcaggtgcctgcccccatgcctggctaaattttttttttttttttttttttttttttttttttttaagtagagacagggtttcaccatgttggccagtctggtcttaaactcttgacctcaagtgattcgcccgcctcagcctcccaaagtgctgggattataagcgtgggctactgtgcctggccagtttttaaatttttttgtagagatggagtctctatatattctgcctgggctggtctcgaactcctggcccccaccagtgatcctcttgcctcggcctataatatctgtgcccctgaccccccccccccccttttttttttgatatggaaacttttgctctgttgtccaggttggagtgcagtggcacaatcttagctcactgcaacctctgccttccgagttcaagtgattgtcctgtcccagcctcccaagcagctgggattgcaggcacctgccaccacacctggctaatttttgtatttttagtggagatggggtttcaccatgatggccagggtgatctggagctcctgacctcaagtgatccacctgcctcagcctccaaagtgctgggattacaggcgtgagccaccatgtctggcctccctttagcatttcttgtagggcatgtctagggacaaattccttctgctcttatttttctatgaatgtcttaatttctcccttgagggatagttttactggttatatagttcttttttgatggtttttctttcagcactttagttatgtcatcctactgccttttttacttcaatgatcacattttttaatttttattttggggccggggtgggggtactttctggccgaaactggaaagcctgctggacaaattcaaacattaacattaaaaaaatggacattttgaatattaaaatgttttcactctgggaatcatcctttcacctcccccatgccctgtttgattttactgactgttaaaatctatagtcatctgtttatttagtgattccccgccctcccccaactacttttgccaagactgtctttattgtcctgtgtggacactgacatttttcatcttggtggtcaaaccagtaacctgatagatttacctaaagaattggcacccaaaagagggaaaaaccctctgtgggtatttgcagataggttctttgcggaagtatttttgcaataaatagcctggccatttgcagcttggccttagtcttcatcttctgcttgcacagagctcaaagatcaattagaggtgcaagcctatgcttctctcaggcctcctctgaccatgcttttagccttgggcatgcgtgtagcaccttgaattccccagaatacgtgggagtctttgaaagcccttagtccgtaacatattttcctccttagactctttattctaaggctttacatattgctgcttgtcttgtatgctgtctcttaccccagagagcttatgtgtagtatatatatttaaatcctttcagcagatgccagctgggaatctcttcaaaatgcacagctatcatttttgagaaggaagttggtattgctcccacaggtaccagcaagttgcaccaagagtttgatctgctgtcctcattgacactgttgagttggggaatgggcgatggtaggcaagtaagcaaaagacgccatagtgccttctcaccaaattttgcagcttctttctttgttaagcacccctctctttgtaagttttattagattcaggaattctgtaaaagttgatttcagtttttgtcaacccaagtgttgtttcactggagaggcttattcttgaagttttctactcatcgatttcccatggtatgactcctttcatttttttgaaagattatcacttggtatgtaattcagggttgactttttttttccccctctgtcagtacttttaagatgttactccattgtctttgaacttacatagtttccattaggaagactgatactgatctttgtctttctgtatgtatgtatcctatttctttagcttccttttgaattttccctttaactgtggtttttagcagtttgtgtaktttgatgtattctgcttgggaattctctgatcttacatctgttttgatatcttacatgattttttgaacattcttccccattatatctcttcaaatatttattctgccttgtactttgtctttctgtctggaattgtaactatacctgtgttattccatttgatacggtataatggcctagtgtggactgttaggtcctactacccctgcttttgaaaaatatgagactttatgttttttagagccattgtaggttcacagcaaatttgaaggaaaagtaaagagtgtttgcttatattctctgtccctacacgtgcacagcctaccgtactatcaacgtcctgcacgagagaacattttttatcagctgatcaacctatattgacaagtcactatcaccccaagttgctactttaaattagggttgactcttgctgttggtgtcttgctgtttttggactcctgctgtttttacaaatctgtaatgacacatccatcacacatgtttcactgccctaaaaatcttctgtgatctgcctgttcatcccttccacccactaaatccttggtaaccaccgattcttttactggctccatagttttgccttttccaaaatgtcatatggttggaatcatgcagtatgtatccttttcagattggcttctttacttaataatatttaaggttctttcatgccttttcaaggctctcaagctaattttaatgccaaataatatttcactgtgaggatgtgcgtagtttatttattcatttacttagtgagaacatcttagttgcttccaagttttggcagttatgaataaaactgctataaacatctgtggacattggttttcagctcatttgggtaaatgccaagtagtgtgatcactggtagtggtgtggattgattgtagtttatgaattttgtcatcctcattttattttaaaataatttcttttttttaattgacaggattgcctttgaggttattttaaaagttttgagttgtacagcacttgattattttgctgcattgtgaaaggacctctccagcaatgattacttcagaattaccagtgttacagtaagtattgtaattttcttttttttatatttttwaaggaaaattttggacaacttatttctttatcaaaatgctstcttcgatgatacatttcaaatatgttctttgatattgggacaatatctttgcagtgtaagtagtagtagggtgtgtaattaccgtatccattcatggcttttgctattgaactgtcaacatgttttctgatattcaacaaaaaagatgttaatgtcctatatcaggagtcagcaaactgtggcccatgggccaaatatggcatgttgtctctttttgcaaaataaaattttggatgagagccatactcattcctttacatgctgtttatgactactttgtattacaagttgtgacagtgatagtattgcgtggaaagcctaaaatatttagtctggccatttacaaaaaatagtttggtgtcacctatcttataccatactctttctctaccccttctctaccccccctccctgctcacttccagctcttttattatgattctttctttttccttagattgagattgttgaggtgttccggctaccagaagaaatgtaagggatacaccagttgacatttttgatggcgtcccattagatttgttggagttaaggacagatttagaattgggacttatttttatttttattttcttttgagatggaattttccactgttgcccatgctggaatgcagtggtgcgatctcggctcactgctacctctgccttccaggttcaagcgattctcctgcctcgacctcctgagtagctgggattataggcacgtgccaccatgcccggctaatttttgtatttttagtagagatgggtttcactatgttggccaggctggtctcgaactcctgacctcaggtggtctgcccacctcagcctcccaaagtgccgggattacatgcatgagtcactgtgcctggccagatttagaattgggacttattctgggaaatgtgatcacaggaatggcagatattgttcctttcatagcttttatcatgatgcaagtcgggaatctgcatactttgattctgtataacaatggtttagatataataaaagtgatgagcactttaagyagttatttatatattattactactcagttcatttacataccttattttcaagagagaacctctgattgatctcttggccttctttttttcccttccagcattctaagacacagagctatccaaatttctttaaaccgcttgaaaaaccatcaatactgtcctcctgtcctttcgccgacatatgggagataaaatttatttctgcctacttatttcttttttacccctgtacctgagcatgatatcatatatataaatatatgaacatatataaatatggtataaataccatatttatatgatatttaagtttggagggccccttatagtattttctttcttttctttgtacttatacacttctgcccttacctggccaagccactatctatttaagtcttagctcaggtcttatgcctccagaaaagtacttaatgtaacattttataattgtctcttgttttttctgacccatctcctaaactgcattgtgtgccttatttttgtatgtcctgctgctaggacactgttgggtattaggtaggcctttaatagctctttgataaaatatgaaacagaggttatatttaaattgaagttgtattacatgagtttgtattgacattatatctaatatatcatgctttgtgagtgaatttttttcaaaagaatgtaaatctgtaatatgtctgtgggtactggacagtggtgatctgggagctggataaatgagctctggtttagatctgtcagccgaagatggtactcttggttaaattgagatgtccaattttggttttaaaatgtagacactataaagaccactctagtgattatccttattatttcttggcttacttagatattgtaattgctgatggatttgtcaccttagtgctgtttactattaagcattgtcaaaacattatcatttactacattttatattccgggaagcctactaggttctgggtagatataacatgtagagcagacttagttctttttgcaaagaagcttgtaaagttagatataaatcaaataatcacaaatacatagttctaaactatcattggtgctgtgaaggaaaagtaggaggtattatgagaattttaacacatgcctttgtttagtctacttttctaaggaagagacagttgaactgaggtcttaagtggggtttaggagaagaagaagggagcaggctattaggcccagactgagatkatgtcatgcaaggaccctgcgatatgtttgaaggcctgaaataaagcctccccccaccccttttttttctccagcactggggatggagagtgacatgagataaactgtgagtagggaggaacaatatcatatcagtacctgctaagtcatgttcagaattatgtttttttctcttcactatgtgtattattccattttcacactgctataaagaactacctggaactgggtaatttatgaagaaaagagatttagttgactcatggcatggctggcgaggcctcaggaaggtgaaggggaagcaagcaccttcttcacaagacagcaggagagagagaagtgggggagtggaaggaagtaccacactttaaaccatcagatctcgtgagaactcactatcacaacaacagcatagaggaaactgctcccgtgatccagtcacctcccaccaggtccctccctcgacaggtggggattacagttcgagatgagattttggtgaggacacagagccaaaccgtatcagcatgatagagatataataagctatatacttagaaagttacttggtgcagtatagtattagatgggaaaggccaacactagaaacaaggagacctgtcaggagaaggatgttgcagtatctagggaaaagatgataaactagttaccctggagatagaaagaggtagacagaatttagagagctctagggagcaaaatcattttttaaacaagatttgatcttactcttccatgctcttaatttatgtctagtagtgttataaatgtgaacattagccatttgcaggagttttgaagagcaattggtcaaagtttgaatttccataccccttgacctgtcattttcactgcatatatcctaaagagaaacttgattatgtagtaagatttatttatgtacaagaacagtcatttcagccctgtttgtaatagtgcaaaactagagacaaactaagtgctcaytgataaggaagtagctaaataagttcagtgcatattatggagtgccattcaggaatctaaaatatttatatggaagattctcatgtatgtaayacttaaaaaattgaaatattgatatttatattttgagagagagagacagagagatgcaaaagcctaaatatttatggcagcgtcaractattaacagtggtattctgcagatgggattcagagttaggatgagataaagtgaaacttttccttgtattcttatatattttctgttgctcgaaattttctttttcaaaagcctagaatttgttttcttatgtcttaataattaaacatacacatactaacacataacagtgcattagctgtttgttggcaatagttctcactgtttaagctgactgcagttggcagcattattaaacaaattgtacttttctgactcttggtaggggcatcaataaacaatactgctgaagaataggttagtttcactaatgggtcagtaattatattctagaaccaacctgctcctatagttgcctggacacttgtaagcatcaaaagcacttggagattttgtccacacaagataaatacgaaacatagtatttgcattgtagtatcttaacatgaaaatagaaaattcaggttgatcttgagatctaactggactctgccacttactaagtgtgcgactgtggacaagtttatcgggttttcagatctttcatttcctcattcataaaatcaggaagataacatgcttcttacaaggtttttgtgcatatgtattatagataacatatgtaaactgacacatagtctatactgaacatggcctatttggattgtagtgaggagaaaaagcagtatgattcattgttctttagtagagacaaataagattgactggatccgggttggcaaatactgctagtggttcagatgcctcttttaaataaaatgttgaaacatagccacacccattaatttgcatattgcatatggctgcatttatgttatgtcaccagggttgagtagtagctatagagaacttaagacccataagcctaaaatatatactgtatggttttttgtttttttggtttttttttttttttgagatgtagtctcactctgttgctcaggctggagtgcagtggcgtgatcttggctcggccaacctacgcctcgtgggttcaagcaattctcctgcctcagcctcccaagtagctgggactataggcgcacaccaccatgcctggataatttttgtatttttagtagagaaggggtttcactatgttggccaggtaggtctcgaacttctgacctcatgatctgctggccttggcctcccaaagtgctgggattacaggcatgagccactgcacccggctgtatggatctttatgaaaaagcttgctgaccctggacatcatttacaatattatttatagtttcattkttgttgttttgttttgtttgtttttgagacagagttctactctttcgcccaggctggagtgcagtggtgctatctctgctcactgcaacgtccatctcccgggttcaagcgattctcgtgcctcagcctcccaaagtgttgggattacaggcatgagccactgcgcccagtcttatttatggttttaaataccagattaactttaaagatatataagttagagtaatatgataactttgaagatttacaagtgggtaagtaatgatgtgagaatattactggcagcggtgtgtagaatggcttgaataagcagcagtagggagataaattgagattatcatggggagtggtgattgtggtaataatcctggaaagagtgagaaacagattatattgttctgagaaggatggctgaggtaggattatgttagcaggaggcacaagaagactgatatcattctatcaattcgagtttatagacaggataatggtgacaataaatttgtataataacttaaagcatacgtatgcataacttaaatcagttaattaattgtatctctgtgagtagaaagtcagaggtaagtcaggattggattcaattttagatgtggcatttggtgaatttgaggtggcattcaagtaagtatgtcatgcatgcaagataaaaatcctgagtcagagatctggaatgcggtcaggtgtactgatagggtattgaagtcatttgcatagaagttacacattaactggatgaaatctccaagggagtgtaatataaatggagaagagcagacctaacagttgagctttaaggaagagggaatgagcctaaaagagcatttggtgaaggagattgagaaatagtagattgtgagttggacttaccatttgctatgtacttttcctactctttacaattttatgcagtaatgtagaatttagtgaagagattcttgttcatgctgtctaaaccttttcaatgctgtgttgaagccagcttgtattggcctgtgagagttaaatattaaatttttaggaattttgcaaggtagctaaacacaacatatctgttttaaaaagttaacttatataagcttaaattaaatgtcatatgaaaaataaaaatagtaaatactcaaaattcatcacttcctaattatttcatgttactatttatgctcttgaagttgttatttaaacctgttgtgtctttgtggtagaaatatgttttaatgctgtactactgtttgtcacttcccacctcactttggttatgccactttggtcatttgaaattggctatggtaggaatatgtacaccgtgaaaatcagcaaatgataaaaatcaatgcttaatttattgttttgttgattatagacttaagaaagtgatagagaaattgttaacaatgcagattcaacttaaaggtgtatcggatggtctatacccattacaatacaataacaaaaaattgaggaagcatgtttcctcagcccttatctgagtcagcagagaagttgctcacaccattgactaatgaatgaagtttcaacaaatgtctttataattttacttgcatcctactcattaaagtgaacaaaaatagaaaccacctttcatgttaaaattcctattcattcatcagttgcagctgtaggttagattccaataattggctgggcacggtggctcacacctgtaatcccagcactttgggaggccgaggcaggtggatcatgaggtcaggagatcgagaccatcctggctaacacggtgaaaccccatctctactaaaaatgcaaaaaaaattagccgggcctggtggcgggtgcctgtagtcccagctacttgggaggctgaggcaggagaatggtgtgaacccgggagttggaacttgcagtgagctgagattgtgccactgcactccagcctgggcgacagagtgagactgtctcaaaaaaaaaaagattccaatataagagttgggcaaaaattatctttaaaattattttgtgagaatcggttatgtggaatttacaataaagagtgttttgtgttttattattgtttgtaaattatatgctaagtatcctttatgtcttttttgttggtttattttgttttcagacagagtattgccctgttgcccaggctggagtgcagtggcgtaatctcggctcactgcaacctccgcgggttcaaatgattcccctscctcaacctcctgagtagatgggattacaggcatgcgccaccatgcccggctgatttttgtacttttagtactgatggggttttactatgttggccaggctggtcccaaattctgatttcaggtgatccgcctgcctcaccctcccaaagtgctgagatttataggcatgagccaccgtgcccggccgtatgtcttaatacttataacttaggtgtttgtattttttttttgaaaagactggcataacactgcccttcatgactttataaaataaacaaaataaataaaaatattcctaagccttcatatttttgtactgaagaattagtcttttgcagttatattttgcatttatttttgtatagcagctatcatttccacaatcatttcttcctcttcatttccctctttatttgggggattcatttcactcactgttatgtgaaattaggaagggaggataacatttttagtttgctagagagtttctctgaaagtagaagtataaaccacttctaatcagccatatagcaggtggtaaggaaagtagtgaaacagaaatgcattatacttattaatttgttcgctaaaataatataacattttctagggattcaactaatgaaactactgcccattccgatgctggcagcgagcttgaagaaacagaggtcaaaggaaaaagaaaaaggggtcgtcctggccggcctccagtatgtattatgcttgtcttctttgttcctttaatagtgaccgtgttaatgagtttatatgagttgttaattctagtgctagtatggttaatacttaaaaaaaattcagtgacacaatagagattggaaactttttttcacataaattgtcttggcagtgatcagaaaaaggagatgattgtagtatgattttgttgccctccttctctttgtaaataaatggtagtccatgtgaaggcatagagaaggtcactaacagtgaatgaggtttagttagttaagacttgctgcttttcagatgcaactctgatttcttatgagctcccaagtactgttttggagtttggggccagtctcagagtatattctcattgataacctgattgggaagtttagaagagctctagataatcctactttgagagatagcttaatgtattgtacgagcatcagtcataatttaagcatgcataaaccctatagaagatactgttatctgcttgtcaaggggttaagggttatactgttctatgtttgcttttatgatgtgatttgctattagtaattcttttctattttatgaaaattcttctaatggaaactcttagcctccttttaataggagacatcatataatgaacccaccatatagccattacccagatttagcatttatcaaatcatgaccaatcttgtttcatctcatcacccctcctcctttttttccatcctatgttatttttaaggtcattctagacatcattccatctgtaaatattttagtgtgtattgctaaaaataagggcctgtttcttctttcccccccaccgatcgagtctcactctgttgcccaggctggagtgcaatggcacaatcttggctcactgcaacctccacctcctgggttcagcgattctcctgcctcagcctcctgagtagctgggattataggccctcaccatcatgcccagctaattttttcttttctttttttttttttttttttttagtagagatggggtttcgtcatgttggccaggctggtctcgaactcttgacatcaggtgatccacccgcctcagcctcccaaagtgctgggattacaggcctgaggcaccgcacccagccctcttttttttttttttttttttccacaccaccacaatatcattgkgaagtcccagtataaaatattttattaatatcaccaaatagccagttttatagtttgtaatcatcttatgaacatttaaaatctagttcggtggttagagtcatgacacaggaatgatccaccccctgcaactgatggttatgttgcttaaccagttattgtctatatgtcttttacagtgagttacacaacaagactggttttttgataagttaagtcatttttccctcttgtttgccagaatttttaattaattactcctccaggccaaccttaaaataaaaaacaagatgaaagacttcttgtattttgctatacacttgcttttatcctctacttttatttaaaggaaaaaaataatgggggaagacatgcagtatagtaactttttgtattatttcttcatttgtagaagtatttggtggtacagtattctttacaaacgtattttgggaaaagtgagagttttgcacttggaagctgttgactattctagttcccattactaccatgtgatttttctgagaccataggcaagtttcattgctatcctggcaatctcaggatataactgcagaattggaaataagactagatttgcttaaaggtaggagaatgaattgcccacatgtttgcttacttgaatttgttctccccaacttgaaattcttcacttacaggattcagattaagtactgtctccttaaagaaacttttttatttttcctaaagagaatttaccaccccaccagcaggctattgtataattcgttagaacctgtttaagttttatgtgtgtacagctgaatccttgtaatgttgtacctttttttttttgagayggaaccttactctgtcgcccaggctggagtgcagtgcagtggcatgatcttggctcactgcaacccgtgcctcctgggttcaagtgattcttctgcctcagcctcctgagtagctgggactacaggcgtgcgccaccacacccagctaattttttgtattttttagtagagatggggtttcaccaatgttgtgcttttttgatgaaaagaagtctgtgtacccaaatgcttaacccttttgtggtaggaaatacttgatttttactgaagttactactacataatctagtaagtaaatagtgcatgttcatgccatatttacagtattgaaaaaatgtcaaccagtataagaaagtagtattctagaaatttgttttatttatatttcagtctatacattcacacaaattagttcacatggctgtctgtacttccacctaactcaatcagtcccatttcttgattgtgccaacaatgtaacataaacaacttcctgaatttctactttgagctttgttttggctttttatgttatttaatcctcacactagtgttatgaaataggtcttagatgcagtttacagagtagaatatgaagttaaaaagtggtaatttgcctaaggtcacacagcaagtaaatgggaaagctaggatttgaatttatatgataactcccacactgtttctcttaaggaagccagaatgccaagctgttaattaatcttgagagttataattgtcagaatgatcagattggagtcctgcctcaggtacctattatgaagaaatattggacattttctatcaactagctgcattttgaacaataaatcaagttttaactgatagcattctttgtttagctgtagtaatactattcatcacttctttttttaagtttaatccttttaaaatttattacttttaaaaggcatttcttgtatctttggttttcatttagccagtcaaaaacaaataatataaggagtttctattataggcagtattgtttcctttacttctattttatgttttattttattttattttattttttcttttgagacaggatctcactctgtcacccaggctgcagtgcagtggcgcaactgtggcttactgcatcctcaaactcctgggctcaaacagttctcccacctcctcagcctcctgaatagctgggactacagacgcacgccaccacgcatggctgatttatttttgtgtgaagaccgggtctcactatgttgtccaggctggtcttaaactcctgggctcaactgatcgtcccacctcagcctcccaaagtgctgggattacaggcaggaaccgctaccccggcctctccttttttttttttttttttttttttgagacagagtctcgcgctgttgcgtaatctggagtgtagtagcacgatcttggctcactgcaacctctgcctcccaggttcaagcaattctcccacctcagccttccaagtagctgggattacaggcatgcgccaccacacctggctaatctttgtatttttagtagagacagggtttcaccatgttggccaggctggcttgaactcccgacctgaagtgatccaccagcctcagcctcacaaagtattgggattacaggcgtgagccaccacgccaggcctaaagatgtgtttaacattgcaaatcgccacctctacccaatatgacttaactgttttccccttgcgctaacgtaacatacattttacttacttgcttattgtctctctcctacaactggaatgtaagttgtgtgaaggcaggaatttttatctagtgtgtcttctgctatttactagtgtctgacctgcagtaagtgttcagtaaatgtttaatgagtgaatggtgttttaattttgttaaataagcactgccccaccccctgccctttggtgtttaaaaaatttttcattttgaaataatttccaacacagaaggattctaagaattctatgaagaattgtcagctgtccttcatgcacattgtcctaatgttagcattttactacatttgctttatcatattcccactctttgcttctgtcttctcctctatgtatgtacacacatatacacatgtaaatatggattttttatgacatatgcagagataagtattttggtatctattagttttgaactgttttggagtaagttgcagacatgatgttactttttttttaaattcagtattgttttgtagaatatctcttcgcagcactttatttctaatagtttagtgtgtatttctttgcagtcaaggacattttttcttacataaccacagtacagttatgaaaatatgaaaawattgatataagaatgatatctatacatctcatttagattttgccagttgtcataatctaatcccttaaagaaaagaaaaactattcttttcctgaatcagggtctagtccaggattttatgttgcttgtagttgtcatgtaaatcagcacctctctaaccttaacccctctttagtctctcgtgttttattatggatttttttctcttagtgagaaccagcacttctatattctcaacattatttaactttcatatttgcataggctgagtaggagaggtaaataatgttgtatataaagtttcagtgctgcaaaagaaatagcacttgaatataaaatgttcttttaattctcagcaaggcaaggtacttctatagaagggtgcgcccttacagatggaacaatggtgagtgcacacttggacaagggaggggaaggggttcttatccctgacgcatgtggcgcctgctgctgtgtcattcccttattggctagggttagaccacccaggctaaactaattccgattggctaatttaaagagagtgacggggtgagtggtttggtgggaaaaatggttatgacagagcaggtgatcggaatgagtcagggtggagcaggtgattggaatgagtcagggtggagcaggtaattggaaaaggttgctttatgaggaagttaagtttaaaagtagaaggcaaagaattgaacatacttttctttgaaaagaaatttagaactcatatctaacaataaaaagatacagtttttatttttaaatgtctattcatacatagaagatggagaatgcacaacaaaagattaatgagtaccagaagggtaagttaacaggtcacttataaaaattggatctttaaaattatttggtagtttaatgtagactgttgggaatttcataatattcaaattccaaagtttttttttcttttaaataccaaaatttttatttgcccaccctcttggtttagcattataaaccaaatcaatctctttttgacccagcgttgtgataggaaccaccatgttacaatgtggtggcagatgtctgctagattttttctggctcctctcaacctctgactgtcacttcttttgtcctttcttggttgtcctttaacaatctgttataactcctgtaaaatagagagtaaaagtaccaaccctgttgttaccaggttttatgaggactaagctaggactaagtcaatctttcaggaacattcagactccagtggttcctccttgatcttcagtatagctccttatctgtaatgggctgaagaaccattgaactgataaaccaggcacatgggtataagtccataggccaggtgaaggcctggatataaaatatatggactttgtgatgaccactaccaacatccagcctaaagaaggactgacttagcatttccaacaccaatgatctcatggttccctgtagatgtctcccttgtacctccattaagaccagagcttgaggaagggcctctcaatttcccctgctacacttggaatagtatgagggactcagcagaggctggaaactgaatgaccaggcccagggagttaatgtgggacactgacaaaccaattgcagagttggtgccatgttgagcatttatgttaaaaattcttaactattctaaaccatgctgacatgaactgttttgcaagtaagttttgctgtatagccattgttttttttaatcctaaatttctagaagtgaagtttgttagtatatgctgtttgttttgaaagcttttgacatatattattgcctttcacacagcaaaatatatgggtataygctatgttactgcttataatggttaagtcttttctaatttttaagtggtgaagtttaaatcagtactttctatattgttcattatttgtgaataaaggtggtatgatcacagctcaccacagattcgatttcccaggttcaagtgattctcccacctcagcctttggagtgggactacagtcatgcatcaccacaccggctaagtttttgtagaggcaaggtttcgtcatgttgcccaggctggtctcaaactcctcggctcaagcagtctgcccagtaggactcctaaagtgctggattacaggcatgaggcactgggcccagcctatttataattttctgtactactttttctatttttatttttctaagaaacaaagatctctataaaaaatttttttggagcttaaatgtgcactcttttgtgatcactttaggaagtatattagttggacttctttttaagctgtctttgttgttttcttaatttttcatttagaattttcttctactgactagactagtttttagttctgacttccttaattatgttaaagactaccacagttccaagaacacagaattaagacctgagtcattgttacatttcctcatctccaagtctcttgtcctgtctcctttatctattgaaatttgaggtctgatgactttttttttttttttgagacggagtcttgctctgtcgcccaggctggagtgcagtggcgcgatctcggctcactgcaagttccgcctcccaggttcatgccattctcctgcctcagcctcccgagtagctgggacgacaggtgcccaccaccatgcctggctactttttttgtatttttagtagagacggggtttcaccgtgttaaccaggatggtcttgatctcctgacctcgtgatccacccgccttggcctcccaaagtgctgggattacaggtgcgagccactgcgcccagcgtctgatgacttttactttataagctcactgtgtcttccacatctgtcctttattttacatttcccaagtttgtatctttagggcttactttattggcagctgtactgttagcttcctacctttggtctttgtctttttctatttcatcctttttaatagtgccgggtgggaatatgttttttcttttttttcattttctttttttttttgatttggagtcttgctctattgcccaggctggagtgcagtggcacgaccttggctcactgcaagctccgcctcccaggttcacaccattcccctgcctcagcctcccaagtagctgggactacaggtgcccaccatcacgcccggataattttttgtatttttagtagagatggggtttcaccgtgttagccaggatggtctcaatctcctgacctcgtgatccgcctgcctcggcctcccaaagtgctgggattacaggcgtgagccaccgaccggccacgaatatgttttttcttattcaaaaagcaggcagtgcccccactccttttttttttttttttttttttttttttggacaaagtcttgttgtcacccaggctggagtgcagtgacacgatctcagctcacaggcaatgccattttatgaaaaagtgtggggtatcttcaactaacctaatattacacctaatattttattgtatttccctgttcacaactttttagtcaggtatctatctgtctcttgttttttcatgtatggcttttgctttcccacattcacaccattgctcattgtgttttttcgttctggaacccttgttttctaaattctacatatgctaatcttactaatactaattcttaactaattttatgagttcatgaagtcccaacttgcagcataatttttttgtgaaacttttcctgcttctcggtactaaaaataatgtttctcttagaaggtttttagcacttatcataaaccaaaattccattaaaagtatctttgtatactatagtttattattttatattgcacgtatttatctctttatcttttaattgtgtatgtataaaatttttgcattatgcagtccccaaaaaagttaatatatattatttgtgatacggtgtggattatttcacattcacagctcattatgccagataaggcacaaaggttaaagaatgtttttgtatctttgtttcttaaaacttctaggaaagtcattgcacattcatactgcaacttaacctattctagagctttggaatagagtatttgggataagttattttcctacacagcagggctaatttgtgtatttaaaacagtttactagaaatgtagatacacatttaaattgaatagtatacagttgtcctaaagattgctgtaaattctgagattagattgcatcatttttatataggaacagtgaagattaatgacttcctatgtatatgtaacatattttccatgaaattcattacttactgtgttgctgcaggctttctttcaggtatttcaggtttgctttcctatacatactcattaaaatattttaaaatcactatgtcccttgaattacctgcagtaatgaactctaatttctgtattaataaccctatggaccatagatatttcatttgtactgttgtttatgggatataaaacactagtgttccttcatcactaccaattgacaagattgtattaggatgttgaaaatacatcttaaataatataagttcttttttattttatttgtttattttttgaggcagagtctttctctgttgcccacgctggagtgcagtggcacaatcttggctcactgcaacctccgcctcccgggttcaagcaattctcctgccttagcctcctgagtaactaggactacaggcgcgtaccaccatgcctggctaattttttgtatttttagtgtagacggggtttcaccatgctggccaggccggtctcaaactcctgacctcagctaatccatccgcatcagcctcccaaagtgctgggattacaggcatgagccacgacgcccagccagtataagttctttgaaagccatgtttggggatagtggttaccatgttggacagtgcacatataaagaatcagtctggggtccagtctggtgagagaatcattgccagtaattcaaatggagaaaaattaatgtaaagaattaattggccgggcacagtggcgcacacctgtaattctagcactttgggaagccaaggcggggcaaatcacttgagtccaggagttcgagaccagcctggccaacatggtgaaaccctatctctactaaaaatacaaaaacttagctgggcatggtggcgggcactgtagtcccagctactcgggaggctgaggcaggagaatggcgtgaacccaggaggcggagcttgcggtagaccgagatcgcgccactgcacttcagcctgggcgacagagcgagactctgtcttataaaaaaaaaaaaattccacacataaccttatgtgacgggtcacagttaaaaccaagattaaggcgagatgcagtggcttacccctgtaatcccagcatttgggaggtgaggcaggcagatatctnnnnnnnnnnnnnnnnnnnntggaagtagttcatcagaatcattgccagtaattcaaatggagaaaaattaatgtaaagaattaattggccgggcacagtggcgcacacctgtaattctagcactttgggaagccaaggcggggcaaatcacttgagtccaggagttcgagaccagcctggccaacatggtgaaaccctatctctactaaaaataaaaaaattacctgggtgtggtggcacacacctgtaatcccatctccttgggagcctgaggcacaagaatcacctgaacctgggaggcagaggttgcagtgagctgagattgcatcattacattctagtctgggtgacagagtaagactccatcttaaaaaataattattaactatttaaaggcttcaaatcatttgtcatttgggaactgcaaatcaagacaacaatgagatcctactacatgcctattagaatggctgaaatttaaaaatctgacaatatcagtttcctgggaggtatgtgataccacagaaactctgatttcttttttttttttttttttttttttttttgagacggagtctcactctgttcactttgttgcccaggctggagtgcagtggcatgatcgtggctcactgcaagctccgcctcctgggttcacaccgttctcctgcctcagcctcccaagtagctgggactacaggcacccgccaccacacctggctaattttttttgtatttttagtaagggacagagtttcaccatgttagccaggatagtctcaatctcctgacctcgtgatccgcccacctcggcctcccaaagtgctgggattacaggtgtgagccactgcgcccggcccagaaactctcatttcttgctggtagaaatgcaaaatggtacagccactttgaaagacagtttggcaatttcatacaaagctaaacatagtcttactcaaagttccagcagttatacctctaggtatatacatagctgattttaaaaattaagtacacagaaaaacctgcttgtgaatgttttttatttgtaattgcctaacagtggtgacccagatgcccattatttggtaaatggctaacaaagtgtgatacatccatggaatggaatgctattcaacaatttttttgaatgacctatttggccactaaaagacatggatgaatgtttttgttttaagacagggtcttgctctgttgttcaggctggagagagtgcagtggaacgttcatggctcactgcagcctcaggctcctaggctcaagccatccttctgcatagctggagctacaggcacatgccaccgtgtccagctaacttttttgttcttgttttttgttttttttatcctttatctttagatattttttcttttttctttgtatttcttgtcaattgataaatttttttatttttttgtagagaaggagtcttgctttgtttcccaggctggtcttgaactcttggcctcagcaatccttccgccttgtcctctcaatgtacggggattagaggtgtgagccaccgtgcccagccagacatggatcttaaatgcatattattaaagtgaaagatgttagtctaaaaggcctacatgttgttagactccagttacggttgagcaaccctaatagaaaaatctgaaatctgaaatgctctgaagttcgaaactttctgaatccgaacatatagccatataaaaaatccacacataggccaggcgcagtggctcatgcctgtaatcccagcactttgggaggccgaggcgggcagatcacaaggtcaggagatcgagaccatcctgggtaacacagtgaaacccagtctctactaaaaatacaaaaacttagctgggcatggtggcgggcacctgtagtcccagctactcgggaggctgaggcaggagaatggcgtgaacccaggaggcggagcttgcggtgagccgagatcgcgccactgcacttcagcctgggcgacagagcgagactctgtcttataaaaaaaaaaaaattccacacataaccttatgtgacgggtcacagttaaaaccaagattaaggcgagatgcagtggcttacccctgtaatcccagcatttgggaggtgaggcaggcagatatcttgagctcaggagttcgagaccagcctgggcaacatggcaaaacccatctgtaccaaaaaaaaaaaaaaaaaaaaaaaaaaagctgggtgtggtggctagtgcttatagtcccaactacttaggtggcttaggctggaggattgcttaagcttgggaggggaggttgcagtgagctgtgatcgtgccactgtactccggcctgggtgacagagtaagactgtgtctcaaaaaaaaagaaaaagtaaaaaggtcaaaactttgtttcatgcacaaaattattaaaaatattatggccaggcacgatggcttacacctgtaatcccagcactttgggaggctgaggcgggcggatcacctgaggtcgggagttcgagaccagcctgaccaacatggagaaacctcatctctactaaaaacacaaaattagccgggcatggtggcgcatgcttgtaatcccagctacttgggagtctgaggcaggagaatcgctcgaacccaggaggcggaggttgcagtgagcctagattgtgccgttgcaatccagcctgggcggcaagagtgaaactgtgtctaaaagaaaaaaaaattatgtaaaattcctttcaggctgtgtgtgtaaggtatatgtgaaacataaacgagtttcatgtttagacttgagttccatccccaagatgtttcattatgtatgtgcaaatattctaaaatttgaaaaaactggaagtctgacacacttcttgttccaagcatttcagataaggggtactcaacccatatattaatatgtggaaaaaaggaaactatgatgatgattaaaaaatgaaaaactagtggtttcctgagaaggggaagagaaagggttgaatgggcaatacacaggatttttaaagtaaactattctccatgataaccattaattgtgcatacacaacaccaagcatttgtcaaaacccttagaacttcacagaacaaagagtaaatgtgttttttttctttcataattgagattttgttggttgtgttggggattagtacacagacatttcagtttgtgtgcaattcttaacatacatactgaaaatctaaaaaaaaagtttgtaattcttttttaaagttattccagtgactttccagcttaaaatttggaggcaaattttccttgagtctatcaagtaccagtatcttcacatgttgataagctgttaaatacacttctccaattcagttaaaagcatatacacaacatactcaaatattcagtctttcacagcacattaacaaagttattgggaaaacaggaataccacaaccaaagatgttagagtgcacacaattctgacagggagagccatgatcaaggagtttttatttgtttgtttgttggtttttagaaaatcctgctaaaggccaggtacagtggcttacacctgtaatcccagcactttggaaggctgaggtgggtggatcacaaggtcaggaatttgagaccagcctggccaatatggtgaaatcccatctctactaagaatacaaagattagctgggagtggtggcgggcacctgtagtcccagctacttgggaggctgaggcaggagaatcacttgaacctgggaggtgtggaggttgcagtgagctgagatcgcaccactgtactccagcctgggcgacagacgagactccatctcaaaaaaagaaaaaaaagaaaattctgctataaaaaaacatgcaatagaaataatttaaaatatccaagacattaaaatgcaaaattttttttttaaattcaggactataactccatgttgccattttatatgctttgtcttttaggatatgaaaagtaacccccatctatggaatgttaagctgacacccaacacagtcaaagcctccgacaacaattcagtatcccacactattttctggttgtaccaaaagataaccagtgaatgatttcacctcttaaaaacaaaaagcatttacactttaaaaatgggatgtgggtaggattcccttcttcttaaaaatgtttctagatctactaaaaaacttgcatttatacaatagttgataaaaatattcctctggattctactagaatagaaggaccactgataatagtatatgatattaatcagacttggcttctttttctccggcttcaccagaagctggactcttcttggttttgctttgtccattttctgcaggtaaatctatagttttttggttagcctgatcagcctcttttctctttgctccccttttcccttttctttataccttttacatgtatatatgtgtgtgtgtrtrtatatatatatgtatctataaatatttatatacaaatttatatacaaatatatatttatatacaaatatatatacaaatatatatacacatatatgaaagctaatttttgtaattttttgtctagacagggtttcgccatgttgcccaggctggtcttgaactcctgggctcaagcgatctgcctgccctgacctctgctggcattacaggtgtgagccactgtacctggccctgtttgtactttcctgctgccttttttgacttcatttccacttttcaggagcaggtttagctgacaaccatgcctgtcttcctctttgactctttcttcactttgacttccacctctgtttagctgactttcctcttgggcatcattgcagtggggagagtacatactgggtgctagtgggccatggtgcacagagagcctcagtgagctgggctgccgggccgctcctccaactgcctgagctactgatacccgctcaaagagtgactttgttatgtgtaacatatgggaggtgtattttatgttttgtccacataagaacctagaagcaaaggtactctagtagcaacgagcaaaacatagtgtctagttcttttttttttttttttttttttgagatagggtctcgctgtcattcaggagtacagtgctacaatcacggctcactgcagactccacctccccggctcattcgattctcctacttcagcctgctgagcagctgggactacaggcacacactactaccctagctaactttatagagatgggcttttgccatgttgctcaggctggtctggaactcctgggatcaagtcatcctccctaccttgtctacccctgtgctggtattaccagtgtgcagttctttttgttgttttgtttttgagatagggtctcgctgtcatccaggagtacagtgctataatcacggctcactgcagactctgcctccccggctcaatcgattatcccactttagcctgctgagcagctgggactacaggcacacattactaccctagctaactttgtagagatgggcttttgccatgttgctcaggctggtctggaactcctgggatcaagtcatcctccccaccttgtctacccctgtgctggtattaccagtgtgcagtttttttttttttttgagatggagtcttgctctgttgcccaggctggagtacaatggtgcaatttcagctcactgcaacctctctgcctcctaggttcaagcgattctcccgactcagcctcctgagtagctgggattacaggcatgtgccaccacgcctggataatttttatatttttagtagcgatggggttttgccatgttggccaggctggtctagaactccttatctcaggtgatctgcccgccttggcctcccaaggtgctgggattacaggcgtgagccattgtgcccggccaaccagtgtgcagttcttactctctgatatcattttccaataaaaggaacccagtctctttcttgtattggttgattctagaactggggcaaggaatatacagggtgaacctggagcatcttgtgccagtaagtagccaagtgctaaaaaagaaatgaaaaaccacacagaatgatgtgattatgtcataaggacttgggagccaactaaaagagctcccattggccaaagctgaaacaatttgaacaacaaagtaaaacagtattgaattacatcggacacggtggctcacgcctgtaatcctagcactttgggagaccgaggtgggtggatcacttgagatcaggagttcaagaccagcctggccaacatggtgaaaccccatctctactaaaaacacaaaaattagttgggtgtggtggcacatgcctgtaatcccagctactcaggaggctgaggcagaagaatcgcttgaacccaggaggcagaggttgcagtgagcaaagatcgcaccaccgcactccagcctgagcaacaaagagagaatctgtctccaaaaagaaaacaaaacaaaacaaatagtattgaattagaaccccaagtataaaataaatgatgagtatatactgatataaatgattgaataaataaatggttgagaatagacaaatcttccatgtgagagaattataatttgtgtaaatacttcctcaatgaggtggagtggaacttcctaccccttaaatgtgggctatacatagtgactttgttctgaagggtacactatggaaagagtaagaaaagtacagaagtgaaacctgacaaaacactatgtcagccaagtgatttaggtcaatatcaacattgattaattatgttgatagtatgtactcttgatatgaggtgataaaaatggcatgttactggctgggcgtggtggctcaagcctgtaatcccagcactttgggagtctgaggtgggcggatcacgaggtcaggagatcaagaccatcctgcctaacacagtgaaaccacatctctactaaaaatacaaaaaaaagttagccggggtggtggcacacacctgtagtttcagctactcgggaggctgaggcaggagaattgctcgaacccagcagacggaggttgtagtgagctgagatcacgccattgcacgttagcctgggcaacaagttaacttcgtccccaaaaaaaaaaaaaaaaagcatgttacctctcctttcttctcaaatcccataatcccttgtctagttatgacaaaaacatcagacaaattccagtgaggaacctattagaaaatgcctgatcaatatttctcaaaactcctatggtcatcaaaaaccaggagaatctgagaaactgtcacagccaaaaggagcttaggaagacatgatgattgaatgtaatattgtatcctggatggactcctagaccaaaaggtcattaggcaagaagtaagaaaaatcaggccgctcgtggtggctgatgcctgtcattgtggcactttgggaggtgaggtgggtggatcacttgaggtcaggagttcaagaccagcatggccaacatggcgaaaccttgtctgtactaaaagtacaaaaatgagctgggcgtgatgacaggcgcctatgatcatagctactctagaggctgaggcaggagaatcacttgaacttgggaggcggaggttgcagtgagtcgagattgtgtcactgcactccagcctgggcaacagagtgagactccctctcaaaaaaaaaaaaaattcaaagaaagtatgggcttttgttagtgtatcagtattggtttattgtaacaaatgtaccatactaatgtaagatgttaattataggagtaactatatgtatttaggaattttctgtactatcttcataacttttttttttgtaaatctgaaagttctaaaaaaagtttatttaaaaattaagcaatgaactctatatattaatccacacacagaaatggttagagggccattaactactaacagaagtgaaaagaggactatactgtcagaaacacagtaaaagcaaatgcagggagcaggtactataataaggaaaagaagcccctccaagctatgccttgtagtgttcctctagtaccttccttttacaaagcctaatactgcagcagatggcaaaagataaatgtttacagggtccagcttcagtgtcaaaaagcagggcaaatttatttcaatttattgtctctcattggagacacttatctcattggagatgagagaccataaattggtaagtgaagcaggcatataatgggaatgaattaaattactcaatagagagcataaggactgagaagaaaagatacttaggggagacctctaggtaatactagcaggtaagaaatacagggaggggaaagataactgaaaggaaaggaaaaaagtcttgtctgttaagagagtttcaagaaatgtctattgcatttagcaacgttggtgtcactggtgagtttggtgaagtagcaactgtagaatgagtttgtatgtgaatgaatgaatgtatgaatgaatgaaattaacaggaatagatacagtgactgccaacaattttttcaaatgatccttggccctaaaggtgagatagagataagattatagcaagtattaactttttaaaataaagttggggggaggggatggtatgttaattaaagaatgtaaactccatcagggcaagaatgtttgtctgttttgtttattgctgtattgccagtacctgaaatagttccagatacgttcagcatatttgttgcatgactaagaaatacttgagcatttcagtaggggtagaagttgaatatatggcatttcccagaaatgttttctgtacaagatttctgaggaagtaggagagtatcaatgaatgtatgcagaaggaaatgtcaagaaggggcaaggttaaaatattcaacattggcattattattgtacaaaacactaaagcaatttttaaaacatcatctaggtgtggtggctcatgctgttaattccagcatttttgaaggccaaggtgggcgaatcatttgaggtcaggagtacgagaccagcctggccaacatggtgaaactccgtctctattgaaaatacaaaaattaactggtcgtggtggtggggtctgtaatctcagctactcgggaggctgaggcaggagaatcacttgaacctgggaggaggatgctgcagtgagctaagagagtgccactgcactccatcctgggcgacagagcaagactctgtctcaaaaaacaaaagaaagttaccttcataccttttatgtataaacttatgttttgctctttgcacttttttgaattactgagaagaaattttaaagtttcttttggttagggattatatttcttctatagtagtgatcattttatataaagcaaagtaaacctaatcgaatggaatctttttttatctttttttcagtctacaaataagaaacctcgaaaatctccaggtgagaagagcagaattgaagctggaattagaggagcaggccgtggaagagctaatggacaccctcaacagaatggggaaggggagcctgtcacattatttgaggtggtgaaactggggaaaagtgcaatgcaggtaaattttaagtttttatttcacgtataaagcaatacagttaataacttgggtggaatcagttagtgtgtatattggcactttatatacttctgttgattatgtaagcaacctttcagtttatcctgaaaggttattattttgctttgttttgcaaagagtgtcaggaatggctgtttaatcgtaagatgtacttttgtttaaattgttctaagtaaaaaggtctactagaagctgcccaagagaatttttattgtcttgatattttttttttgaatctgatttagtgtaagtaacacatgtgtctttcagagtatttgaaagaagaagggatataaaaaaagaattcttaagtagtgaattaggaataaccagaactacatcatttgtaactttctttctttctttctttctttttttttgagacagagtctggctctgttgcccaggctggagtgcagtggcacgatcttggctcacttcaagctctgcctcccgggttcacgccattcccctgcctcagcctcccgagtagctgggactacaggtgcctgccaccatgcccggctaattttttgtatgttttttagtagagatggggtttcaccgtgttacccaggatgatctcgatctgctgacctcgtgatccacctgcctcggcctcccaaagtactgggattacaggcgtgagccaccgcgcccggccataactttcttactcttttatctcttctcatttagtccataaatactaagtattctgcaggagcaccattctcactaatgcattgtaaggataagccataattatttttctttagtgtgtatatttttatcactatcattaaatgtgtttattatttatgttcgtctctacatttttaaacattttaaaatgctagaggtggaattatttggctaaaggatatttttaaattgtgaaatatataaatactgtatttctctcccataaattgtactatttcacctttcacgagaagtgtacaggagaattgcttgaacccaggaggtggaggttgcagtgagccgagattgtgccactgcactccagcctggggtacagagccagactctatctcaaaaaaaaaaaaattaggtaattgtgaaacggaattactattagaactaaaacagacaacttttcattagtatactttctattatattttttacctgtatttctttttgaagcccttaagggtgtttagtgtttctttctttttatgtatgttaccagattgacgtgttgtgttcaagagtcctggaatttgtgtgggcagggaaggaggtggattagtgggatgatgctaaatggtgaaacatgtattgaatttccagttacccaaagcaatggatgacaatatttaaattatataagtttaatataaaaatagatttgtgaccttttgccattaagcttgataatttattcattatacttttgtttctgagacagagtcttgctccattgcccaggttggagtgcagtggctcactgcaacctccacctcccgggttcaagggattcttgtgcctcagcctcctgaatagctgggattacaggtgtgtgccagcacgcccagctaatttttgtatttttagtagagatggagtttcaccatattggccaggctggtctgaaactcctgacctcaagtgatgcacccacctctgccttccaaagtgctgggattacaggcatgagtcaccatgcccggcctcattatactttaatagaagaattgttaacaagctacggaagcattaattttaaagaccttttctattgcttcccacctttaggtagaaatacaagcagaaaaatgacagaaatgtatttttatgtaaaattttgataattgcatttcagatatttttcttctctctctctctttttttttttttttgtttgagatggagtgtctctctgtcgccaggctggagtgcagtggcgtgatcccggctcgctgcaacctccgcctcccaggttcaagcaattcttctgcctcaacttcccaagtagctgggactacaggcacacaccaccatgcccagctaatttttgtatttttagtagagacggggctttaccatgttggccaggacggtctcgatctcctgacctcgtgatccgcccacctcggcctcccaaagtgctgggattatagacgtgagccactgtgcccggccttacttccttttctttaaatgtaagcctttattttatgagatatttatgtaaaaataattttcatgcatattgtattaaagcttaatgccagtccttatttttaatattaacaaactcttatcatcatctatatttgaaataaaacattgaccaatagaagtgttttcagttttaattcatggtattcttctcttcatccatattactcttttctaattatactcttatgctgtgtcttttctgctgaaactttttttttttggagaatgagcctctctctattagccaggctgaagtacagtggacgatctcagctcactgcaacttctgccccacaggttcaagcgattctcctgcctcaacctcccgagtagctggggttacaggtgcctgccaccacgtctagctaattttttgtttgtttgtttgtttgttttgtatttttagtagagataggctttcaccgtgttggccaggctgctctcaaactcctgacctcaagtggtctgcccgcctcaccctcccaaagtgctgggattacaggcatgagccaccacacccagctgtcttcggctgaaactttttgtttcttattttctgaaagataatgatcagtagtcaggactctggtaccttccataatttggtgttaacccacctttcaacttcttcttactgtttctctcttgaaatctgcttcatgttatttttactgtaattttaattattaatattttttactggctatatttaaaatttataaacgtttgtaatttttttatgtggcagtcttttgggcacatttttttctatgaatttaccttctgatttttattattttggcagtacttcctaaaatagttgggtcatggtttatttaactagattttatttgaactgtttccagttttattgtattaaaaatagtacttctttaggctgggtgtggtggctcatgcctgtaatctcagcaccttgggaggctgaggcgggtggatcagttgaggtcaggagtttgagaccagtctggccaacatggtgaaaccctgtctctactaaaaatacaaaaattagctggatgtggtgctaatttcaaggagagctgcttgaacccaggaggcggaggtcgcagtgagccaagattgcgccactgcactccagccttggcgacagaggaagacttcttctcaaacaaaacaaaacaaaacaaaacaaaacaaaacaaacaaacaaacaacaacaagaaaaaataaagagcacagctgtgcgtggttgctcacgcctgtaatcccagcattttgggaggcccaggcgggcagatcagaaggtcaggagtttgagaccaccctggccaatatggtaaaatcccatctctactaaaaataaaaaaaaaattagctgggcatggttgcgcaagcctgtaatcccagctactcaggaggctgaggcaggagaattgcttgaacccgggaggtagaggttgcattgagccaagattgtgccactacacgccagcctgggtgacagagcgagactccgtctcaaaaataaaaaataaagagcaagataatacaagccgacatcagtgatttagaaacaaagtaggtatttctgtggtttgtatggaagaaaactacaaagtgatgaacaggattgggtttagggcagaaaagcatatgctttatagccaggagtttggttgttgagtgttaaagtgcttcatgaagaataggagaatcgaatcgggcttattacatgaagccaaggcctaatgtgagtctccccatttgtaaagcaggctgaaggaaagtgccaataactactgcataggcttatgtttagggtaatcgtgtatctcaagttacccttgagatgtccagtttgtgcttattgtccatgtatttattaatagaggctcctttaatattcagaagggtagtagtttgcatggctatttttattaaaacatcacttacaggaaatcaaaagctgaggaaagggagaagatggacataattcttataactgacacctgaattgaaatgtctgttcatttggttggtgactgggtctgtgaaaattcccaatgttgttttaggaaagagtctgaaaattcccactcttgtcttttatatgatctggttctgccatggaggtaatgacagaaacataagaggggagggataaataataaaataatgaatatgtatgttgaagatgctagagggatgaaagaagaaattctgtcttatacaaaataaggaagatgaaacaagatatggaacaggagcagtctcgaaaattgaaagtaaattcttaaaacagtacattatgttactgaggaaaaatactgctttaggtgccatgagagggagaattcaagtattggcatttattggactcagttagaatgtagcccagagaaataaggaggtaagaaaacatgaaagagccatttaaagactttggtatggattgaagggttccagaatataccaagggaagagatcagagggaagaaaagagatgaaggatttattttattttattttatttatttttgagacagagtctcgctctgtcacccaggctggagtgcagtggcgcaatctcggctcactgcaggctccgtctcctgggctcacaccactctcctgcttcagcctcccaagtagctgggactacaggcacatgtcaccatgctcggctaatttttttatttttagtagatacagggttttgccatgttaccctaggctggtcttgaactcctggactcaagtgatcctcctacctcagccttctaaagtgctggaattacaagattgagccagcacacctagcccaatctctttccttttaatggctgcatgtataccacattttctagtctattattgttgggcatttgggttgattttatgtctttcctattatgaatagtgctgcaatgaacatacacatgcatgtatgtttataatagaatgatttacattcctttgggtatatacctgttaatgggattgctgggtcaagtggtatttctgcctttagttctttgaggaatcacggtcttagatacaatttttgaagagataattttggagaaatttccagacaaatttcctttgatccaaagtttgttctcaggagtgagcaagataagtgaaagtaatttcatagctgtaaatagtatagtataactgaagtattaaggaaattttgaaagatttcatcaaggaatgtctgatcgttttctttataatgcarttaatgttgaaatacacagtaaaataaattctcctggtaaattgcattataaaatttaccaggagaataaaaaggtgctttttaaaagtttgtattggccgggcgcggtggctcacgcctgtaatcccagtactttggggaggccgaggtgggcagatcacaaggtcaggagatcgaaaccatcctgggtaacacagtgaaaccccgtctctactaaaaatacaaaaaattagccgggcgtggtggcgggcgcctatagtcccagctacttgggaggctgaggcaggagaatggcgtgaacccgggaggtggagcttgcagtgagccgagattgcgccattgcactccagcctgggcaacagagcgagactccgtctcaaaaaaaaagaaaaaaaaaaaaggttgtattaaagaggagatatacagagttgtaatgtgaatattagtgaaagaaatgttagtgaaaatgttggagccagctaaagcattacttggatagatgtgttatcttaagggcattaatgctaagcaaaagcaaaagaaactagaaaaaagaaaaacagcaaacctaacattactgtgaagaaaggaataataaaagtagaaatggaagttaaatagaaaggttaaagaaggtcaactaaacccaaatatttgagtctaagaaaactttaggaccagaaggttttatcttaggaataccgagatggtttaatattagaaaatcttttagtataatgtccagataatctcattacaggagaaaaaagcctatacttacctgaagtgatgtaggatgtttagaaaaattatgtgataatatatagctaatagtttttataaacagaaacttttgataattaggaacaagagggaacttccttagcttgtaaaggttatctcccccaaacctacagctcagattatgtcatttttaaataacggtgaagtttaggtgtattcccaggatataagcattattactgctgttcagtactggaacacctagccaatacattaaaaaaaaaaaagaagagctatagcaattgaagatgaagatgcaaaagtatccctattggaagaggatataattgtgttgaaatttcaagagaaaccgtagactgttagaactaatgagagcattcagcaacgttcctggatagaaagtttaaaaaatcagtagccttttctgtatggcattaataaccaattagaacaagtaatcagaaacgagcatattcaagatagaagtaaaatcaatgaagtacaaaataaaaatctaataaaaaatttgggtggaacagaataaactactattttaaaaacccatcatattgagtaattaaaaagacctgaccataccaatagtcagtaaggttgtagaacagcaactagtgggagtacagatctgtgtacagattctcctttggagactattttggtaatatcaagaagagttttcattcaggcagtaaatatttaatgagtgtttacactgtggaaaccactttttcccttctttcttttctttactaagaatataacattaaagaaaaccaattcaattcttagatataacctctggatacagtttttttacatgtttataaaaggcatatataggaatgaatatttttttcattgctttgtttatactaacaaaaaaataaaaatcccaaatttctataataaacaggataattgataaactgtggtatatttaaactctgaaaaaaaatttttttttaagatacagtctcgctctgtcgcgcagattggggtgccagtgacatggtcccagcacactgtaaccactgcctcccaggttcaagtgattcttgtgcctcagcctcctaagtagctgggattacaggcatgcgccagtacgcctggctaaattttttgtatttttagtagagacaaggtttccctatgttggccaagctggtcttgaactcctggcctcaagcagtctgcctgccttggcctcccaaggtgctgggactacagatgtgagcccccatgcctggcctgaaattatttactgcatttaaaatgagtaaactagaattctaggtaccagtacgaataaattttaaaaatggattttaaaggtccaatgcaaattgcagaatgatgcataacacatgatgctacagtacttataaagtgtgaaaatatacttaaggttatttaacatcatgttttttatattgattactttctgaaaagataggagaaaaaggataggaccacaaaggtttatatgatatataggtatacctcagagatattgtgggtttggttccagtgagtcatacaaactttttggcttcctagtacatataaaagttatatttaccctatagtgtattgtgtgtgcaatattattatgtctgaaaaaaaaccaatgtacgtaccttaattaaaaatactattaaaaacgctaatgaacatctgaaccttcagtgagtcataatctttttgctagtggaaagtcttgccttgatgttgatagctgccgactgatcaagtggctgtggtagtttcctaaaacaagacaacaatgaagtttctgcatcagttgactcttcctttcatgaaagatttctctgtagcatgcaatgctgtttgatagcattttaccacagaactatttcaaaattggaggaagtcctctcaaaccctgtcactgctttatcatataaatttatgtaatattcagaatcctttgttgccatttcaacagtgttcacagcatcttcaccaggagtaggagtttagtaggcagtagcagaagacgtttcttaatttagaaacaggaaatgcaaagataaaatctgttatccgaccatagaggacagtagatgcccttgtaaaaatggagctgagagaaactacattctgaccattgaatactttttgtaaaattgatggtattttagaaagaaaattacttgtttgtattttcatttttagaaatgcctttctgggagcaatttagatgatgatttggtgggcaggtaaggctggaatcagaccaaaggctttttttttttaaacactgatccattagggaactaaagaaagttcttatttatttatttatttatttatttatttatttattgagatggagtcttgctctgtcgcccaggctggagtgcagtggtgcggtctcggctcactacaagctccacctcccggattcatgccattcttctgcctcagcctcctgagcagctgggactgcaggcgcccgcagttttgtattttcagtagagacagggttttaccgtgttagccaggatggtctcaatctcctgacctcgtgatccacctgcctcagcctcccaaagtagaaagttcaaatttatagaaggtcagtgagaatggagaggaagtgacagattgtgcaaatattcaggctctggaatgattaggaaagatgagaaagaggaagtaatctaaggtggtccctagttgtttgacttggtagcgttcactgaaagtttgtgtgaatataggtattggaggatggctatgagagtagtttggacatcctgacttttagatctgtgacattaaatacatgttgaattttggaactttcaagctgtgtagtctaagtgatattttttgctttagtagttatgagtaagagcttgttaatttctgtaatccattggcattttcattttgtacacctagatatcaactataaaagttggactatagggctggacatgatggctcagtcctgtaagcccagtactttgggaggctgaagcaggcagatctcttgagccaggagttcgagactagcctgggcaacatggcaaaaccccatctcaaccaaaatacaaaaagtagccaggtgtggtggcatgtgtctgtagtcccagctactcaggaggctgagttgggaaaatcacctgagcccgggaagtcaaggctgcagtgagctgtgattgtgccattgcactccagcctgggcaacgggagtgagactctgtctcaaaaaaaaagtcggactgtcgtttattcattcaacaaaaattccaagctaattgggttaggcgcagggctacaatattaattaaactcacctgacccttaccttcatggactttctagtcttggaagaagaaatagtttataccaatcaaatgatctattaatatacaattaaaaactgttgattaacactaagcaaactttctttggtcttagtgtagtgataacaacagcttatgtgaataaggaactcttgttaacctataaattaagtatacttagtgagacaatttggtcttctgtttgcttttgacaactgactttgaaggtgaaactaattttgtccatttaaatatgattgggcaagaggtaggtgtcttagaaattgtgatcagacattctctgtcccttagggttagtaagctttgttttagtgtcaaagaaaagtatggacttttatagtgacattggtttcttctagcctccgaattatagatgagttacatgccaaatcgcttcgtatcatcaaatggagaggaattctcaagctgggcttgagttttactctatgactataccaaggaaagaggaaagcagctgtgggtttatttaaattctacctgttaacttgtaagtgttagaactgacagttacatagtaactgtaatagggcttgtatgcatttctgagctattaatagaatggataaaagtgttttaataattttctaatattcattgactgagaagcttgaaagtttcaagaagtattaaaatggccaaagaatgtataaggattgtaattataaacaaatgatactgagacattagatgagaggacacatatactattgattaaaatgaaacttcatgacaaagatggggagaacacattgaaagacagaaatactgtaatgaagttaaggagtaaaattttgtggaactaagcaaatataaatacttgaatagaattaatacttgagtgtataatacaagaaatgtgttaatagctgtgactgctacagtgcaaaatattgggtacagaatttaaaatcatataatattctaaacatttagagtctttgcctgaagataaaattggaaaactgaaaatagcagttgtttaaacaagatagatgtttatttctctcatatgtaaaagatcatagatacgtggtcttttccatggggactggtggattgtgaaataattgaaattctcaatattttaataatcattaaagtatattttattgtaattttagaagtatacctgttgatgtttttcaaaactggattttccatttaaaaaggaagaagctgctaaggcagcacaatgggaggcagccaactctaggtctttattccaagcaccctctggatatcctcctgtgctgttttcattcctgttgcctgacgctggtgggcattctgggcctaatgcttcttgctagtggtgaagaccagacatatctcacctaatatgtaccatgaacaagttaatgtgctacgtgttggggtgaggtgaggggcagggtgggtcccagcctggtcccacgcactgggcttttgagaggaactgttccagtttatatcccttatttctgaaaaaacatgcgcgagtgaccagagcatggtgaactttagtgagcatacctttttggatgttgattgccttcccaaccccagctatggcagaaaggatatttaaaggcccactagtgcagccagatatcattgtgttggtgggtgaacctagtgagcacccacaatttggaaaaggaagacctgagccaatgataacaacacccttgtcacaaattattattgccaggttgtctgtgcctttgaactcagacaaagttgtgcactacaagcagtgcatcatctataccaagttgtagcagaaaacctttcagaagactgtctacagtggttattgctggactttgccctgcctattttgagaggaggactaaggataaattactcttaggcctgtggcagccccagaatgcagttgtgtaaagagtccttctgctggtaatctctatgtggataagaaattgccacctacttttacccaccatgaagtatttggcaactaaccttagcgttgtcattttagtggtcctggtggccattgttgctggcattgtagttctggtggtcaccatcaggagaaagttggggaaatataagaagatagagatcaagggttgagggagttgaatatatgggcaagtgtattagtttgttctcacatggctatcaggaaatacctgagactgggtaatttataaagaaaagagatttcattgactcgcagttctgcatggctggggaggccttaggaaacttacaatcatggtggaaggtacctctttatagggcagcaggagagaaaatgagtgctagcaggggaaatgccagatgcttataaaaccatcagatctcatgaggactcactcactgtcatgagaacattataggggataccacccccatgattcaattacctcctactgggtccatcccatgacacatggggattatgggaattacaattcaaaatgagatttgggtagagacatagccaaactatatcagcaagtatgggtctgtagtagggaagacataaagggagggttcaggatcagttcagagtgaaacttaattctcggtccaaggcagatacttcctccatcatcatccccaacttcccttcctccctttccttccattcttcagtttgatggttttgacccaggactacctctctttctggcctcatgtcccaacctttcttgaagtgctgtttctaatattctttcttactcttggtccagggccaagaaatctgactcttgaattcagcaaaggtagatgtaagaggtctccattgaatgatgtctttgatagtatgtaaaggaaaaggttaagatgataccctagggccatttcaaagtgatgggataccttttaaaggtttaatgagtttatgtgaggaacagtgcttttctttcttgcatttagttcttttaattatctctctctggttccaaatggaaagatttggcatcttcatcctgaattctacttcatagttatcatcttgttgaaaagaaaattttggttttatttgaacttgcacaatagccatatttcttgtctgttataccaccaatacatatgctttgcttctcacttaacagataatttttttttttttttcaaatagagatgttgacctttcaaataggtcagtgttgtccaggctgacctcgaacttctgggcccaagtgatcctccccggcctgagcctctcgagtagctgggactacaggtgcatatggccatgacgccaagcccagggaatattatttttttgcttaaacaatttccttccttccctccttccttccttcctttcttccttccttccttctttccctccttacttccttacttctttctttcctgccttcctgccttcccaccttcccgccttccctcctcccctcctccctcctcccttcctccctccctccctcccttctttttttttttttttgaaaaaagactctgtccacaaactgccagtgtttattctgcaggtcactcattaaagctattagtaatattttattatgtaaaaatgtttgtacatattttgtctttgataattttgcagcaactttcttaatataacaaatctaatgaaatataataaaatatggggaaagcataaagtgaaagatggagtttgaatttcagtcagattatgcaaaaaaaaacaaaacaacacccaaccaaaaccaatacagcttttctggggggtcctggtgagaggttgtgcatcatcagataaaataaatggaacttcacagataactaattggataaatgaaatatttacgtccrtcagtgaactgtcaaaccagggcacatattttagaactgattaattaatttgatcctcagaaattttcagattttataacccatagtgtctccacaattgtatttttataaagctatcatcattgaacccctttagagattcagctgaattacctttatactccttcatttttatactctacagttacagctcatcatcttgtacatgtcttagaccaatatttggaactggtccaggatattttacaataagtcctggtcatatgagtaacttttaggttattcaagcataaaagtaggaaagtgctaaatataagctgcatttctcccagtcttttagtttttttgtttttgtttttttttttctttttttttgagacagagtcttgttctgtcacccaggctggagtgcagtggcgcgatctcagctcactgcaacctctgcctcctgggttcatgcgattctcctgcctcagcctcccgagtagctgggattacaggcgcacaccactacgcctggctaattttttttgtgtgtattttttttggtagagacggggtttcactgtgttggccagactggtctcgaactcctgacctcgtgatccacccacctcaacctcccaaagtgctgagattacaggcgtgagccaccgtgcccagccagtctttagtttttagtcatgaagtgtttgaattgtcttctgtttctcagagatacatgtatttttattttatttatttagagacggagtctcactctgtcacccaggctggagtgcaatagcatgatcttggctcactgcaacttccatctcctgggttcaagtgattctcctgcctcagctttcctagtagatgggattataggtgtgtgccaccaggcctggctattttttgtatttttatttattatgtatttttatttttattttttgagatggaatctcgctctgttacccaggccggagtgcagtggctcgatctcggttcactgcaacttccgcctcccggattcaggcgatcctcctgcctcagcctcccgagtagctgggattactgacgtgtgccaccacgcccagctaatttttgtatttttagtagagacagcgtttcactatgttggctaggttggtcttgaactcctgacctcaagtgatggacccaccttggcctcccaaagtgctgggattacaggcgtgagccactgcatttggctttttttttttttttttttttggctccctttgttgcccaggctggagtgcagtggcacgatcttggctcactgcaacctccgcctcctgggtttaagtgattctgctgtctggcctattttttgttttttgtttgtttggttttttgagacagagtctcgctctgtcacccaggctggagtgcagtggcacagtcttggctcactgcaacctctgcctccgagttcaatcgattctcctgcattagcctcccaagtagctgggattacaggcacacgccaccacaccttgctaatttttttttgtttgtttttagtagagactgggtttcaccatgttggtcaggctggtctcgaactcctgacctcaggtcatctgcccgccttggcctcccaaagggaaaggattacaggcgtgtgccactgttcgaagccttgattgatgaactacttgcagtcgaactcgatcatcgnnnnnnnnnnnnnnnnnnnnaggcgagttggtatgtggttgtaacacagacagtgggtgtgtgccggcgccccagaggtgagagagggggggggagaaagatgacacgagacgccgcgcagacggggggtggagttttggcgcccgcgcgcgatcacggaggggagaagggagacccttctacgaaggaagaagatatttttaactttaaaaaaaaaacatgtgcaggggggggcgcgggcaaattaatagaaaaccacagcagaaaaaaatggcgaggtccggggaagagaaactgttgaggagggtggtttggttggagtcccaggcagatatcggtgtgttgagagagcgaagggaaagggaaaggaccaagtaaattgattcccgacagggtggcgcaggggggggggatcctttttgtaaaaagaaataggcttggtgcatgggctcgggccagtactccccgcacttaggtagtccaagacagccgtatcactgcacgttaagagttccagaccagtctgaccattgtggtgaaaccccatgtctattaaaaatacaaggctgggtgtggtggctcatacctgtaatcccaacactttgggagacgaaggcgggtagatcacagggtcaggagttcgagattagcatggccaacatagtgaaaccccttctctgctaaaaatacaaaagttayytggttgtggtgacacgtgcctgtagtccgagctacttgggaggctgaagcaggagaattgcttgaagctggaagcggaggttgcagtgagctgagattgtgccattgcactccagcctgggtgacagagcgagactcccatctcacaaaaccaaccaaacaaaaaaaacagaaaataggctgggcagcagaatcacttgaacccgggaggcggaggttgtggtgagttgagatggcgccactgcactccagcctgggcaacagagggagacaaaaaaaaaaataaagccaaatgcagtggctcacgcctgtaatcccagcattttgggaggccaaggcaggtggatcacttgaggtcaggagttcaagaccaacctagctaacatggtgaaaccctgtttctactaaaaatacaaaaattagccagcatggtggcatgcatcggtaatcctggctacttggaaggctgaggcaggaggattgcctgaatctgggaggtggaagttgcagtgagccgagatcgagccaaccattgcactacagcctgagcatcaagagcgaaactccatctcaaaacaaaaacaaaagcccaaaaacaacaacagaaaaaacccaaaaaaccagtcaaatatagcagtggcgggtggcgggttgtataccaactttaatgacactaatgttaataagttctgataacccactaccatcagaccagccatgtgtatatttgtatatatctactgattgattaccctccccagtagataatgagcaagtgaagagcgaattcatgttttgctatttgttgaacaatgtgttaagaatgtttttatgagggaaagatgttaacataaaaggtatttgacaaatttctaaattttccttggacttgattaatctttactcttactttgacctaatattgtgttaagtgtaggctatttttttgttttgttttttttgagataaacttttgctcttgttgcccaggctggagtgtaatggtgccatcttggctcactgcaacctccgcccccccgggttcaagctattctcctgcctcagccttgcgaggagcagggattacagggacccgcctggcttatttttggctggctaatttttgtgtttttggtagagatagggtttcaccacattggccaagctggtctccacctcctgacctcaggtgatctacccaccttggcctcccaaagtgctggggttacagacatgagccaccatgcctggcctggctaatttttctttttaagcaatttagttctgttttccctttattttcctaggatgaaaagtaatacatagaatatacagaatgtattgggtcaaaagctataaattgcttttttttttttttttttttgagatggagtttcattcttgttacccaggctagagtgcaaatggtgtgatctcggctccctgcaacctccaccttccaggttcaagcgattctcctgcctcagcctcccgagtagctgggattacagatgcctaccaccatgcctggctaatttttgtatttctagttgagacagggtttcaccatgatggccagactagtctcatactcctgacctcaagtgatccacctgcctcggcctgccgaagtgttggaattacaggtgtgagccatcaggtccggcctcaaattgcttttttcatttcatagctgtttgaaaatcctcagatgatagattaatatttgcttaagagtgaagttgttttttttttttaacataattagaaagtctctgaaattaactttgggtattttaacgtgtcttaaatgagtctagcagcttcatgtatagttcacatgctgttaaaaaatgtactttaaatcagtagcttatcatgatagacaatttctcatttatgtaaccatccaataccagagttagtggtagctatcttttcttcataggatgattcaggaatctaagcccctccattttctggctcttcttacccctagagccttcatgttgtttgcattcacttggttggaaggggagagagaaagagaagcagtgtctacttcttagaagcctttggcccctctatttacattccattgatgggaacttaccacatactcaggtgagctaagtaatgtatttcatagctggatgcttgcttccccatgttagtgcatacagattagtcacactacaattatttttaggtaattagaaggcatgcagtaaatattttgcttttgtttaatttctccaaaacacaatagattataaaagctgctgattagtsccaagataagaagagcattcactgccttcaggttacttagagctagatccttgaaggaagttagaaactttaaataggaattttcttagcctctgttcagttacacctaaaggtacctactgttactcgtgagcttagcttttagcaaatatattgatgttattatttttctgtacttgctgatttcaaacacgtggttttaaattaacatgggtgttttagataatattaagtcccttcatgatttcccgtaaatcattttccaaaggctttatccctatatatatagaattttatacagattatctagggcagatcaagtaagtaaagagatgactgtagtgtttgtgattatgakgtgtgtgtgtgtgtgtgtatatgtatatgtatacacacacataaaggattatacatttactggttttatttaatgtttaggaaaaatggactttatgtatttacatacttcatttatattattgtttatagatgtttaaatatatgaaatatggtggactttctattagtttaattttcaaagagggaacctaacttactttaatgcttctagccaaattatcctgcatgtaccctcagtaagaattgaaatacagaaaacattgcatgaataaagctatatccaggtataaatgagatttcttaaaaattctttctcaataaatttggtttgaatatgcctgtgcagtttctcattgtacactgacttgaatcatgtatgaagcagaatccttgcaaaaagctaattcacaatttgtttccaaactactaaagaaaactgaatgtatgttgatagaatttctcactatttgctaggttttagtcttagcttttgagataggaagacaaaagagatttgtttacttccagtgaggacctttgatctcagtacaggatttcttaatctggagtcagtgctaggattcttggaggacatgaacacagatggaaagagtggtgaaaaggaaaaaattggaattgattaattttatttttttattattattattattattattatttttgagtctcactctgtcacccaggctggagagcagtggtgccatctcagctcactgcattcaagtaattctcctgtctcaacctccttagtggctgagattacaggccaccatgcccagataatttttgtgatgttttgtttgtttgttttgagatggagtctcactctgtcrcccaggctgtagtgcagcggcgtgatctcggctcactgcaacctccgcctcccgggttccaacgattctgctgcctcagcctccccagtagctgagattacaggtgaacaccaccatacctggctaatttttgtaattttagcagagacagggttttaccatgttggccaggctggtctgaaactcctgacctcaggtgatctgcccatcttggcctcccaaattgctgggattataggtgtgagccagtgctcccagcctggaattgatttaaaagacgtaagtgagaaaactgatctaggacaggtaaaataattgttgaaggcattggagatgaaatttatagctgttccagttcatataattatttgatatttttcctaaggctctgtaacccagatattagtaatctaaatttactcttcagcaaaaagaacaagaatgtgagttatgattcattccaggaactcctttcagtagttgtagttcattgagtgtcctgagttacttaaaacaagacagagtataatctggcatgtatagtcttagaaaatgtttatagatgtcatgctgtttgcagcattaatgggctgggatatgaatgtctcctaactggatgcagagaggacctgaaaaaacataattaagaaagttaaaagccccatattccatattaaaacttcatccttcacctgtcactcagaggcttgccttggtatgttccttgctagcttctcctcagacctacagaagtagaaattgtggattgaaagatattggatgtatcttcaataagaatatcaaaatacctcagcattatggctcaaattaggatagagaacactgaaccaagaaacaaagcttcagtgactgggcatggaaggagggatggcttatgaggctgatctatcacaaggtggaggagtggtggtaggaatcctggcaagggtcctaaaggctgatcagtcttttgaatgctgatagaaacaggatggcttgcatgtgatagttaatagctaggagacagcagttatcataaagtacctaaaaagtaagtactgtaatattccaaggttactgggataatagcccagttttagataagggccaaggaggttttgtgaactggttgaatgtatagaggaattttactgtgtgaactactagtttattgtgtccagtccagatatttttagtggaaataatcttgaaggaagatcagtggaagaataaggagaaagaaaccaagaccagtatggtattttagagtaccaggacaggagagcattgtgcttttaacgattgttggtgatacagattacatggtcatttaaaaagttttattggcttaggtgtttagaataaattggctttaaaattgaacagttgtataggctctccagctggtgttttgttttgtttggctttgagtgacatgtagctgatccccaggtattttacagtggggaaaatactatgaggagacaaagatagaaagttgtcattatttaactgggacggtcttgggcaagtcactaaacatcttccctcccctagtttccttataattgatcttctgtctaattaggtttgtttttttgtttttgtttttgttttttaaatctccttgagagacagtgtctcattctattgctcaggctggagtgccatggcacgatcttggctcactgcagcctttgcctcctgggtttaagcaattgttgtgcctcagcctcccaagtagctgggattacaggtgtgcaccaccacacctggctaatttttgtatttttagtagagacagggtttcaccacgttggccaggctggtgtcgaactcctgaccttaggtgatccacccaccttggcctcccagagtgctaggattacaggcatgagctactgcaccggcccttattaggcttcatgtgagaatcaggtgaggctgatttatgtcagtatattgttctacaaattattttaattatacttggcttcatgataacattaaaaaaattcatgataaattcagcccagtttcagtggacttaatgtggttctgattttgtagaattttttttgtatttatagatattatattgagttctagaatacatcatgttaaaatttaacttaaaactagaaaaaagttagaatgagaaggattctgagtggtcctgttttgagtcaggcaataccttcttaagcatatacaatatcccttaccctgaattaattttttaatttaatcttcttttaaattgtgtattaaatgaattgcctgagagcctactgcttttaataagatgctaaggttaatcaaaataattcatttcaatattgacttagttgataccattatattttgtaataaagaaataatgcagctatagagaagaagcatagcagttcagaatgggtctaaaaattctgacactagtctatgcacaaagagaaaaataaaggtaatgaatttctcttcttaacctttttttgattcttttctttactattgtggcaaccctttgctcatctctcaagttatttgtggagatttgctggttcatgaaataacatcttggaattgctaatttattttttattttatttatttatttttttgacatggagtctgactctgttgcctaggctggagtacagtggcttgatctctgctcactgcagcctccgtctcctgggttcaagtgagtctcctgccccagcctcccaagtaactgggactacaggcacgcaccaccacgcctggctaatttttgtagttttagtagagatggcgtttcgccacattggccaggctggtctcgaactcctgacctcagatgatccacccacctcagcctctccaagtgctgggattacaggcgtgagccaccgtgcccagcctggaattgctaatttatatgatccaaatttaaagcctggcattataccattagcaactagcaaaggattttttccttcctttttccattatcagctcttgctaatggctctctgagaaacaggtggttaatgttaactgctacttcaaaagcatctgttacatgtgaaacaaactccctcagctctccttaaaactgtggtgagcctcttctagccgtgtttattacctgaacttctctcattgcaggtattggctatgtacctttgatacatttgtgtttctttgttaaccccccacccccacctcttcaacccccacacaaaaaacaaagcaggattaaatgttttcctatagcaggaactatggtaagcactttttgtatccacttagcaccttccactgtaaaatgtatatagtcagcacttagtgayttactaagatgatttaacaaattatttccttttagatgtataatttttaaaataatgtttattacttttttatttaactcatatatactcttgttagaaatttagaagaaaactttaaaaggaagagaagaaagtatcacacatagtcataatttttaagattttggttcctggtgttttgtttggtgtttggtytaggcttatgttaaagttatatttgttttataaaagtggaatgattaattttttccactgttgatattccttgaatatatgtgaatttttaatatatggtattccataaaaaaattccattttttcatttccattttgattgtgttataatttttcattatcctaagtagaagtaaacatttagaaaatcttgatgcccatataatttttcatgtgattcgtttaactagggctgctgggtccaaaaatattaatatttttaaggttttgtataaatgtaaccaaatagctgtctcttcctaccagcattgtaaatacttattttgcaaacctctggcaacactgagggtcatcatttaaatacattatttgtcatttgaaagattaaaatggtctatttgcgtttctttgataaaaagacaggtggttttttttctgaaatatttgtgtttcctttaaaaatctttttaaaataacttatatgtattgcaacagcaaaatattagggattgtttttgaacttgctgaatgattgagtagaacctacatgtaagtggcaagaaaattctggaaatgaagagtaatgaaggacttgctctaccgatttgtagattgtatcataaaacttcagaaaatagtaatgtaaattagcggagctcaacagctggcagatggatcacttgaacagaaatagacctaagtgtatcaataacataactaagttaaaaattatgttcttgtctgggcttgctggcacatacctataatcccagcactttgggaggctgaggtaggaggattgcttgagcccaggagttcactagcttggacaacataatgagacctcatctctacaaaaaaatttttgttctcctgatactttctttctcttataattgtgactgacagttgattaacaacttgaaaaaaaagaaaagcacaagatttttacctcataccatataccaaagtagagtctagatgtagtaaataataaaataataattcaatgagaaaaaaatttggtgaaaaacttagatttaagaattatacaagaggccgggtgcggtggctcacgcctgtaatcccagcactttgggaggccgaggcgggtggatcatgaggtcaggagatcgagaccatcctggctaacaaggtgaaaccccgtctctactaaaaatacaaaaaattagccgggcgcggtggcgggcgcctgtagtcccagctactcgggaggctgaggcaggagaatggcgtgaacccgggaagcggagcttgcagtgagccgagattgcgccactgcagtccgcagtccggcctgggcgacagagcgagactccgtctcaaaaaaaaaaaaaaaaaaaaaaagaattatacaagaataaatgcaaactcagagcaaatgatttgtttgcctactttgtatattcagccttttaccatataatagccacctttttactgtttagtgcttctaatctttaatactaacttgatgttaatattgtcaccacagtttttctgtttttttatttacctagtatttattgattcgtatctttattttcttcttttttatttttatctaagtaatacatgtacatgacttaaacaaatcaaatgagccgggcgcggtggctcatgcctgtaatcccagcactttgggaggccaaggcaggcatatcacaaggtcaagagatcaagaccatcctggccaacatgatgaaacctcatctctactaaaaatacaaaaaattagctgtgcgtggtggtgcacgcctgtagtcccagctacttgggaggctgagacaggaggattgcttgaaccttggaggtggaggttgcagtgagccgagatcgcaccactggactccagcctggcgacagagtgagactccgtctcaaaaaaaaaaaaaaaaaaaaaaaaaaaattcagatggtattgtgaccaaaatagcaatcccctgttctgtcctctccacttccaacctggtggaatgttttcatttcttttagcttttttctcctctggcatttacataattatttactgatattttatacgtatacactgacagcattgtactaattgtttatgatgaacggggagtacatctaaagccttagtaaaacatatgcaaagtagaatgtaggagttgcccctccaaccctgtcaaattcagagcctggtggacacctcaataaagtttcagggcagtcagtggtctggaacatgttaccagaatgtgatgttttgtggaataaaatgacacattggagaatcccatgtagaaagtaactgtgggcagcttcttggccctgaggtttgtctctagccattagccagcaggacgtcaagggcttcagttatacaaccacaaggaaatcaacctaagtgagcttagaaatcgcttcttcccagttgagcatccagattagaatgcagcacggtaagtgccttgattgcagcctaatgagaccctaaatagaggattcaactgagctgtgttcagattcctgaatccacagaaattgtgagatattagataaccaatacaactaccttatggcagagacaggagaactagcatagtgctaaagcattcatacttagttgagtacgaaggtatacttctgtcatttcaggtaacaacttgctttgagtggttcttgttaattggagaaaaaggagttagtgaggtcagtagctgcatatcaagttccaggggctgccactacagttaatgtaaccacctagttaagtttattatagtccatagtcattcttcaagatccctctaacttcagcataggccaaactagtgagttaaatgaagatgtaatagattttaccacccctgcttctttcaagtctttgattaaactctgcaatttcccagggatgtagtgtttacttctagtttattatcttggtagggagaggaagttccacgaacttccttttagccatatttaaccttaatgaccttaatcgtgtaggttagaaagctgataatggggtttctgccagttgccaagtatgtcttttccaattacacattctggaagtggggaaataaccacagggtgggtcagtggtggtcccactcttagacagacatgagttacaactccatcatctattacctgaccactgtaagcccctgatttaactggtggactgcaatggcattttgaatccccaggaattaatgtcaattcagagacagtgtctattaatacatgaaaggtctggatatttcctttcaacaatgcacagtatctctaattaatggctacaggtccctttgggaaaggattaaaagatttattgtatgtacttggaatagttgtacagggatctggttccccttcagtcagggggctctgggtctgtgaactgagacaggtctggagactggtgagagtccataactctccacaagttagatttctgcctaccaggcctaaagttttttcttctccataaatcaaacagtattcttgtgggctgcccacctatattgttcctaggggtactggtaatgttatctactgcccaagatctctgcaggccaagacgttgtgaataccagtgtgtccctactgccctttatagacaatttgctctcttggtctttgatggttaagtgtggccacttgggctgtgttaccttgggatcccatcatctccatagaaatctcttaatgaccacattccccatagtcatatctggcttacaaaaaagagtaagcttacagaactttaaaagcacatagatatagttactcccttcactattgtagttttcattgcctctgggccctcttgtggagcatagttgaggaatggggctgcatgtgtatagttctcacatggtaagtctagtccagcattcctaactccctaatctgtcaaggccagggaggctctggtatctcagctgttaaatccagctttcagtgcaccaaccagataaactgttgtagtcactttcagcgacaggaactaatgtatgaagtctggaatctctagtaagtgcgcctgataccaatgaatttggcgtgttatggttttataccacctcctttggtaaaatacatttagaatctactatcatacatgttcctcagatttctgttgagtatataagctattttcttctgggttatagtgtgtatttgtgttcttggagcatggtgagatttgaccctagtcatggatctagtggcatcaggggctggttttggtaagtcttcaggagaatgagcatcccccttcaaggcatctgtccatgtaaagttatcagagggctttcaagcttaagaaggctagtattctcaaaccttggaaagcaagctacttccactggtatgggaggctcagaattacttggaggatgggggagagctattcaaaattgttagtttgatctgggaccaaccagatttctctgttccaagtttttggatcccattctttgccagttaagatccttacttccagatgagaaacttggtgagactgaattaaactgttattgcctctgatacaattagattttattggcttgattttcaacaaaatcagcccctcacctataagaaatgagacattctaggattcttcatggaagttctctggttctcaaattacgacttaagctgagcattaattgacttgagctttttgttttatctctgtgaatactcaggtgtacttaaaaggatctttcttaaccctgctgcctttacagccataattattgccgtaattcctaaattcagcagccatgtaagctttcaaggcatgtgcttgaattggtactttatcacaatcagccaccagcaatagcttgattaattttcccaagttactatatgacatcgattactagcattccatttccttggcaaggagctaagctctatctttaatccaaagcaaacgaatctactttaatccaaagcaaacgaatctatctttctccaaagcaaacgaatctactcttaagcagcagtatagaatacgaattctctgtgcccttgtctgcttaaccaaggtcctactaaatggcttactgagaaaagtatacttaacctaatagaatttgaagaatgtggactctgtactatgtagatatctagattgaattgatttatcttttaggtttaccttacagggagcttaggcaratttaaaactcatctttaaccaccatattgactgctcttttccatatatttatatttcctctttgtagccttgatgttttttattcttctcaatttaaaaaatgttattttttaactacctcatattccttatggaacaagacagaatattaatttttatactgccttctagtacaatatgataaaatcataattatagcaaatgtcatcattttttgtcatatgaatgtaatctatgattcagatgctgcttgttatagctttctcattgaggatctatggctcaggtctcgaggttttctttgtatccaagtcttaaactggaatcaattgaggacattcaagcctattagtgtcacaagttgaatttttccataccttttcccatgcttatatgtatgtgtgtgtgagagagaaaaagagagatttatttatttaaaaaatagaatcatactcatttctttgtgcatttgatgtcagaagcaactgtttctgtcattagtgctaacatagattcagctcatttgtattactagttacatttcattctactgtatggatatactatcatttagtgaaacgttcctttatagacattaaaattgtttcgtggggtttttaaaatagtaaatagtagtataatacctatatccatgcaaataaatattttctctaagtgggaggaaggcagcatataaatattagtaggcagaggggcagtttttggcagaggtgacttgctatctaccaaaagttatttttcctttttcatagtgaagaacsttcaaggaggccgctggcaaacagagactccatttctctacttccattgcattcatatatggctagctaacaagttcttgcctgtgaagtattaatattagctgaaatgatatgcacaacttccaaacatgacttacaaaaatttcccatgaaatgctgtcttattactgatattcatggttgaccttggaagctgcttgttaaggatacaagatcctatgtcaccttaggtcccagaatgattgtgtgtctataatctgtgattcagatgttctaaagctatagccttctctttgggtctgtggctgtgttatcagaaatagcctttctgttaattttctgttggaattatattgcatacttttccttatcctccagatagagacaatccacattggaatattctgtttattaaggtagaagccactttggtaggccaaggtgggaggatttcttgagcccagatgttcgagaccagcctaggcaaaatggcgaaatcccgtctctaccaaaaatacaaaaattaaccagrcacagtggcatatgcctctgttcccagctacttgagaggctgaggtggaaggatagcttgagcctgggagatttaggctacaatgagccrtggtcatgccactggaccctagcctgggtgaaagagtgagaccctgtctcagagaaaaaagaaaaacccactaccaaaaaggtagattcttaggtcattgatttaaacccttctttatataaactgtaacttagctataaattataaatatttaaagctctaaattttcttgtaaacactactgtaggtggattcaacagtttttgagatgtttttattcagttttttaaaattttctcattaccaaacatttggggacattttaggtatatttttgttactgatttttaaatcagatttaaacagatttttaaatctgttattgcaagagagcttgctctgtattatttcagtgtttaaaaacttacagaggtttgatttatgatttattttggtgaatattcttgtttgtacttgaaaagaatgtgtattctgtaattgttggtgttaagttttatgtattagttagatcacattagtaattttatccctatcttctatacactcattaatttttttgtttgcttcttctatcagttaccaaaagatgtgtgttaaaaatttcagccatggctatgaatttgcctcttttagttcaatctttgctttatgtattttgagactcctgttatttggtgttaaaatttaatgttgttatagcttcctaatgaatttactgttttattattataaaatatttctctttatgtttggtagcattccttgtcttgatttctactttgacatgaatataaccacaacatgtttcttacggttaatgtttgcatggtgtgtgtatatgtgtgtatatgtatatatgtgtgtgtatgtatgtgtatatacacacatacaccatgcaaacataaaccataagaaacctgttattgttatagttacatcaaagtagaaatcaagacaaggatgtgcgtgtgtgtgtgtgtgtgtgtgtatacacacacacatacatatatatcctttattgtggcctatctgctcttatattaaaagtgtgtctcttgtaaatattatgtggtcgggttttttttttggggggacagagtttcgctcatgtcacccgggctggagtgcagcggcaccatctcggctcactgcaacctccacctcccgggttcaaccaattctcctgcctcagcctcccgagtagctgggactataggcgcgtgccaccatgcccacctaatttttggtatttttagtagaatgggatttcaccgtgttagccaggatggtctcgatctcctgccctgttgatccgcctgcctcggctcccagagtgctgagattacaggtgtgagccactgcacccagcgtctcactctggggccaaggctggagtgcagtggcgcgatctccgctcactgcaaactccgcctcccaggttctcgccattctcctgcctcagcctcctgattagctgggattacaggcacccaccaccacgccccgctaattttttgtattttaatagagatggggtttcaccatgttagccaggatggtctccatctcctgacctcgtgatccgcccgcttcggcctcccaaagtgctgggattacagacatgagccaccatgcccggccagttgggtctttttatccagcttggacaatctgtctttcatgaggttggttttttttttattttttgttttagttttttagtctcaaaatattttatttgcctttatttgaaatattttttttggccagttaaaaaattcagaatggactttttcatctttcttcaggacattaaatatgttactgtattatccatgggtttgcattgtttttgatgggaagtgtgtcattattctatcctttgcttccctatrtgtgtaccctttggttgcttgaattttctttttgaaaattttcagcacaatttgattatatgccatatgtgatttctaaaacaaattcttaacttagtcatggtcccctgtatttatgacaggctgcattatccacccacctatgcccatacttggcaatgcttctaacagttgccattctctgccaactcaagaaaggctcatacatgactccttgaagtttaattcttttttttttttttaatccttttcttttttaaagataaggtcttgctctgtcacccaggctggaatgcagttgaagatcacagttcattgcaaccttaaactcctggactcaagtgaccctcccacctcaractactgagtagctgggattataggcatgtgccactgtgcccaactaattattttaaaatgttttgtagagtgagggtatcactgtgttgcctaggctgctctcgaactcctggcctcaagtggtccttccgcattggcctccaaagctctgagattacaagtgtgagccattgcacctggcctggagtttagttctttaaattcatttatcttcatatctttatgaaagcttataaaaggtacaactttgtttacttctggatgaataaccaatatatcagggtcagtatcatttattatataaataattttcccctctaaaattgaaacgtctcctttgtcatagtggaagttatrtatatctggatctatttcttctgcatttattttttcccttaatgcaaagggctattatttatttttatttctgtactttgttctcttacttgcttactttttttttttttttttttttgagacagtcttgctctgtcacccaggctgcagtgcagtggcacgctcacagctcactgcagcttcctcctcaacctccacctcctgggcttaagtgatctctcacctcagcctcccaagtagctgggaccacaggtgtgcaccaccacacctgactaattcgtggatttttggtagaggcgggttttgctacattgcccaggctggtctcaaactcctgagctcaggagatctgcctgcctcagcctatgaaagtgcagggtttacaggaatgggccacagtgcctggccttgtttactattttactatttctgattgtttttcagttccttcgtagtatgttttaatgtttattttattgtattcattttatttttatttatttaattgaaacagtcttgctctgtttcctaggctggagtgcagtggcaccatcttggctcactgcaacctctgcctcccaggttcaagtgattcttgtgcctcagcctcctaagtaactgggattacaggcatgtgccaccatgcctggctcttttttgttttttctttttcttttctgtctttttgttggtatttttagcatagatagggttttaccatgttggccaggctggtctggaactcctgacctcaagtgagccacccatctcggcctcccaaagtgttgggattacaggcgtgagccaccgtgcccagccttatttattcattttagagacagggtttcactctgttgcgcaggctagagagagtgtgttagcatggtaatagttcactgtagcctcaaactcctgggctcaagtgatcctcctgcctcagctttccaagtggctgggactgtggtcacgtgccaccattcctcactaatatttttttgttttgttttttggtagagatgagggtctttgtatsttgcccaggctggtcttgaactcctggcctcaagtcatcctcctgccttggcctcccaggagttgttggaattacaggtgcaagtcactgtgcctggccccaagtttttgtttgtattttgacagggtctcgccctgtcactcagactggtgtgcagtggtgcgatctttgctcactgcagccttgaccttacaggctcaagtgatcctcttatctcagcctcccaagtaagctgggactacaggcatgcaccaccactctagctaatttttgtaatttttgtagagacagggtttcgtcatgctgctcaggcttgtctcaaactcctgtgctcaagtcgtctgcccaccttggtctcccaaagtgctgagatttcaggtgtgcgccaccacgctcagaccaaagtgttaatatttctgatgcaggttcctgtgcaccagtcttagaatgttttgagctcttcatatgtaactggtgggagtataaattggtacaatcactttgggaattaaaattctactcagactgcctttatattactggacccctgtaaaagtgaggaagtgacttcttcagttttatgccacactttgttacctaggttgcaaagcatttctgcttcagtcctgagtctaaaagttgctcttaatctgctctattaacttctagttttcaccatcatcctgagcttgcagagcctgacacattattcagcagaggtgaaccttgcccagataccatggtattcttttcttcttgaccctctcttaccaccataatcttctttctagttttctctttactttaaaaacaaaaccccccagacactaatgtgatgagacagtgaaacagtattatgtatagaaagtcttctctttcacttggaggaagggaaagtggttcttcccaatggaaggtcattgaagaagggatatgcttaatcagcatgggctaaattaaaataactgacagtacctagtcttgggtgaggatgtagagcatctgaaaatctcacatcttgctggatgtcatacattgctggtggaagtgtgatttattacaacttgttatgagaaattgtttggcattatctactaagccttgatgcgtgtgtgtaacgtgtgttaacagatctgctcttggttctgtaatacagaaaagaatgtttacattcatcaaatgtgtgtacataacagttttatttgtgatagccctaaactgcaaagagtactcatattcctcaacagtaaaatgggtgatagattgtggtatattcatacaatgaaataatattcagcaatgtaaaaaaggcattactaatacacataacaatgctgctgaatcttaccaatacaactttgcttgaaagaaataaaaaaagatgatatcatttatatgagtttcaatatcatgtcaaactaattcatggtaatatgcatcagtataataattaccctttgtgctggggatggttactgactggaaagcaacataagggagcctgttttagttgtggaaatgttttatatcttcatcttggttgtggttacacaggtgtatgtatttataaaaattaaggtataacaggattaatgcattttactgtatataaatataccttagtacacaaaattttatttttttaaaatttacatttttatacatttcctctgatccctacctctgcccaagaaaatctcaaacaatcctgcccactggaatgcaaactggaattacattaaatttgccttgtaagttggcaagactctcagactttattgatacaacactaaatctttttttaaattcagaatatgatacttgttgaagtcttttttttatatcctgtaagttttaataattttccttattaaaaattctcttagatttattcttaggtatttttcgttgtgaacaagctactaatccatttatattttctagttattgcactattaagttattttgtatatttatcttgtcagctaccttgtcaaattttccyattattaatctcttgaatcactttaatagagactcctgggttttcttatcaactgtaggaaaggagaattgtctttactaaattttgctaacttttgcattaactaaagacttcaaccytgggttgaatggttagaggggcatccttgccttgttctttaattagttgaaatatcttaagtatttcaacaacaaatatattttagtctttttatcctttaagtagattttattgaaccctaattttcctagaaagtttttttttttttttggattggctacagaattttatcagatacgtttttgagatctgatttgatatataattgttttatttttctttttcactttgttgataaattcagttatttgatttcttaatattaagccattcttgtactcttgaaaaaatgcctcttattatttgcattctttttatgcactactggtggattatgctttctgataactcagaaagtttgtatctgtgtaaaagtgaagttaatttttatcattttcttaatatggtttgaatattatctatacttgcttaataattattggacttaatgggattggtaaggtccgatttgttttggattctattgtaaacaaatctttgaaacctagtaagtcactttttattggcctttaaaaataagggagtctctacttttattaggctacagagaaataatttcaggtaagtaattttctcgttcagatagaaacacacacaaacacacaaacttttttgaaaatttatttgctataatatcaaatttttttgaagttttcatttttatattttttttccacagtccgtggtggatgactggattgaatcatataaacaagacagggacatcgcacttctggatttaatcaacttttttatccagtgttcaggatgtcgaggtacagaatgttraaataaatgatgtacattgagcctgtcagtccagcagtgtgacttttacttcacctgccactagtcgtatataatttaccctaaaattaaagattatctgctaatctttttctgatagagaatattattggtaagttatataaggatattccatttttgttcttgttcagttttgctcctataaagtaatacatttatatagtttttgaaattttgggaggaaatctgaaattcgttcagtagtttcatgaattgattttttagatcataggcttttataatttttactcatattatttgtatgtatgctccatattgggaagtgtgctagttgctagcattcattcttttatatccctgccagtatttcgtactcattttatagttaagtttaaatacttttcttaaagtaacacaagtagcagaatcaggtgtcttaagtttacaactgtaagacagtttgttaaagtgtaattttatttttatcattttaggagataactgctagatctttttcttctctagataaatcttaacaggttaatttgtattacatggggggaagtgagttgttaaatcaccattctctgcttgtgaatacagaagaatagtaatctttaattgagataactgaccaaattgatttcttgaaggcttgtttatttatgtacaagttatcacttaccatattgacatgagtagtttatcaaatatttacagagcaccacccttatacgagatactccaccagggtatacagaagttatcaaggcagtctctgccgtaaaaagtgttaaagtatgtgtaatttttaaaggcatcttcattgtgagtaagaaagaggggaaatacattaatagttcagcaaagggcttggtgccatgataagtataataaaactggttactatttaatgactgtttagtatgtggcaagctgtgtgctttacatacattagctcatttaatctttgttaacagtcccatcaggcagatctgatctttatcttgtacattgcaaactgagatgaaagggtttaggtaaatttattccagatcatacagttagcaagtgtgaaactcaagattgagagtcaagctgtgtcacctggagtgtgtgtccccagccacaagacactgtgggaataacaagaaagcaagggatgctgatgcagcccaggctgtgtgtctctgtatatatgtgtgaatgtggggaggttgtaaaaaagtatatcctacaaaaaataaactctgatgtgagattaaagatgagtaaaaggaagttagaaggatgagaaaggcaaaaggtaacatattatgcaaaaagaccttaagacaagaaagcatggttcagtccgggacgtagaggattctgtggctgaattgtagagcatggagatgagtgaggattggcaagagattagactatttgaaagtaagagagtttgctcattttgcagccttaaagtaggtgaggcaagcactgatgatgtgctttatataaattttctcatatagtcctattaatcaacagacctgttggattgggttttaatttgaaagcaattagtagtgtttaaaatttttccttttgaaatttattttcatggttcaaaataaaaaagtttaaaagttgtataataagaagtctttgcctttctgtcttcccatccatctacacatagttaactgctcttaactagtttgttgaacttaactgtctgtccatctatctaattttcatacctatagggtaggaatgtatattctttccttctccacctcacctgtcgtacacaaaagataatagtgtatagagacctttctccttcatttttaaaaacacaggctcattgcattcctttgtgtatatgtacaataatttatttaactagacttctattaaaagaccagtgtgttatttgtagtcttttgctgttacagagagtactgtaatgagtaattttatgtataccttatttggtctttataaagaatgtctgtaggtaaatgcatttgttattatattagatactgccaaatcgtcagctataggaattgtactcttctatactctcatcagtgatatattaaaatgtcttttttttcttagccttttcaacaaagtgtattaagattttggattagtcttcagaatgatttgaagataatatttcagtctgatttttaaaagtgctttgaagttcacgtaatatacaagtaagcattttaaagtgtaccaattcagtagcatttagggcattcataaatgtgcagctgccttactttgggttgctgtaacaataccatagactgggtggcttacaaataatagaaatttatttctcacaagtctggaggctggaagtctgagatcagggtctcaatatcgtctggttcttgtgagggccctcttccacattgcagaatactaacttctagttgtacccttacatggcaaaaagagggttgagagcgttttctggagtcccctttataacggcactaatctcattcatgagggtcccactcatcacctaattgcatcccaaaggtcccaccttctaataccatcactttgggggttaggattttaatataggaattttgggaggacacaaacattcaatccattgtagcagttaccacctctctcttttctcaaaactttaaaaatctccccaggaaaataccctatacctgttaggtaatcactatttgttcttttctcccccatcactggcaatcatgaatctactttctgtccctgaggatttgccagtcctggtcatcttatataaaaggaaccacaccatatgtcaccttctgtgtgtgacttctttcacttaccatgtttttgaggttcatttaagttgtagcatgcatcagtagttcatttcgtttagggctgaataataatccatcgtatgtatatatcactgtttgtttatccattcatctgttgaaggacatttgagttgtttccaccttttgactattgtgaatatggcaactttgaacattcgtgaacaartacttgtttgagtgccgtttttgagtctttgaggtgtaaattcttaggagtagaattgctaggtcgtataataattccatttaaactttttgaggaaccaccaaactgttttccacagtggctgcaccatcttatattcccaccagaaatgtatgaggattcctatttttctacatcctcaacaacacttgttattttatagttttaaaaattatagccatcctactgggtataaagtggtatctaactgtggttttaatttgtgtgcacttaatgcctaatgatcttgaacttcttttcatgtgcttgttggacatgtctgtattttctttgaagaaatatacattcaagtcctttgctcattttaaaattagattatgtgtctttttgttgatgagttgtatatattgtggataccaaacctttatcaagtatttaacttcagctatttttgtccgctctctaggttgtctttttaactttcttaatgatgttttttggtgcacaataggtttacattttattaagtctgatttctcttcctttcctttcctttccctttcccttctctttcctttctcttccctttctctttcctttctttctctctctttctctttcctttcctccctccctccctccctccctccctccctccctccctcccttctgcctgcctgcctgcctgcctgcctgcctgccttccttccttccttccttccttccttccttccttccttccttccttccttccttcctcatacacatgtcaaatttaaggatccattgccaaattcaaggtcatgaagatttacctctatgtttccttctaatggcgattgctcacaaatctggaggctggattttatattttatatttaggctgttaatccatggttaatttttgtgtatgggttggttttaatttgtatttctctaatgaatgagggttgagaaccattactgttttttctttgaattctttgttcctatcctttgcccatttttcttttgactacctttacagttcctgaaaagacatttgacaaaatgggtcttaaaacatttttgttgaaggggcatagaagcatattttcttaatatgatttataaagaaagcacactgtcttttacatcagtagaatataataaaaatcctgacatagacctaagtacctatgagacattagtaaacatatcttagaacatatgaaaagaaaacattttttacttattacaaaagggatttactaattaaaactatacttagttaccatttctttttacctatcagattggcacaagtttaaaatcataacaacattctgttgttcaggctgtggcgggggaaagcagacactgttacattgttggttagaatacaaattgataaactcttttgtaaaggtatccaggaatatctaccaaatctatatttatgtcttatctgttgactcaaccatcctacttctgggattttaccttgaatatataccttcagcagtaagaaaataggtacacaaaattaatgcaacattatttgttactggaaaatattggaaacaatccaaatgttcatatataagacagtgattgaatgaactataggatagccacatgttggagttttgtgctactgtaaaaaagaatgaggaagatgtctgtgaatggaagtagggattttccctgtattttttttttcgagacagagtcttattctgtcacccaggctggagtgcggtggtgcgatctcggctcactgcaacctccgccgcctgggttcaagcagttctcctgcctcagcctcccgagtagctgggattacagacacgcaccaccatgcccagctaaagtttttttgtatttttagtagagatggggtttcaccgtgttgatcaggctggtcttgaactcctgacctcatgatccacccgccttggcctcctaaagtgctgggattacaggcatgagccaccgtgccyggcctttctctggatatgtttttagggcaaaatacaaattgcagaataatatctacagtatgcaactttgttgttgttgttttttttttttttttgtaagaaagaagggaatataagggttcatttcaccaaaaagaaatacaggaaagaaaaacctgacggtaacgagattggttacctaaagagcgagagagagagagagagagtttgtgcgtgcgtgcgtgtgtgtgtgtcggaaagtttagagggaattgaggtgagggaatgatactgaatttgaatatagttttatagtttttgaatagtcctgacttttggagctatcttaatatttcaaatccccaagaaaacaaaatcaacaaagatggagggagaatatcctaaaaatgaatacaaacagaacaaataacctttacaccataataacaaccacactgaaaggtgtaaaattactaaccaacgtaacttgggaactcagtaagtgggctgtgaaactagtggggtcggggagaagtttgatgaagagcacaatatttacccagtctcaaaatgtctcctttcaagatatctactatttacagggtaaaatagaaactttgcaatgtagaaacttgatagatagcaccttaacaaatgataaaagcaaacattgcaagttacggagctaattgctatcatgtgctttctgatatgcccttagaagaactcaacatcacttctgtgatattcttgccagaagtgcatagtctgaatctactcatgaagaaacataagacaagcttgaattgagttatattcttcaaaacaactatcctgtactctgcaaaaaagtcagtgtcatgaaatagtcagaaatgctgggcgtcgtgactcacacctgtaatcccagcactttgggaggctgaggcgggcagatcacctgaggtcaggagttcaagaccagcctggccagtgtagtgaaaccccatctctactaagaatacaaaaattagctgggcatggtgataggcgcctgcaatcccagctacttgggaggctgaggcaggagaatcacttgaacccaggagacagaggttgcaatgagccaagatcacaccattgcactcctgcctgggcaacaggagcaaaactctgtctcaaaaaaagaaaaaaagaaatgactcaaactgttctagcttaaagtagagtaaagaaacatgacaggtggctgcagtgcatgatcttagaatttctttgggcagatttcctgaggtcaggagttcaagaccagcctggtcaatgtggtgaaaccccgtctctactaaaaatacaaaaattagccgggcgtggtggtgggtgcccgtaatcccagctgcttgggaggctgaggcaggagaatcgcgtgagcccaggaggcggaggttgcagtgagctgagattacaccattgcactccaggctgggcaacaggagcgaaactctgtctaaaaaaaaaaaagaaaaagaaatgactcagaaactgtttaaagtagactgaagaaatgtgacaggtggctgcagtgcatgatcttagaatttcttttggcataaaggacgttattgagacacgtgaaatcttaattagttctgtggattagaacatacatgtagtatcaattgttatatcttatgctttggaacattgtactatactgtggttgtataataggtttatttgggggaaatacacactgaaatattaaagagtaaaggaatatcatgtctgtagctaaacacttattcagaacaaatgcatctgtatatgaagagtgaaagaaggataaaacggatgtaaatgtttacatctgaagaatttgggtggaaggtattcagaagttctttgtactttgctgtcttttctgtaaatctaaaattatgtcaaagtacaaaaatgaaaaaaaaaaaaatgttttaaccccaaagccagcgtcatgctcaagggaaatcagtagtcattgtcactgtcaagacaaggatacccagcctcacaattcttatttaacattatattggatatgcaagccaacacatttggacaataaaaagtaattatgatcactgtttttaaaatgatgttattcaaaataatatagcatgtttagaaaactcaggagaatcagtttgcaaaactattataagcaataaaataattccataatatattgagatacagaatttatagagaaaaattactatcctacagccagttagaagatttaaagacctccttttcaagacaaaagtgagggggaaaattctttcagatttacatttcactgtgatggtgtaaaccaggataaatttccagtgcatcaagagtttaagggcaaaaacaaacaacaaatacaaagaaaaatagtaaaagcactcaatgaaaactaagaattcctttataaccacggagtggggaagacctttttattaactgactcacaattaactgactcaaaatctataagttagcaaagactcataaatgacataagaaaacaaaaaatttgtaagatggagacacattatagggaaagtcaaacgacaagggacaagtgggggaaatttttttgtattacaaaggctgctatctctaatatatgttgagataagatttgcattttataaggactccttgtcttgcacattaatatccaaaatctagattggcattttactgtgtgagcccattttcccctaaagctgcgtaagaaccaaggaccaaaagagtgttttaaaaattgacctgaagtgggaagagagcaaggaaaggcaggaaaaaaaaaaatcacaattcgccccgtccccacccaagttcccggctagaagtggtatcaccaacaatgacagaacaaagtgaaacatcttctcatgagtgaatagtatgaacaactcctccttcattggctccagtatccctattatcactattttctcatcttggctcttgagccaagccctaaggtgcagtattggttttctaatttagctatctcaagttgcattagcacccatagttgtttttctaactctgctgaaacgtctgtagtctcttcatttgaaccagctggagtgaattctgtttaccattggaaacctcagaattggctaactcaatatgtagtagtaatagatatattcagtatcaatgaagtgggaaaaatgcaaaggtaaagttgatttaaacactgttgacttagagttgcattctaaagctatgtaaattcataagtgtttattggaataagttatgagagaactaagaacacagaattatagcatgtattcagggaattatgcatagcaaaatgaagatatgttctccatatattcaaagtataccttgttgatacacgtacatatttactttggtatgtacttaaacataactaatttcagaaatatatggtttttgataagtagttttcattgacagatgtgcctatttttaataagggttgttgatcaaacttgaaagttggtggttaaaagcaaccttctttcttagttgaatataacaaggaatgtttctattttgctctgtttgtgcctaacagagaagttccggatgcctcagggctttctaggagtgcagaattgccagagaattaatcacctaggagcacttaatctaagagttcctgaacttaacccagttcgctggctaattagcatctcagtgattttttcatggcacctgtaagccaaaagaaatacctaacattcttttcaggaagttgttatgtccaaactatttatttaggtcctcacaacttagtagccatttagaaaatgacatacataattgaaaaaaattgtattcatgtctcaaataactgcagttacttactaatgtgtgtacagatgtgttgggcattgtatagcttctcacattttgaaattatcttcatttcctgttttatattggttttttgatagcccttgttgaaactcagcctctcaaagatagggcattatcaacaggaataaaggaccagatgttgagattgcaagttgcctcatgctaatagttcctgtggtacttgacaaatatcaaatattgtattgttttcctttgaatatttaaaatatccacattacccatatcattttgtgtgagtccctcaggacatctcagtgcacagtttgggcaccatggctttaacaagtgactgaccgggagttagtgtataaataccccaattcctttgcctatcagtgggatcattttgaagggcatggcctactctgactgcagtttctcaaggagcttaattaggctccagttacctacaattgtaattggctagataacatactctttattgtctgcttttttttaattgttatttttctttttcttgtttcatgtctctactgcattactggtattttgtgggttgtccttctaaataaattacttgcactggcatccttgttttagtatctgcatctgggggatagaaactaacaagtgcttatatggctttattatatattaatcagtattctctttagcaatctattttaatgaattcttatctcctcacctgtacagtgtgtacgtatatagatagatagayagatagatagatagatagatagatagatagataggtagttcagtgttatctttcttaaatccttttaaattgtgacatcttatatatacaaaagactgaatataaagtgcctttggcctctacctgttagatgccagtagcacatttctttctccctctcctccagttgtaacaagcaaaaatgtctgcaaaagtttcccagtgttcaattttgggaagcaaaattaccccattttgagaactactgtaaagtataccttatatgaatataccagttaatttatatttcccattcttgaaggaaatttttgggtaatgtagacagtggttactaaaagctatcttttgcacatattaatttggtattcatgcacaaaatgctctagtttgcgtactgaggggtggaattgctgggttataagatatgcaacttttctggatgatgtcaaatttctctgaagtagttgtaacttttcatgctttagtcaggtgatgtcacagaattctgatggcttcacatattttgctcatagatagtattgccagtatttttagttttatgttgttgagtaggattacaaatatcagattgtggttttaatttatatttctttgagtactattgagatggactactttttcacataacagttaaccatgagaattttctcttgcatgaactgtgtaaagtcttctacaaattactgtattgcgatgttaccttttgtcctttattgttttgtaagatttttattttattttatttgagacataagttttactctgtttcccaggctggagtgcagcggtgcaatcttggctcactgcaacctccacctcccaggttgaagtgattctcctgtttcagcccccctagtagctgggattacaggcatgtgccaccacgcctggctaatttttgtatttttagtagagatggggtttctccctgttggccaggccggtctcaaactcccgacctcaggtgacctgcccaccttgggctctcaaagtgctgggattacaggcatgagccaccgcacctggccaagatttttaaaaaagtgttaatactaatctcctttgttatgtatattgcagctttcttcttccatcttgcagcctgctttttctcttttattttgatacattatcctttgaaggaagggatttttgtctgtctttgttctctttgtatctctagcacctataattatttattgaaagaatgaatgaacatgagttttaaatttttaagtgtaaccaaatttatttgtcttttcttttatgggctttttgtgtcatatttaagaaattattgaccaggccctgtggcttttgcctgcagtaatagcactttgggaggctgaggcaggcggatcacttgaggtcaggtgttcaagactggcctggccaacatggtgaaacactgtttctactaaaaataaaaaaattgggcatggtggtgggcacttgtaatcccagctactcaggaggctgaggcaggagaattgcttgaacctgggaggcggaggttacggtgagccgagctcacaccactgcaccccagcctgggcaacagagtgtgactccatctcaaaaaaataaataagtgaaaataaaaattaaaaaattatttacaccgtggtcatgaagatactctcctgttttcttataaaagctttctagtttatgtgaagtttagttagttatgtataggttagtccttcaaatttaggtttttacgtcatctagacttcagttttttaagtgtgaaaagtccttcagtttttcttgattgtacaatgaccccattagcatatatcaagtaaccctttacaggagagtctttttctgggttctctattctgctaattggtctcttagatggaaagctaactttcttttcttttctttttttaaaatggtgtctcaccctgtaacccaggctggagtgcagtggtgcgatcttgactcactgcagcctcaacctccctgggcttaggtgatcctcccactttagcttcccaagtgtctgagactacaggcacgyaccaccactacacctggctaattgtttgggatttttgcagagtcagggtttcaacatgctgcccaagctggtcttgaacccctggattcaagagttctgcccacctcagcctcccaaagtgctgggattacaggcgtcggccattgctcctggtcaaaaaatttcttgactagaaacttactggcttttgtatttttgtatatattttagaaactggtttgtgggccaagcacagtggctcgtacctgtaatcccaacactttgggaggttgaggtgggtgaatctcttgagcccagggattggtgtccagcctgggcaacatggtaaaaccctgcctctacaaaaaatgcaggaattagtggggtgtggtrgtgtgtgcctgtagtctcagttacttgggaggctgaggtgagaggatcgcttgagcccaggaggtgaagattgcagtgaactgtggtcacaccattgtactcctgcctgagtgacagagtgagaacctgtctcaaaaaaacaaacaaacaaacaaaaaaaaaagaatgtcaagttctatcagcaaactcgtcggagttttaaatggaattatattgaatctgtatgtatgttagcatttctcaatcttgacactattgagtttttggactggaaagtctttgtcgtgggaagcattctttcattgtaggacatttagcagcatctctggcctctacccactaaatgtcagtagaaccccattcctacttgaacaactgctgctgtatatcagtggggatgaatttacattttgataaaatagaatctttcagtttgtgatcattgtgtttatttctgcatatattcatcccctctgccaagtattttagaggattttttgaaggggatgtatgtgtgaaaaggtcttatacgtccgttattaaatttatttctgaactttcagcatttaaaaatttcattataagtaatggttttttaaaaatagagtttatttttttagagcagttttaggtttacagaaaagcatgtctaccactgatattttaatgtaaaatttaatatgcattcctagaacgaattcaacttggtcatgatatatttttaaattattgctaggtttggtttgctagtatcttgcttagggtttttatatctgtatcagtgagattgcctgtccttttcccctttcattctttccattttgggttttgttatgaaaactttgctaatttcacaaaatgaattgcaaacaataccttctttttctgttttttttttggaattatttctttccagaatgtttggtagaattcaaggcatctggaccctgaagatttttgttggatgatttcaagctactgatttttttttttaactattaaattgtatacttgattgattgattgactgattgattgattgattgattgagacagagtctagctctgtagcccaggctggagtacagtgccacaaacacggctcactgcaacccccgcctcctgggttcaagcggattytactacctcagcctcctatgtagctagaattacaggtgtgagccaccatgcccagctgtttttgtatttttagtagagatagggtttcaccatattggccaggctggtctcaaactcctgacctccagtgatctgcttgccttagcctcccaaagtgctgggattacaggcttgagccactgtgcccagtcgtgattcactttttaaaaactcatttagcactattgaggtattttattattattattatttagagactcgctatgtttcccaggctggtcttgaactcaggacttcaagagattctcctgcctcagcctcccaggtagctaggactacaggcatgcaagaccatgcccagcttctggtgtttttattattttgataaaccagatttttctaggaaactctccattttatctaaattttaaaatttataaagttgtttataatattccatatatgttatttatatatttataatatatatattataaatatataaatagtgtgtgtgtgtgcctgagtgcgtgtgtgcatatatgtatatatatagttgtgaattactgatgtcccttttcattaattttaagtgttttctaattcctaattatagctttttcttgacacatggattatttagaagcatatttgttcttctttgttttaatggcttttgttttgttttattttttcggttattttttgagacgggttctcacccaggctggagtggagtcatgtgatcacagcatactgcagcctgaactcctgggcagaaatgatcctcccacctcagcttcccaagtagctgggaccacaagtgtgtgccaccacaccagctgatttttcttttttcttttttagagacraggttgctatgttgccctggctacttttgaactcctggactcaagcagtcctcccctctcaacctcacaatatgctgggattacaggcatgagccactgtgcctgttcagaagcatatttttaaattttcaagcatgagagttttctggttaactttttgtattgttttcttctttagcttccttgaatttgaggcaaaaggaaatggtctgtaattgtagacttgtctcaaggttgtatggtcagcttttgctaatgtttcatgtgcccttaaaactcatgcgtattatgcattttttaggtgtagtatgtccattgttagctcaataattttgttaaaatattttatatccttctaatttattgtgcttgttctgatgattactgagaggggtgtatgttaaaatcccacatcatggttgtagatttatgtatttttccttgatttcttcttaactgcctttccccttccttaccctccctcttgtgtctgtctctctctccactccctgatatgttattagatgtatacagacatccagcttttttataactcaatattttatatttaatgttcctctttatctccggcaatacttttttttctctaaaagtctgtttcatttgaatattaatgaaacctaccacttttcatgtttttctagtgttctatttttttttccttttattgttccagtatcttttagatgccgcttgttacaacttacagctggatcgtatttttttaattcagtctgtcttttagttgcaccatttagtcccttttgcatttaatacaatcactgtaattagttttatattgaaccagtggttgttctttgcccctcctgttctatgttttctttttctcttctttctggtctttaaattacttgaataccaaagaatttgtctttcttttctctacttctttgaactttttgttttgagatggagtctcgctctcttgccaggctggagcgcagtggcgcgatcttggctcacggcaatctctgcctcctgggttcaagcgattcccctgcctcagcctcctgagtaactgggactacaggcgcacaccaccacacccggctaattttttgtattttagtagagacaaggtttcaccatgttggccaggatggtcttgatctcttgaccttgtgacccacctgccttggcctcccaaagtgctgggattacaggcatgagccaccacacccggcccaaaatttaatttttgctctttatttctggttttctgagtttcattatgttttgctgtaggcgtagaatatattttgacaggggcagggrgtattgtttttcattcrttctaaaatttcttaattgttatctctttaaattttctttccattttatttatcttctccttcaggaactttgtgtaaatttgttatactctcttctgtgtatctttccatatttttgaatttctgtgcagctttctgaataatatcccccccaaattcgagttcttttactctttttatctatgccaatcccttaagccttatttcagttagtgtattgttcatttctgtaaattataactacttggtccatggaattgttcccctgtggatattcaaacttgtatttttattttttaacatggtaagtttrtttcttttctaatctctatctgataattctagtattttaagtctttgtgagcctgtttctgtggtcttgtttttgcttgttttttgcatgttgtctttcttcttggtgtattttgttgctttttgttccaagttccttatttactctcaaatttatttgaatcctaggattaagttacatttctctaagagaggatttagcatttgctttgcaggtgtccaggggcgctaccaatctaggaccatttgtaattgaatagagagtttgagattttctttcagttatttgttagaacaccagtttttgattataacttcttagatacatttatctccctctttgcagtaccagaaaaactttattttccccagagtatgaggtgataaattgacccctggtttagccttaacctgaagatgtaatcctttgaggccccactttatagagttatttcttctagaccctctacctcatatcgcccaactgaagcaaataggcttagcaagggtcatcatagaaaaagtgatttcagcattgcttctatatattgaatttctgcttttatttattgtcctcctaatatcttcctgcttcatatggcttcagatgctttcaaaatgctgtttatattttatttagcatttgagggaaaggatttgtataaataatattgtttacaatatcattataaactgaacttgtatatataaatgtaaagtgatttctccctcagatgatatgtatatgtgtgtgtaaatgtaacttctaatgctgaaatttttcaaaaaaattttttgtggaaatgaataattttgaaactttgatgcttttggcataatttgcatatttactttgtatattgttgtaatgtaatttctgctttcataggttttgattttcttgggcctacttgaagatttcaattgcttattattgtcatggttttgaaaaagctttcaaatgtaggctgacgtgcaggtactgttttaggtagagtgtacaaagaaaccacaagtaatcctgatgggtttacacttaaagaaaacctgttgggtatgcagagaacaggataaaaattataaaataagagattggaatatgaagtattttgccttaatatttttcaatttcagcctctctctctctcagtgtctctctctcatgtctttctctcaagtaggccaggcacagtggctcacgtctgtaatcccaacactttgggaggccaaggcaggaggatcagttgagcccaggagtttaagaccagcctggacaacatagtaagaccctgtctctacaaaaatagaaaaattagccaggtgtgtgcctgtagtcccaggtgcttgggaggctgggtgggaggtggccaagaggttgaggctgcagtgagccatgattttgccactgcacttcagcctgggcaacagagcaagatcctgtctcaaaaaaaaaatactgagaatagacacatgaactattcagaaattcaaaagaggcagagcaggctggctcatgcctgtaatttgagcactgtgggagcccgaggtgggggcatcgcttcagttgaggagttctagagtagcctgggcaacacagagaaaccctatctctctcccctcttccccctgccaaaaaaaaaaaaaaaaaaaaattagccagatgtattgatgcctgcctatagtcctagcttgcagaggtgggaggtgggagaggttgaggtaggaggattgcttgattctgggaggtcaaggctgcagtgagccaggattgtgccactgcactccagcctgggcaacagagcacgctctctcgctctccctctctctctctctctctctctctctctctctctcactctctctcaacctctctctctctctcaaaaaaaaaaaaaaaggagttaaaaaaatttatgtagatacctaaatcatcttaaaggaaatgaaacataacttcttacccattaagtgtgggctgtgcatagtgacttctaaggagtacagtgtggaaggaggtggagaaatgtaatttacaaaggagaaaactgacaaacacttgcatctagatgttcatgattaataatcagtagtgtttagtcatatcgatagtgacttgattttatatgatgaagatggcaatttctctctttactttccttccaaaaatccataaaccctgtctaaccgtgagaaaagcatcagacaaatcgaaagacattgtataaaatacctgaccactgcttcttaaaacctttgtggtcatcaaaaacaagtaaagtgtgaaaattagaaatggaagtagagactttaaagatgatgtcccagaaataataaacatcataagagactacaaggaacgactctacaccaataaattggataatctagaataaatgactaaatttctagaaacatacaacctatcaagactgagttatggagaaaaagaaaagctgggccaggcacggtggctcatgcctgtaattccagcaatttgtgaggctgaggcaggtggatcacaaggtcaggagatcaagaccatcctggctaacacggtgaaaccctgtcactactaaaaatacaaaaaattagccgggcatggtggtgggcgcctgtaatcccagctactcgggaggctgaggcaggagaatggcgtgaatccgggaggcagagcttgcggtgagccaagatcgcgccactgtactccagcctgggcgacagagtgagactctgtctcaaaaaaaaaaaaaaggctgaacagacctgtaaccagtgggcggattaggagaacaaagaaaagtcccagtatcatttggcttcactggtgactttcgccaaacatttaaagaattaatgccagttctcagtcttttccaaataatcgatgaggatggaacacttgtaaacccattttatgtgggcagcattactcttataccaaagccaagaaaagacatcacaaaaaaaagataccacgaaaagaaaaaggccagtatagatccctgatgagtatatatgcaaaaagtcctaaacaaaagactagcaaccaaatttaacagcatattattcaccaaatgaaagtcaatyaatatggtatgccacattaacagaatgaaggataaaaatcacttggtcatctcagtagataccagacaaagagttttataaaatccagcacccttttcatgttaaaagaaaaaactcagcaaactaggaatagaggaaaatagaacacaataatggccatatatacaaagcttattgctaacatattctatggtgaaaatctaaaagctttttctgtaagatcaggaacaaggtgaggatgcccactctcaccacttctattctgtgtattaccagaagttctgcccagagctattaggcaagcaaaaaaaaaaaacggaagaagtgaaattgtttctgttaacagatgacataatcttatatatagaaaaccaggctgggcatggtggctcatgcctgtaatctcagcactttgggaggctgaggcaggcagatcacctgaggtcaggagttcaagaccagcctggccaacatggtgaaaccctgtctctacaaaaaatcagccaggatggtgcaggtgcctgtaatcccagctactcaggaggctgaggcaggagaattgcttgaacctgggagacggaggttgcagtgagccgagatcataccattgcactccagcttgggtgacaagtgtgaaactctgtctcaagggaaaaaaaaaaggaaaactgattattccacaaaaatgttacaattcatcaatcaattcggcaaagtaacaggatgcaacatcaacatataaatttagttgtatttctatacattaaaagtgaactttctgaaagaaaattaggaaaacattccaatttgcaatagcataagaaagaataaaatacttgggaataaacttaagaggtgttattagtccgtttccactgctgtaaagaaatatctgagaccgagtaatttataaagtaaagaggtttaatgtttacgattttgcaggctgtagaggaagcgtggctaggaaggcctcaggaaacgtacaatcatggcagaattagaagggaaagcaggcacatcttcacatggccagagcaggaggaagagagggaggagaggtactatacactttgaaacaaccagatcttatgataattcacctactatcatgaaaacaacaccaaaagggaaatccatccccatgatccaaccacctcctaccaggccccacctccaacattggggattacaattygacatgagatttgagtggggacacagacccaaaccatattaggaggtaaaagactcactgaaaacaacaaaacattgatgaaagaaattaaaggagacacaaacaaatggaaagacatccatgaattggaagacttaatattgttaaaatgtccatactgcctaaagtggtcttaccgattcagtgaaatttctatcaaaattccaatgggattttttgcagaaatagaaaaattctgaacttcatatggaatcacagagaacccttaatacccaaaacagtctgaggaaggaagaacaaagctggaagcaccacacttccaaacttcaaaatacgatacaaaagtacagtagttaaaacatcagctgggttcagtggctcacacccgtaatgccagcacttggggaggctgaggcaggcaaatcacttgagcccatgagtttgagaccagcctgggcaacatggcaaaaccctatctctactaaaaatacaaaaattagcccgggcatggtggtgcttgcttgtagtcccagctacttgggaggtgaggtgggaggaccacctgagctggggaggtcaaggctgcagtgagccatgatcataccactgcactccagcctggatgacagagtgagaccctgtctcaaaaaaaaaaaacaaaacaaaacagtttggcactagtatgaagataggcatagcaactaatgtaacagaatagagagcccagaagtaattcacgtatgtatggacaacttacctttgacaagggtgtcaagaatatacagtagggaaaggatagtcttttcaacaaatggtgtttgggaaaactggatatctacatgcaaaagaatgaaattggtttggacccttaccttacactttaactcaaaaatcaactcaaaatggattaaacaattaaacgtaagacctgaaacttaccgactcttagaagaaaacatagggagaaaagagcttcatgacattggtcttggcaatgaattcatgggaataacaccaaaaagtgtctgtggatggatggatgaatggataaataaaatgcagtatatacatacaatagaatattattgagctttaaaaaggaagaaaattctgcaatatgtgacaaccatggatgaatctggagggcattatgctaaatgaaataagccagccacagaaagacacagaaatcaatcaaataactgcttgattacacttacatgaggtatgttaactcatggaaggagagagcagaagggtgattgccagggggagggggaagcaggaagtgggaaattgctaataatgtgtatcaagtttcagtaatgcaaaatgaattcattctagagataaacagtctgagaaagtgtcacagtgtagaggagtctaagaagacatgacagctaccacctttggtggtattctggaacaaaaatgatactaggtaaaaactaaggaagtctgcataaagtatgggctttagttattaatgttatcagtattggctcattagttgtgacagttgtactatactaatgttaggtgttaacaataagggatactgaatctgatgtgtatgggatctctatactatctttgtaacttttctgttagtctaaaactattctaaaatagaaagcatattttttaaaaatgctataggaattcagttaagaaaaattccttgagactgaaatactaaacccaaccagttcttttcctcacatacataaaagttttgtaaaatgaaaaataggtattctaggcaaaagatgagttgagaaaatcttagtggcaccagacaaaagttgtgagagacttcaaagtatacttgagattatctgggacccctagtgacatagctttgaagcacaggttgaagaaacaggacttgatcatttatgcagtctgataagaaactgctaaagaatcttaartagtctcaaatatttaaatcttaaattatgtaactggagccaattatacaatgtcatctataaacaaggtacttgctaaaactttttgctctataatttatggatttgtatacaatgtgggcagcttctctttgctttttcaccctgaatttagaaatgaaacctggctctccctatatcagattatttcactcatggcctcattaattagaaaggagaagagttcagccttttctactctctgttttctactccttgcttttccataccatgcgatgaaaggtaacaatcttctctagaattactttttattgttatcattttatttctccctttagttccctatgactaaaattttttggttgacattttgtctctaatgtgtaatttttgcctgagttctcgattttctttaataatatcctgaaaattttgggactttctctacaaaaatacatagacatgaattttcgtatgttttaaaatggttcataggtactttggagtccatgtgccacaggtcaagaaaccctgcctatcttgaatcytattaatagtcgtaatagaactgaggtggcagacagacattatttttcttacagtcatttcttctaagtcttacgtgaacaacattagcactgatatgaacttattttaatagttcttgaagatatggtgaaaatactttggacatctttgaacagttctatagctctagctaggatagtgcttgcttttggccctgggctatactagcatggctcaaacaagctctacaatttgatattctagtatttggtaaagtttctgttcttggtgtagatggactgcatcctgtgcagtcttgaaagattagttaaccggtactcacatgttatgtgccaatacgtgatttttaaaaacatttactttaatgttttacttatcttttgtatttagaaaggaaaaaatacattagttttttttcctcccccacaaggactgttataaagtgaaggctgccatctagagacagactcatcattggagatgtaatcacagcaatttctgttttcaaggcattctaaaaaatttataagtatcaaaaatgtatctttattcataatttgtgagggttttttttttcctttttgcacatactgtttagacagatcccatgcatcccaagatatttacgattaagcttgaaaggtatcaaagtgtctctttctttacctcttccccagaccccctcctcaaatcttgaaaaagactcttaaatgtagtcactgcattactaggtaactgttaagttctacatttctggtatactgatatttgtttagtgaatccttctcagttttagtagactcaacatttcttctcctatcctgactcagattttttctaccaatccatccatatttatgtctagtcttgatttacagtttgctgtttatcaggctaggttatataaaaatgaaactaaaaatggccaggcacggtggctcacgcctgtaatcccagcagtttgggaggccgaggtgggtggatcatgaggtcaggagttcgagaccagcctggccaacatgatgaaaccctgtctctactaaaaatacaaaacttattgtgtttttagtagagaataattacacgtggtgacgtgtgcctgtaatcccagctactcaggagactgaggcaggagaatcacttgaacccgggaggcggaggttgcagtgagctgagatcgcgccattgcactccatcttggacaacagagcaagacacaatctcaaaaaaaaagaaataaaaaaataaaaagttagatgacaataaaaatgatcctgtcatatgcttggattatctctagtacataactagattacattttatttattaaggcgctataatccactctgtaaaagaagagctttaaaatgatttatacatggagcaattacttagaaagcatctgctatttggaaggatcttttgctaagtgtgttagacaatgttagtgtatttcaatcacacttagacttcagtaatttgaggtaagcaagaatggtgtgtcataaaagctataaacttttttttttttttgagtcttgctctgtcatccaggctggagtacagtggtgcaatctcaacttactgcaacctcagtctcccaggttccagagattcttgtgcctcagcctcctgagtagctgagattacaggcatgtgccacccacacccggctgtttttttgtatttttagtagagatgatgtctcgccgtgttgcccaggctggtctcaaactcttgatcttaagcagtctgcccacctcaacctcccaaagtgctggtattataggtgtaagccaccacacatggccaaaagctattattaatataaacttaaaagagccttgtgttatatttggataaattgttttgctgctgagtaaagttctgtctactttcagtcttctgtgtacttgtgtacctagttggagggatgtatagaaggcttggagtttatgccctggctgacatcatagaatagaggaggagaattgaaaatgactgaggagggacagggttgagacatttctctaaactgtgtggttcatatatatgaggataagaaagtttgctgggtccttcttgacttttctgacaatttacctcatcattgtcttaacttacccctatgataggtactaggcattttgaacagggtgtttagtgctgttggacctgatatgtctactctggaggtggatgctataggtctaggtgatgggaaaacctctggaattactttccctggttttgggataaaagaggtagctcgtctcttgaaacagtatttgaatctgtgcatacgtaggaatctgacttcctgtagaactcaacttaggaactggagcttttagcttgcttccaaaatgggcacgataatgtatcagaaaaaaaaatgaatgcccaaagtaggagagtctaatactgagtatcttttatgttacaggtgcaatgccaaatactttacatttgttatctcatttaattctcttatcatccttatttgtttgaatgtttcccatgtgctaagtaatgttccaggcagtagcagttagaacattgaagaaaggctctctgctctgcagtgatattatcaccacttaaaagattagaaatcctagtttcatagagactaagtgacttttctagtgtcccatatccggtaactgatggagctgagaaaccctactatgtcttactctaaagacattgagccactctaggatgacttatttcctgaggcttctaacgtatgttgtaatcactgcaactacaattacagtctgtttttattgttgtctatatagatatttatacaagagcgtgttttccagccttatattccgtcttttgtgccctgtgatagcagataacaaaaacacagtatttctggcaaacttgtgttaaggattcttattcttgccttctactgagtgcatattgataaggactatacaaatgcctgatagtgtttaagagcagtgtctttcagtttagttttttacattttattttttatttgaaatgtatttattcataattttgtttgggtaatatattcatgtagttcaaatttttaaagtgcaaaaagtatgaatatagcctcccttatttttctaaacctcaactgcccatttctctttcttggaggcaaccagttttactagagtatctttctagaaatattttaatgtatgttcaatcaaatatatttcagtatccattcttttttgtgtttgaatatatcctatagatctttccatagatagcttattttttgatagctccatctatagttttgatagattccattgactttgagagtcaataaagagtagtggttaatcatagtagccagtctgcctgcatgtaaaccatgggtctgataccgggaaactttttttgcaagttgctaaacctctagatgcctcttgtctcagaaataatagtacattcttcataaggctgttgtaaagattaaatgtataagcatcaagtgcctgggagatagtaagcacccaaatgttagctgccaccaccatcgtcattaatatcacctttttatttatttcatctgatctttatgagcatataggctttctttccttttttttttttttttattacaaacagtgcttcagggataaccttttacattcattactttgcacatgtgttagtcagtggatgttttgctacaggtacaatctgtggatcaaagagtatgtaaatttgtagttttggcagacatttaccaaactgcataccatagagattgtaccaaattatatacttttatcagcaatttaacgtaatttaaactatctagaactttatggtagatttctgatgttatgtctaattatggaattatttatagttaaaaacggcaatttcaaaattcttccttttccttcttaggagtactgtcctgtcagaagggcctgatcaaacaacattttatgttttaatataaaatatatgttggaaggttattcttttgggattctcacagataacttgttaatgcttgagagagtggaaattgatctgaaagattaattgaaagattaatgtaaaatctgttgttccacaggtactgtgagaatagagatgtttcgaaatatgcagaatgcagaaatcatcagaaaaatgactgaagaatttgatgaggtatagcattccaatattcatacaaattgcttacttatactttcacatgatgaatatgttgattatctcaggttttgttttgatttgatgtttagtgtaactgaaaatctattttttaattatatatgataatctgtggtactaattccaaaattaatgatctttggagatttgattatgttgtgtggagtattgaataattactggcaggctaagaaaattagtgatatgaggtaaaagtagattcttgatatttattttgaagaccatctcaaattcccaaatttataaatgcatctccaacagttttctgtttgtggaatgctagttgcattaaatgctttaaggggaaaacagtttggaggtcagtgaattctaagcaggrccacatattatacctgtctcagagattataaaatcacattatgttatttaagattccaagacatcctaattaagaaaagccctgcttaccttcatttaacccagaatttcccaaaattattttacgtggaaattctcccaaacccctggtgtgtgtgtgtgtgtgtgtgtgtgtgtgtgtgtgtgtgtgtgtgtgaatgttaagcttctatttgggatactctacttgaaagtattcttattttcatttagaatacatgttttctttgcttggcttcacaaattaatcacctttctcattttcacagaaatattctcttgagcagttttacagtgattgtaaatgcagaaacatttccacagttttatttctgtattgtatttatggtgaaatgaatttatattatgtattaggctaccattaattccagttttaacaatctgccttttgatttaaataacatttctatttttggtatgtgtttctttttcttgactttcagcactaaaatattggttgttttctaggtctgctctttgacagggagtgggcacggggttttattattattaattttaacttggaaaacgtcatacaaacacatatgttaagacaaacagtgtgtgacccgggtattgggatttttgaaagttcatcaggtgattctaatgtataccaaagcttgggaactactagtttaaagaaaattaacagaaagccaagaattaacttagtaaaactcttcacgtatgaaaatggaatgagataaaaacagaaataaagacactgtgaaaatgcacatataacaagaaagcattacttttgttttaggattattaaataactagaagttgagaaattcaggaaaataaatatatagggtttttttttttttttttttttttttttttggagacacagtttcactctgtcgcccagactggagcgcagtggcattgtctcagcttactttaacctctacctccccggttcaagcagttctcatgcctcagcctcccaagtagctgggattacaggggtgtgccaccacgcccagctaatttttgtattactagtagagacaggatttctccatgttgtccaggctgatctggaactcctgacctcaggtgatccaaccacctcagcctcccaaagtgctcgaattacagacatgagccaccatgcctggccaaatatatacttaaaatactcctgtaaatattgttaactattatggtatgttgaaggaatagtaaactattaagaaaagtaagaatgagttacgttgcaagtgaaattactgaaaaggcatttcatatacctaaatatattttctcgcaatatttgagatgatcagcttcatcaaagaagacttttttaaaatcaccattctagttttttttttttgtttgatagtaaagtaacacagtttgattatgatatgaaggtatttaaagtgaaaatacttactagatatttgaggctatccattttatcttctgtcacttgaggaagatattattccttttgttactgtgtatatacccgagaaacttggtttaaatgcatgtatattgtgaaatataacttattttaagaagtttattacatttttttcttcaaaagactatatatgtcatttggttttstgggagttgaggaggttagctttattaaattgtattttataatattctaaaagatctgatgacaagaaccattgggtcccaagaatctagaacaatgtctaattctcaaggaataatcatttaaattttattaaaattaatatattgtattacagcaaagtaaggtaaaggtgagatgagttagtttgaagctgttaagattttcagtaaagtgatctaaaagtaagttgttgcctgagaagtacactttggttcctattctttgttacaaacagattattacaatgttggttaataatctttttaaaatacctataaacctgcacatagcagtgctttgtgattgtaatgtcaacctaatttaaaaataaattatttcccagagcaatctatgggctgttcagtcaatacatacacttcgctcttgatagagctagctgtagaaagctaaagcaaattgatatttcttccccacatttttggaattgcaccttcatatgtaaagtctttgttatgtttccaaggtcagattgcatagttttcatatgttttaagtatgacttttatgtagggaaatttttataacaaaacacatttaatatattcatttagtgcctttaattcttgcttgttcttttgcattacattgataaattgcgtgatttttgtgtattgtgctcttctcccgtgataacttaaccttgcagattttttctcttttcctgtctaatcgtatgtacttctctaaatttatccatttcagcatttatttaatcaaaggattaacatcattaataagtataaaaatggttaaatagtatacaaactgagaaaaggaaatattacggatatgataggggaaagctcaaattatctccagtcccaagttaaagtctctaaattgtttcaattgtatatcccatcactaaaacatttttttttttttttgagacggagtctggctctgtcgcccaggctagagtgcaatgatgcaatctcggctcactgcaagctcggcctcctgggttcacgccattctcctgcctcagcctcctgagtagctgggactacaggcgcctgccgctacgctgggctaattttttgtatttttagtagagacggggtttcaccgtgtcagccaggatgatcttgatctcctgacctcgtgatccacctgcctcggcctcccaaagtgctgggattacaggcgtgagcaccgctcccagccactaaaacattttttaaactataatcctaatagtgaaaacctgtgataagcctcctctctcttcaccatgctccttttcagagggccatagtttttaacgtacgagaggagtgcttaagaagtaactatgtggtggtcaggcatggtggcttacgcctgtaatcccagcactttgggagaccaaggtgggtgggtcacccgaggtcagaagttcacagaacagccaggccaatatgctgaaaccctgtctctactaaaaatacaaaaatttgccaggagtggtggcacatgcctgtaatttcaattactggagtggctgacgcaggagaatcgcttgaatctgggaggtggaggttgcagtaagctgagatcccaccactgcattccagcctgggcaacagagtgagatgctctctctcaaaaaagaaaaaaaaaaaaaagtaactatatggtgattatttgagaccttcttagttctgaactacatctattttctaaatgtcttataaatagtaaatacatgaaaagatttcttccttccacccttggtaatcaagactgagtgtatacccttgtttgtttattgtattaaagtatactttgcagcatatgcatatttattaatagaattaaatgtatatagtattgcgctatcattatttgtgtaaaagtaattttaatggacagataagacaatatttcatactattctgatcaaaatactgtgatcacacagtggttttcaaatatcacaggctaataactcaagactcagtatttatttagacatggttctaatgttggtaatgggtgtatatctttatttttaatagtcttaataataatttaaagttttcagggtcattttcttgtatcattagattttcatggctttacttttatagtggactaagatgaatgcgtgcaaggagtgacagtgccaccacatttcttatttccttatgatcacatgctcaggtttttgttgtttcagttttcttgaaaaatctgtgcttggtgcctttccattttgccaggagttaaaaatagatactattggccaggcgcagtgactcgtacctataatcccagcactttgagagtctgaagtgggtggatcatttgaggtcaggagtttgagaccagcctggccaacatggtgaaaccccatctctactaaaaataaaaaaattagcgtggtggtacatgcctgtaatcccagctaatggggaggctgaggcaggagaatcacttgaacccaggaggcagaggttgcagtgaaccgagatcacgccaccacactccagcctgggcaatggagtgagacttcacctcaaaaaaaaaaaamcaaaaaaaaaataaacaaaaaaaagacactattaggcttaaagtcattgaagtggtcatatgtaacttaaaataacctaagaaaccagtgaggaatgccatttctactgtcagctcctttgagtattgaactctttgctactctgttaaatttgttttgtgacacaaagcagtctgaaatatggaccaagtgagggcataccaggcttattctgtatattaaatattagcagcaattaatttctttctttttgtagataaaaataaatagaaatagaagttctaatattttcttacaatacaccactccatttgtgttgcatacatcactgtggaaactgctccaagatgagaaaggtaaacagaaaatgttaaagaaaatagaattagaartgacaagtgccaaaagacaaatgaataattaaaaaattgggatgactccagaaattgtaatgaatttgtaatatgcaaaaatgtaacaaagaaaatatacaatgactgaaccctgcagttcgatctattggggacaagagcaaatgttgaatagtaataataatagctaataattatgcttaatggatgcaagcactgttaagtgctttacatatacttaattctcacaatatttttgtgaggtaggtagtttataatattgttatccctatatgacagatgagaaaattggggcacaaaagggttaagaaacttgcctgaggtcacacaactggtaaatggcaagccaggagttgaacccaaacaatctagctcctacagccgtagtttttttttttttttttttttttggagactgagtcttgctctgtcacccccaggctggagtgcagtggtgtgatcttggctcacggcaacttctgcctcccgagttgaagcgattctcgtgccttagcctcctgagtagctgggactacaggcgcacaccaccacgcctggcttatttttgtatttttagtagagacaaggtttcaccatattggacaggctggtctcgaactcctggtctcaggtgagccactgtgcctggccctaagtccatagtcttaactactgtcctattctgtgttttatatagtcagaagtttatgatactgaaatgtctgggaaaagattactcagtaacagttacactttttcagtttggacaaccctggtcatataattygtttctggctatttttattatcgatttcttactgctgatccagtaagttatagaattgtactagtagttttttaatgggcctgttatattctcttaatctgggataatctttttagattgagtcagacctctccattacattatctgagacatcactcattatgagagatgcttaaatgagatactcatgaagccaaagtatattccaacaataacatttatgtcagtggttactagatgaaatactatctggattagtcatgataaagtatttattgaggatatacttacatgctggtaatttgaaaatttttatctttccgttttaaaactcgtacaaaattggattttacagtgattcacataaatcacatttatatttgttaattattattaagatgtattagatttttcagctaaagccagatagtaggaattcggttttttatttattagaggtatcactttttgcttttatggatacatagtagttcacatttttatggggtacatgtgaatatttttacatgcatagaatgtgtaatgatcaagtcagggtatttggggtatctcttaccttgagtatttatcatttctgtgtgttggtaccatttcaagtcctctcctagcttttgttttgtttgtttacttgtttgtttgttttgagacagagtctcactttgttgcctaggctggagtgcagtggcacgatctcagctcactgcaacctccacctcccaagttcaagtgattctcttgcttcagccacccaagtagctgggattacaggcttgtgccactgtgcctagctaatttttgtatttttagtagagacaaagtttcgccatgttggccaggctggtcttgaactcctgtcctcaagtgatccacctgccttggccttcctgtgtgctgggatcacaggcatgagccaccgcacccagctctctcctagctattttgaaatatataatatattgatgttaactgtagtcacccaagcctgctatcgaacattagaacttatttcttctatctaactgtaagtttataactatttacccaacctctctgtttcctcctcacacgcttttctccctctggcatctatcattctattccctatcaccatgagatcaggttttttagctcacagataagagtgagaaaatgtatttgtttttctgttcctgagttattacacttaatataaggatgtccagttctattcatgctgttgcaaatgactttaattttttataaccaaatagtatcctgttatatgtatatgctgcattttctttatccattcatctattgatggacacttagattgattccatatctttgcaattgtgaatagtgctgtgataaacatgcaagtgtgggtatccctttgatatactgatttcttttcctttggataaatacgtagtagtgggattgctggatcatatggtagttctatttttagttttttgaaaaatctccacactgttttccatggtggttgtactaatttacattcccaccaacagtgtatagaagttctcttttctccagatcctcaccagtatctgttgtttttcttctctttaataatagccattccaactggggtgaatgatatctcattgcccatttaatttgtattttctggatgattatggatgttgagcactttttcatatacctgttggccatttaagttttcttttgagaattgactattcatgtgctttgctcactttttaatgcgattatgtttttttttcattgttgagttgtttattttcagtattagtcttctgttggatgaatagtttgcaaatattttctctcattcaagaggttgtctcttcactctgttgttttctttgcttgctgtgcttttttatttttagtttaatgtatcttgtttgccttttttatttgtttgtttttgttgtctgtgcttttgatgtcttggctataaattatttgcctagaccagtgtcctgaattgtttttcctgtgttttcttctactagttttataggttcaggtcttacagttaagtctttatcttgagttgatttttatataacgtgagagataggggttcagattcattcttctgcatatggatatccagtttttccagtatcatttagtgaagggaggtgtccatcccgcagtgtatattcttgacacctttgtcaaacatcagttggctgtaaatatgtggatttatttctgggttatctattctgttcaattggtatgtgtggttatttttataccaatactttgttctgttggcgaatatagccttgtaatataatttgaagtcaggctgtaatgccttcagctttgtttttgttttgtttcgttcatttgtttgtttgttttgcttaactttgctttggctattccagttctcttttggttccatgcacactttaggattgttttttctgttgctgtgagaactgacattgatattttgatagggattacattgaatttgtatattgcttttgacagtatggtcattgatatggtttggatgtttgtcccctttaaatctcatgttgaaatgtaatccccagtgtcggaagtggggcctggtgggaagtgtttgggtcatggggacagatacctcgtgagtggcttggtatcctccttgcagtaacaagtgaattctcactttgaattcacaagatatctggttattttttaaagtatggcatccctgcccccttgctccttctctcaccatgtgattcactggctcaccttcacgttctgctgtgattataagcatccttgaggacctcaccataagacgagcagactccagtactatgcttcatatacagcttccagaacctgagccagtaaacctcttttctttataaattacccagtcttgggtatttctttatagtaatgcaaaaaataaaaataaaaaaaaggcgacacagtcattttaccaacctttttttaaagaaaaaattcagtggttaccaacattttaccaatattcttgggattcatgagcatgagttgtctttccattcgtttgtgtcctcttcagtttctttcatcagtcttttgtagttttccttatagagrtccttcactttagttagctttatttctagatcttttattttttctagctgttgtaaatgggattgccatcttgatttttttacagctgttttattaatggtatatagaaaccaatttttatatgttgaaaaaatgtaaagcgctttactgaatttgctatcagctctaagaattttttggtagaggctttgggttcttctaaataaaagatcatgtcatctgctgagagggacagtttgacttcctcttttccaatttggatgtattttgttttttctcttacctgattggtctgtctaggacttccagtaccatgttgaataagacttgtaaaagtgggcatgtttgttttgtttcagttcttgaaggaaaaggtttgaacttttccccattcagtatgatgttacctgtgagtttgtcatgtatgaactttgttattttgaggtatattccttttttgcctagtttattgagaatttttatcatgaagcgttgttggattttaccaaatgctttttctgcatctattgagatgatcatagggtttttgtccttcagtctgttgatgttatgtatcacatttgttgatttgcatacgttaaaccatccttgaatgccttatgtaaattttgcttgatcatggtgtattagtgagtttgtagtgagattaaatcagtaataaaaagtctcccacccaagaaaagcccaggcccagaaggattcacagctgaattctaccaaagatagaagaaataacaccagtcctcctcaaactattccaaaaaacttaaagggagagaattctcagtaactcattctagaaggccagcattaccctgttagcaaaaccagataaggccacagcaaaaacaacaacaacataaaggaacctacaggccaacatccctgatgaagttagatacaaaaattctagcaaaccaaagtcaacagacatcaaaaaggtaatataccatgatcaagcaatttgttagtgtatagttgttcataatagtctctgatgatcttttgtatttctgtgttatcagttgtaatgtctcatttttcatttctaattttttttatttgggtctttgttaatctagctagtggtttatcagttttatcttttcattttattgatccgttgtattttttttagttttaatttatttttggtctgatctgtattatttcttttctgctgttaattttgcatttggtttgttcttcctactctagttcctgaggtgcatcattaaattgttactttgaaaccttactactctttttttttttttttttatactttaagttttagggtacatgtgcacaatgtgcaggttagttacatatgtatacatgtgccatgctggtgcgctgcacccactaactcatcatctagcattaggtatatctcccgatgctatccctcccccctccccgcaccccacaacagtccccagagtgtgatattccccttcctgtgtccatgtgatctcattgttcaattcccacctatgagtgagaatatgcggtgtttggttttttgttcttgcgatagtttactgagaatgatgatttccaatttcatccatgtccctacaaaggacatgaactcatcatttttatggctgcaatagtattccatggtgtatatgtgccacattttcttaatccagtctatcattgttggacatttgggtyggttccaagtctttgctattgtgaataatgccgcaataaacagacgtgtgcatgtgtctttatagcagcatgatttatagtcctttggttatatacccagtaatgggatggctgggtcaaatggtatttccagttctagatccctgaggaatcgccacactgacttccacaatggttgaactagtttacagtcccaccaacagtgtaaaagtgttcctatttctccacatcctctccagcacctgttgtttcctgactttttaatgattgccattctaactggtgtgagatggtatctcattgtggttttgatttgcatttctctgatggccagtgatgatgagcattttttcatgtgttttttggctgcataaatgtcttcttttgagaagtgtctgttcaagacagagtttcgctcttgttgcccaggctagagtgcagtgcgtgatctcggctcactgcaacctctgcctcctgggttcaggtgattctcctgcctctgccaaccgagtatctgggattacaggcgcccatgaccacacccagctaatttttgtatttttagtagagacggagtttaccatgttggctaggctgatctcgaactcctgacctcaggtgatccaccaacttcagcctcccaaagtgctgagattacaggtgtgcgctgctgtgcctggcctgaaaccttattactcttttgatgcaggtgtttatttctataaactttcatcctactgcagtttttgctatatcccacaggttttggtatgttgtgtttccactttcatttatttcaaggcatgttttgatttacaccttaatttcttcgttgactggttattcaagagtgtgttttttaattttcatgtatttgtaaggttttcagagtttctctttgtattgatttctggttttattccattgtggtctgagaagatatttcatatgattttgatttttaaaaatttgacgagacttgttttgtggcttaacatatggtctatccatgtgctaatgagaataatgtatattctgtctatggccataccaccctgaacgcacccaattttgtctgatctcagagaataatgtgtattctgcagttgttggataaaatgtcctataaatgtcaagtctatttggtttaagatctagtttaaatccagtgttactttaatgaatttctgtctagatgatcgaatgctgagagtgaggtgttgaagtctctgttatagtctgggagtctatttagatttagtaatgtttgccttataaatctggatgctccactgttgggtgcatatatactaaaaattattaattattattgttgaattaatctctttatcattatataatgacctttgtctttatgactgtttttgatgtacagtttgtttcactcatcataagtatagctgttcttgctcacttttcatttctatttgtgtggaatatctttgtccatccctttagtttcagtctgtatgtgtctttacaggtaaagtgcattacttgtgggcagcatgtggttggatcctgtcttttatctactcatctggtctttgtctttttagtggaatatttaatccgtttacattcaaagttaatattactatgtgaccctttgttcctgtcatagtgttaattgttttctggttgttttgtaatattatttgtttctttctttttctcctattgtttttctttgttgtttggtgattttctgtagcagtgtcatttgattattttatcttcctcatatgtgtgtttgctttaccagtgagacttatacttttgtgtgttttcttcatggtaaacattgttcattcacatccagttttaggactctcttgagcatttttttgtgtagaacagatctggtggtgatggatttccttagcttttgcttgtttgggaaaaatgttatttctccatttattaaagatagttttgctgaatatagtgctgttgactagcagggttttttgttgttgttgttgttttcttttagcagtgtgaatatgtccttccattctctctggtcctataaggtttctgctgagaaatttactggtagtctgatgaaggtttctttatatatgactagacacttttgctgttttcagaattctctctgtctttgacgttaaaacagtttgactataacgtgccatgaagaagacctttttggatcttagcctcttgtatctaaatgtctgtatctcttgctagacttgggaagtttccatctattmttttattaagtaggttttaaaatgctttcattctgtcttggccttctgggaccccaaattgaacatttgggtgctctgtggtatttcatatatcacaaaggcatagttcatttttctttatttttgtctggctgaattatttcagaagacctgtgttcaggctctgatactcatttttctgcttgatccagtcttttgttgaagcttgcaaatgtattttttattttattcaatgaattattcagttccraaatttgtgggggttttttggtttgttttctgtttttttttgttttgttttgttttttgctttttcagtcagggtcttgctttgtcacmcagactggagtgcagtggcatgatcttggctcactgcaacctctgcctcctgggctcaagtgattctcccacttcagcctcccaaatagctgggaatacaggcacataccaccatgcctgactaatattttgtatttttggtagagacggggttttgccatgtcctgagctcaaggaatccactcacctcagcctcccgagctggtgggatgatacatgtgagcccctgcgcctgacttggttccttttaatgatatctatttctttggtaaatttttggtttatatgctgaattgttttgctgactcctctgtattgtttttcagaattctgttgtatctcactgagcttctttagaataaataatttggattccttttccaggacttagtgattttttggggggggggggtgcggggacatctgttgctggggaattattgtattcctttggagatgtcaagtttctttgctttttcatgtttcctgtttccttaattgatatctgcacatctcttatagcgcctggctcagagggtcccatgcccacggagcctcactcactgctagcacagcagtagatcaaactgcaaggctgcagtaaggctgggggagggtcgcctgccattgctgaggcttgagtaggtaaacatagcagccaggaagttcaaattgggtagagcccaccacagctcaaggaggcctgtctgcctctgtagactccaccctggggcagggcatagctgaacaaaacgcagcagaaacttctgcggacttaaatgtccccgtctgacagctttgaggagattagtggttctcccagcacggagtttgagatctgagaacagacagactgcctcctcaggtgggtccctgacccccaagtagcctaactgggaggcatccccaaataggggcagactgacacatcatacggccggataaccctctgagatgaagcttcccgaggaacaatcaggtggcaacatttgctgttcagcaatattcactgttctgcagcatccgctgctgatacccaggaaaacagggtctggagtggccctccagcaaactccaacagacctgcagctgagggtcttgactgtaagaaggaaaactaacaaacagaaaggacatccacaccaaaaccccatgtgtatgtcaacatcatcaaagaccaaaggtagatgaaaccacaaagatggggaaaaaacagagcagaaaagctgaaaattctaaaaatcagattgcctctccccctccaaaggaacacagctcctcgtcagtaacggaacaaagcgggagggagaatgacaagttgagagaaggaggcttcagaggatcaaacttttctgagctaaaggaggaagttggaacccatcacaaagaagctgaaaaccaaaaaaagactggacgaatggctaactagaataaccagtgtagagaagtccttaaatggtgtgatggagctgaaaaccatggcactagaactacgtgacaaatgcacaagcttcagtagctgattcgatcaactggaagaaagggtatcggtgattgaagatcaaatgaatgaaatgaagcgagaaaggaagtttggagaaaaaagagtaaaaagaaacaaacaaagcctccaagaaatatgggactatggkgaaagaccaaatctacatctgattggtgtacctgaaagtgacagggagaatggaaacaagttggaaaacactctgcaggatattatccaggagaacttccccaacctagcaaggcaggccaacattcaaattcaggaaatacagagaatgtcatgaagatactccttgagaagagcaactccaagacacataattgtcagattcaccgaagttgaaatgaaggaaaaaatgttaagggcagccagagtgaaaggtcgggttacccacaaagggaagcccatyagactaacagtggatttctcagcagaaactgtacaagccagaagagagtgggagccaacattcaacattcttaaagaaaagaattttcaacccagaatttcatatccagccaaactaagcttcatgagtgaaggagaaataaaatcctttagagacaaacaaatgctaagagattttgtcaccaccaagcctgccctacaagagctcctgaaggaagcactaaacatggaaaggaacaaccagtaccagccactgcaaaaacatgccaaattgtaaagaccatggatgctaggaagaaactgcatcaactaatgaacaaaataaccaggtaacataatgacaggatcaaattcacacataacaatattaaccttaaatgtaaatggactaaatgctccaattaaaagacacagactggcaaattggataaagagtcaagacccatcagtgtgctgtattcaggagacccatctcaagtgcagagacacacgtaggctcaaaataaagggatggaggaagatctaccaagcaaatggaaaacaaaaaaaggcaggggttgcaatcctagtctctgataaaacagactttaaaccaacaaagatagaaagagacaaagaaggccataacataatggtaaagggatcaagtcaacaagaagagctaactatcctaaatatatattcacccaatacaggagcacccagattcataaggaaagtccttagagacctacaagagatttagactcccacacaataattatgagaggctttaacaccccactgtcaacattagacagatcgatgagacagaaagttaaaaaggatatccaggaattgaactcagctctgcaccaagcagaattaatagacatctacagaactctccaccccaaattaacagaatatacattcttctcagcaccacgtcatacttattccaaaattgaccacatagttggaagtaaagcactcctcagcaaatgtaaaagaacagaaattataacaaactgtctctcagaccacagtgcaatcaaactagaactcaggattaagaaactcactcaaaactgctcaactacatggaaactaaacaacctgctcctgaatgactaatggatacataacgaaatgaaggcagaaataaagatgttgtttgaaaccagtgagaacaaaggcacaacataccagaatctctgggacacatttaaagcagtgtgtagagggaaatttatagcactaaatgcccacaagagaaagcaggaaagatctaaaattgacaccctaacatcacaattgaaagaaccagagaagcaagagcaaacacgttcaaaagctagcagaaagcaagaaataactaagatcagagcagaactgaaggagatagagacagaaaaaacccttcaaaaaattaatgaatctaggagctggttttttgaaaagatcaacaacattgatagaccrctggcaaggctaataaagaagaaaagagagaagactcaaatagacgcaataaaaaatgataaaggggatatcaccaccgatcccacagaaatacaaactaccgtcagagaaaactataaacacctctacgcaaataaactagaaaatctagaagaaatggataaattcctggacacatacaccctcccaagactaaaccaggaagaagttgaatccctgaatagaccaataacaggttctgaaattgagacamtaattaatagcctaccaaccaaaaaaagtccaggacgagatggattcacagccaaattccaccagaggtacaaagaggagctggtaccattccttctgaaactattccaatcaaccgaaaaagagggaatcctctctaactcattttataaggccagcatcatcttgataccaaagcctggcagagacataacaaaaaaagagaactttagatcaatacccctgatgaacatcgatgcaaaagtcctcaataaaataccggcaaactgaatctggcagcacatcaaaaagttcatccaccatgatcaagtgggcttcatccctgggatgcaaggctggttcaccatacacaaatcaataaacgtaatccagcacatgaacagaaccaaagacaaaaaccacatgattatctcaatagatgctgaaaaggcctttgacaaaattcaacagccttcatgctaaaaactctcaataaattaggtattgatgggacgtatctcaaaataataagagctatctatgacaaacccacagccagtatcatactgaatgggcaaaaactgaaagcattccctttgaaaactggcacaagacagggatgccctctctcaccactcctattcaacatagtgttggaagttctggccagggcagtcaggcaggagaaagaaataaagggtattcaattaggagaagaggaagtcaaattgtccctgtttgcagatgacaggattgtatatttagaaaaccccattgtctcagcccaaaatctccttaagctgataagcaacttcagcaaagtctcaggatacaaaatcaatgtggaaaaatcacaagcattcttatacaccagtaacagacaaacagagagccaaatcatgagtgaactcccattcacaattgcttcaaagagaataaaatacctaggaatccaacctacaagggatgtgaaggacctcttcaaggagaactacaaaccactgctcaatgaaataaaagacgacacaaacaaatggaagaacattccatgctcatggataggaataatcaatatcgtgaaaatggccatactgcccaaggtaatttatagattgaatgccatccccatcaagctaccaatgactttcttcagataagtggaaaaaactactttaaagttcatatgggaccaaaaaagagcccgcattgccaagacaatcctaagccaaaagaacaaagctggaggcatcatgctacctgacttcaaactatactacaaggctacagtaaccaaaacagcatggcactggtaccaaaacagagatgtagacctatggaacagagcagagccctcagaaataatatcacacgtctacaactatctgatctttgacaaacctgagaaaaacaagcaatggggaaaggattccctatttaatgaatggtgctgggaaaactggctagccacatgtagaaagctgaaattggatcccttccttatactttatacaaaaattaattcaagatgaattaaagacttacatgttagacctaaaaccataaaaactctagaagaaaacctaggcaataccactcaggacataggcatgggcaaggacttcacgtctaaaacaccaaaagaaatggcaacaaaagccaaaactgacaaatgggatctaattaaactaaagagcttctgcacagcaaaagaaactaccatcagagtgaacaggtaacctacagaatgggagaagatttttgcaacctacagaatgggagaagatttttgcaatctactcatctgacaaaaggctaatatccagaatctacaaagaattcaaacaaatttacaagaaagaaaacaaacaaccccatcaacaagtgggctaaggatatgaacagacacttctcaaaagaagacatttatgcagccaacagacacgtgaaaaaatgctcattatctctggccgtcagagaaatgcaaatcaaaaccacagtgagataccatctcacaccagttagaatggcaatcattaaaaagccgggaaatgacaggtactgaagaggatggggagaaataggaacacttttacactgttgttgggactgtaaactagttcaaccattgtggaagacagtgtggcgattcctcaaggatctagaactagaaatatcatttgagccagccatccccttactgggtatctatccaaaggattataaatcatgctgctataaagacctatgcacacgtatgtttattgcggcactattcacaatagcaaagacttagaaccaacccacatgtccatcaatgatagactggattaagaaaatatggcacatatacactgtggaataatatgcagccataaaaaatgatgagttcatgtcctttgtagggacatggatgaagctggaaaccatcattctcaggaaactatcacaaggacaaaaaaccaaacactgcatgttctcactcataggtgggagttgaacagtgagaacacttggacacaggaagggaacgtcacacgctgggacctgccgtggggtggggggaggggggaggaatagcattaggagatwtacctcatgtaaatgatgagttaatgggtgcagcacaccaacatgacacatgtatacatatgtaacaaacctgcacgttgtgcacatgtaccctagaactaaaagtagagtgaaaaataattataattaaaaacaaaaaagaacagcaaaaaaagaaaaaaacaagaggaactctactatagtggggttttgtgatatagaagcagcaggtaggctgctgagatacctttaggaagcatcttttctttctagtctatgtaacttctccaatctacactcacactccccgtcatgtagtgctccctaccactcatctaacaccaacattaactaacttttgggattttgactctgagtccgttctcctgtagtgtctgctttttgttacctgttcttgggatctggtgttctgtatatcacactagttctctttcctatgactccagtagagctcaaggcctcatttataaagaaatttgcctagcagcactttgttctagaaaggacaaaaagctacacattgagaatattcaggcaaccttgttcacagaattcctcattccctaccttgttaatttccatttctgtacttaagtgtcttacactagacagagaaacctctaaccaattgggttgtactctacgttttgtgttttaaaacaagatgacacaacctggtgatatcaagaactcagattgttttcttagaaaacttaatcagtccagtgtatgaagtggtattaaaatgaagttcatagtaaaatttgaggaaatttggttggaatttaggatgtgtaagattatttttgcacttcccaatgaaatgcttatacttttgaaattctcacttcttaaaaattcaatttaaaatattgaaagatgtggtatgacacaggtatcatgatagctttcatcaaaattcaactggcaatcatcctttctagtctaaactttaaaaaattttttttactgtttcagattacctcaactatgatccaaatacaacaaagtggaactattattttcaaccaaagacttagaacaataaagtagatgctggttctaaaatagtaattttgagtattttaagaattacttagttgtggcagatcaaaatcaaagagaaataaagcaatcaaatgtgctatgaaagtcacctatttctttctrtaactgctttgcaaaaaagggttcctatgtaggtaggaagaaaaaaaaagctttcatcaaactctgtaatgtgacatacttaatatgttctttttctgttttttaggacagtggtgattatcctcttaccatgcctggacctcagtggaaaaaatttcgttcaaacttttgtgaatttattggagtcctgattcgacagtgtcagtatagcataatttatgatgagtatatgatggacacagtaatctcccttttgacgggtttgtcagactcccaggtcagagcttttaggcatacaagtaccctggctggtaagtaattaacattttatttccttttcatttagttttgttgactatgttttattctgattacaaacttaatgagaagatttaattaaaaatttaattagaataaaacagtcatttgaatagtttttgttaaaatttatgcctgttttcataactggcatttgatagccttaagaatgaaaattgaaattttctggccagtgtcatcaaatgtctgtctgaatgtttagttactaatgtacatccttatttataactgaagaaattttaagagaccactaggccaaattctttggaaaacccaagtaataatagttgaaattccaaatttattgtattttttcatcgcataattacattgttttattgctcattattattatagataagtgggtaaatacttgtttatatacttgaaacaattctgtccattagggtaacaaacattcttcctattcctagtgctataataacttaaacatactcaaatattaacatctttaaagtcagttcttaaggtaggctgtagataatttgaagaactaacagattagttttcacttttgctttcttttagaattatcatgacaacttgtcaaccaactatattcattttttttcttggttttcagtaacgaggtaattttcttattttagcaattgttctatttttccgtcactgctttaactgtgcctacctaaaatgactatttttttcattcataatggagtgtgtgtatacttgttgagtgttcataagtgtatgtttaaatactcccaaattacatcttttttagtagcagtaactttgcctatattcatcttacttattatcataataaaccagatttagactcattagttacatttcattttgcatttaaattttaatttctcatttatctaatttatttaaagcactgttcctcagactttagcacacaccagaatcacctacagagcttgttcaaacagatrgctgggcaagaagttcctaggcaatgttgatgctggtgatttgggaactacacattgcaaatatctgctttaaaattttgttattttttggcttaacctgttgcccaaagccaataagataataactggagttgtgtatatgtttttacattctttttttcccaattctcatttttcccttactcagttaattcatattaattcatattagtgtctrttattctgttagttacagtcctaaccaagtaaacatgaagcacagtttgttttttctgagagtgttcttttctcattattaggaagagagggagatattttacccaattttatcttttttcaaaagattaaaaatataatttgttgaaaaatacctatgtagaacatacatcagacacagttcatactgtgttttgagagtatcttcttcctcattatcaggaagaaaaagattttttaccctgtttatcttttttaaaaagttactgtaaaaatactgtttattattcaaacagttatataatgttagactttttttttctaattcgccaacctttcgtagtatcctctgcatttggtcgttgctttttttcttttctttatactttctgttccttttcgtcttacttctttctgtgtacagtaatgcccatttacttgattgtcacatgcataggaaattcagcaatttggaaaaaaaaaccttgaaaataaagtagaaattgcttgtaaataaccaactttgctgtcataagaattaacgaatttacttttatgcagaagttattatctgggtttcccaaggccaagagagaaggagaagcaataagttaattgagggctgatagtattgtgaaatgaccatttaaaagaagaagacacaaaaattagtttacagttctcaagatagagcacaacctttggcttctctgtaggggcaagctacttttctttaatctagaaacttgtgtgcattctgtttaaaaggttaattgtatgccatttactctaagaacataagaggagtgctatattatagaaatacgcagaatattttgactcttaaaacattgttttattttgtgaacaatgcactttaactcatttgcatttgtccttcactgccatgtaaatgcagtattactgtattttactgcctttttgatgccatttcagctctccttttcatttgctcatttttagtaactttcattgtattgttttctctatacttatccctttggttatctccatctgctaatcttgtgtatgtttaaatatattttcattattccttttgaattgagtgtctcctgcctccccccattgcctttctgtgtctcttttccacggtctacctgcgttcatcataacctttaaaactacttgatgaatgtgattttgttttcacctgtgttctttttatattagtatcatcatgtagcctatttaaattcgaaattatttttcaaaatcagatatcaaaaaaacaaattaacaacatacgtttatacggaattttcaaaggataaaacttttcagttgttctctcaatttactttaacgtattactgtaattcccatgtgtctacactaattaatggttatatcttccaaggctcacttgtataaaatgtgagacatagcagtcacctacccttcaacaaagcacagagggcttgctgagaacttaattccaggctggacaacaattatccctcttttcaaggacattttgttctcatctttgccctcttcttatttttaatggtatatgtacgaggaatagattaaaagataatcatttttattcactttgcaggacaagtcttggggactagataaaatgggcaggaacatttaatcctctgcttcaaagactatgtgcatggacagttacaaggcagttatggccagatatgattatcggctttggaataaaatgctccttgacattgcttaaatcttagctgagaagagagacaatcaggttagttattttgtagggtacagatgtgatgagttccagagcttcataagtcatcagagtggtcttatcagtagtatttttaatctgttttccaaatatcccattttcctgttatgaattcaatatgtgtccctgttgtcagtgtttatgcattgcatttaattgtatacttttacatttttattaaaagttttttttatcattatatagttctttatgtctgtttattccacactcataagtatattcttatttttccattggaggtaaactctctttttagaatatattttaccattaaattgaaagagactgttaacaattaaattttatattttctttaatcccttcgttggaattttcaaacatactgtcctagttatttggcccattttaataagctttacattgtagttttcattaactattgatcttcagagctaagtgcccttatttttatttgaaatagctatctcagtgggacatagtagtacagtttgtggatttaatttatgtaagaaacattgtgtcataattattttggtggatttacaatctgagactgggaacttttttattttcaaatttgatgacatttttattttttgagggaatattttccttttaagttcaaaaataggtaagattttctttgttttaccactttcttgtttggtattatgaagttaaaattttactctcaaagaattgcttttcaggattatgtttatttttagacatttgcttttaaaatgtataccaatactttacaacttgttgacttcaaatttttgttagagggcaacattcaggctgagtaatgttggttaacgttttaatattttgttattttctcacctacataattttctgtgatgttataaatatattaatgctggctgcctctgacttctaaagttctaatttgaacaaaagggagttaaaatacaaaatttgtactaataatgacatgaagattgtttctattctcttttttccctcctaaaatgaatttgggaaaaaattagaaaatgtggtcaagatcatcacaaggccagtcttcatcagtgcttatcaataagtcactctcagactcctgagggataaacatttctttataccttatggttgattttatattcacatatgattcattattgattaacttttcttatagaatcrgcatctccagacttttcctctgaggaaggaaatgacatatgaaattgctttaatttatgatcagaggctgaaaataattttgcctcagaaaattgaagtctttttatttggccttcagttgctgaaatcatgtaatactgtggttgatagaatgggttctggcgtgcctgtctgaattcatattcgtctctgtcttttactagttggataaccttggacaagtccttaacataactggtcttactctctttatttgcaaagtgggaaagaaaagagattaggagtgcttgggacaatgcttggcatttagtaagctgcagctattattctattattctttaatgagaaaaacggataatagtatttgccaatatttcccttcctttatggttttactcagaatttattgatttgcttgttctattttaataaaaagtaataagacatgacagatggggaaatcataaataaacaagtagataaactttcaagaaccgctgttaagaaaacgaacagcatgcattttcttttcttttgcttttttttaatgtatgtttattttctgattctcactctgttgcccaggctgcagtgcagtggcatggttttgtttccttgcaacccccgcttcccaggctcaagcgatccttccacctcagcatcccgagtagctgggaccacaggtgcatgccaccacatccggctaatttttttgtagtttttgtagagttgggatttcgccatgttgcccatggccttgaactcctgaattcaagcagtttgcataccatggcctctaaaagtgctgggattacaaccacacccagcctgcattttcattttacttatcttttggctctcaggacccatattctgtttattaaattcaataattattttataatttttaaccacacagattgtttctggtttctatggttaagatgtgaaaattttagagcaatctggtattatcaaagaatagaccatgtagtataaataattgctcttcctttttgtatttacattttatttttttatattcatttttcaaaattcttctagagtttgaccttttcattgctttgtacttttactttgtcttactttactttttcaccgttgtgtttttcatccctcctccagatataaaatctttattcaattttctagggtttgtatataacagacttctgatgttctcgtgggattaatgcccaatagttggtgaaatctgcaaataccactatatcatgtagttttacccataaaataaagtataactttaaaatgtaattacttttttgaatctgtatatttaggtctataataacttgaaattttctaacttttttcttagtattattgtcttttacgttctatcatcggttctgaaaattagctttcttttggcagccagtttttgtaaagaaacaaggattttaaaaattactttataagcattacatatcttgaatttattaacttggtgactttggacaaattatgtaactcctgtgcctttcttcgtctttatagcatagatactaataatcctttctcgtggtagtattgggaagcttaaatgaaataatttatcttttgtttcctgagtcatatagatgaaataatttttgttaaatatgtaacatacataagtcacttagtaattgtctaatgttgtttgttgttgttgtttttgagatggagtctcactgtgttacccaggctggagtgctgtggcacaatcttggctccctgcaacctccccctcctgagttcaagtgattctcttgcctcagcctcccgagtagctgggactgcaggcgtgcactaccacacccagctaatttttgtatttttgggagagacggggttttatcatgttagccaggctagtctcgaactcctcacctcgggcagtccgcccaccttggcctcccaaagcgctgagattacaggcctgagcaaccatgcccagcccaacgttgtgattttttttttaattatactttaagttctagggtacatgtgcacaatgtgcaggtttgttacataggtatacatgtgccatgttggtttgctgcttccattagctcatcatttacattaggtatttctcctaatgctatccctccccctgcccccaccccacgacaggccctggtgtgtgacgttccccaccctgtgtccaagtgttctcagtgttcaattcccacctatgagtgagaacatgcggtgtttggttttctgtccttgtgatagtttgctgagaatgatggtttccagctgcatccatgcccctgcaaaggacgtgaactcatccttttttatggctgcatagtattccatggtgtatatgtgccacattttcttaatccagcctattattgatggacatttgggttggttccaagtctttactattgtgaatattgtcgcagtaaatatacgtatgcatgtgtctttatagtagcatgatttataatcctttgagtatatagccagtaatgggatcgctgggtcaaatgatatttctagttctagataactggggaatcaccacactgtcttccacaatggttgaactagtttacactcccacttacagtgtaaaagcattcctatgtctctacatcctctctagcatctgttgtttcctgactttttaatgattgccattctaactggtgtgagatggtatcttactgtggttttgatttgcatttctccgatgaccagtgatgatgagcattttttcatgtgtctgttggctgcataaatgtcttcttttgagaagtgtctgttcatatccttgtgattttaatatagagaacagctaagcttacttggtttggttgtaaagagggcacagaacttgaaaaatgttttaacatacttttcgttttcatattgtacactagaatattttcagtgtatataaaattacatatactacttacagagaattcagaaaaagagaaaagtacaaaaataaaaattctctataatggtaccatcttatgactatgccataacttgttattttaagtttctttgtcatgtgtacttgtgaagctttttggttttatttttaaacaagtgttctgatcaaatttttgactttttttcttttaattttttaaaattatgcctcattttctaaaatttagatgctacttaattgtttctgctgtttgaattttttgtctttcttttttagatcccctattatcttttgttttctttctttcttaatttgttctctcctttttgtgtagcatattttttgatagtttcttgagaaaaagacaatttgggaaatatgtatttgagactttacgtgcctgaaaaacatgttgtagcttcttgcttaatagtttgacccaatttaaatttcataattgaaaatttttttttaagattttgtttctcgtttccaaagttgctgttgagaagtccagtgctaattttagacttctggttgtgatcctgtttcttgtctttggaagctttgcagatttttttgtttgttactgaaatttcatgatgatatcctgaaattttgtgatgatacagtgttatgtatgtttattttccatttctttgtcctttctgtccactgtgttacctcatgtttattaattttgagtatccttttacatttctaagagttctttcttattttccaagtcttccttttttttttgagacggggtcttgctctgtcacccagactggagtacggtggcacgatcttggctcgctatgacctatgcctcctgggttcaagggatactctccgacctcagcctcctgagtagctgagattacaggcatgtgccaccatgcctggctaatttttgcatttttagtagagatgtggtttcaccatgtcggccagttggtctcgaactcctgacctcaggtgatctgcctgcctcggcctcccaaagggctgggaggccctacaccccgccacttgggccactacacccggcccaagtctcccttttttgaaatattctgtgtttcgtagataccttttcgttgatggtattaattatttctctgaggttttcttctgctgtcagtcctaaccttttttcttcttattctctgctttttaaactgtaattcatattggacattttcctcaaatatttgtttcttggctctgtagttattgttgatagtgagatactaaaaagctcaatagcagaggggtgtgtgtgttcacctctggcatgatgggacattgactctggcttccagattggtgagcatcactatcgagcagtctggtggtcagttagtttttttttttttatagatcctcaattgttgttagtgatcactgtcttccctggagaagttcagcctctttgcagaaggatcttccagtccacttaagcttggctgctgtctgctcttttggagttagatagaatgaagaaacactcagggcactcacacaaaccaaacataatcacacacatatgtctgatgactctggatttttggtttattttcttgagaagataaatgtctggacttccaaaatgaatgtgtcataaaggaattgcttgactgcctggcttggagtagagacttggggatttaattgcttattatacagactttgagataatattcctattttcagaccataacacacttcatcttctatggaacctactacttctaatagctgatggkgtctggattctactaagctaaaatagcttatttttattttcgagacagggtcttgctctgtcatccaggctggagtgcagtggcatgattacaacttactgcagcctcaacctcctgggctwaattgaccctcctgccttagcctcctgaagctgggactacaggcatgtgccatcacacctggctaattttccttttctttctttttccttttcctttcctttccttttttttttttttttttttttttattttgtagagaagaggtcttactgtgtttcctagtctggtctcaaattcctgggctcaagctttcctcccaccttggcctcccaaagtgctaggattataggtgtgcccaccaccacacgcccagtgcttgtttttcttagagatatggttatcatgctttttctaccctttctgtgattttaaatgctctctgctcatcctcctgctgtccatattaatatattcttatattgtggttaggggttacatgtattttctgagtttgttgaagatgaaaattgattttttaacttttatttgacgttcaggggtacatgtgcaggtttgttatataggaaagcttatgtcacagggacttgttgtacagattattttgtcacccaggtattaagcctagtacccattagttacatttcctgactctctccctcctctagacttccatcctccattagacctcactgtctgttgtttctgtctgtgtgttcatgctttctcatcgtttagctcccacttataagtgagaacatgaggtatttggttttcctttcctgcattagtttgctaaggataatggcctccagctccatccatgtccctgcaaaagacaggatctcgttcttttttatggctgcaaagccttccatggtgtatatgtaccacattttctttaaccagtctaccattgctgggcattaaggttgattccatgtctttaccagtatgagtagtgctgcagtgaacatgtgcatccatgtgtctttatgatagaatgatttatattcctttgggtgttgtattagtctgttttcatactgctataaagaattctcctagactgggtaattcataaaggcaagagatttaattgacacacagttctgcattgctagggaagcctcaggaaacttacaatcatggcagaatgcaaaggagaagcaggcacrttcttcacagggcagctggatggaagtgagtgcaagcaggggaaatgccagagacgtataaaaccgtcagatctcaggccaggtgcagtggctcatgcctgtaatcccagcactttgggaggccgagacaggtggattacttgaggtcaggagttcgagactagcctggccaacatggtgaaacctatctctactaaaaatacaaaattagccgggcatggtggtgcgtgcctgtaatcccagctacaaggctgaggcagaagaatcgcttgaacctgggaggtggaggttgcagtgagtcaagattgcactactgcactccagactgggcgacagagcaagactccatctcaaaaagaaaaaaataacctagctgggcatggtggcgtgcacctgtaatcccagctactctggaggctgaggcaggagaatcacttgaacccagagggcggaggttgcagtgagctgagatcgcaccactgcattcacagccttggtgacacagcaagactccacttcaaaaaaaaaaaaaaacaaagacatcccatcagatctcgtgagaactcactattggctgggtgcagtggctcacgcctgtaatgctaacacttttagaggccgaagagggcagatcattcgagaccagcctggccaacatggtgaaagcctcatctctactaaaaatacaaaaattagctgggctggtggtgggcgcctgcaatttcagccactagggaggctgaggcacgagaatcacttgaaccagggaggcgggggttgcagtgagctgagatcgcaccactgcactcccgtctgggcgacagaatgagactccatctcaaaaaataagaaaaataatccaaagaactcactatcatgagaagagcatgtgggaaactgcccccatgatcccagttacctccacctggtccygctttggcatgtggggattatggggattacaattygaggtaagatttgggtggagacacagagccaagccatatcaggtatatacccagtaatgggattgatgggttgaatggtagttctgtttttaggtctttgtggaactgcaacactgctttccagaaaaattgttttttaagagataaatggatttgttaaatctatgtcatttggaaactggtagtttgtcataagatcccttttaaaaaaaataagcattgtaaaaataaagtactataatcacctctctctttaaaaatctagtttgttccactatatcagacatatttccaaggtgtataacaatagttttcaaaggtataataggtatcactaaatataaatgcagttttttacttttcagttttatgtttagcaagacagaaatgcaaattgttggttattgattaaaagggtcagtgtccttcgacttcgttttaggcatcccatttcctgatgaactctccttttgttccagtgttttcttctgtgtttccactcaactgtttttttaattgtgattttaaatactttgacactatgtttttaatgttcttcacactcttcttgtcctcactgcctttatttttcccacttagattttatcattctttattataattacatcttccttcataccgtcaacttccttgcttctgtcttcctctttcatattccgtaggaaaaccccatacaaccatctctcccatacctgcagcagagctgaaagtggctggagaaaaatacataccataagggctgggctttacttttttttttttttttttccaagtggtcctttaatgctgcctagcaatccccttagtgtattatactccagggttatttccacatcctaacaaaattgttttatactttctcctcaaagctacatttcctatccagtcttcacatttagctgattatcttgcctgtttaatcgggatagtcgaaagagaatccttcagggattaagcctacctacctatctagctgcagttatactcttatcctctatctgttttcttaactacagtggcctctaaggccaatgcttgtacttgtactgtgaatctgatcccttttcaccttctcaagaactttgtctctcaagttgttctcactctcattacttcaaaatttctttcttttattagataactcattattttgctaatagctcccatcttttaggaaccctttgtgtcagtctgggttcccccagagaaacagaactaagagatattcttgcatctttctctgtctctgtctctctctctctctctctctcgcgcacgcgcgcacacagacacacacacacgtacacacgtttcactgatgtggctcagcacaattgtgggaacttgcaaatcggaaatttgtagggtaccccagcaagctggaaatcagacaggagtcgtgcagtcttgagtctgagatctgtggagcaggctagaaactcaggattttatttacttatttatttattttagagacagggtctcactctgtcacccaggctgaagtgcagtggcacagttgtggattactgcaaccttgaattctgggtttatgtaatcctcccacctcggcctccccagtagctgagactacaggtgcacatctcaatgccyaggtaatttttaaattttttgtagagatggagtcttgctatgttacccaggctggtcttgaactcctgacctcaagtcatcctttcacctctgcctcacaaagcactgggattacagatgtgagccatcatgctcagcctaggactttatgttgcagccttgaggcaaacatttcctctctagaaaacctattttttctcttaagctttcaactgattgcatgagacccactcacattattgagggtaatctcctttatttaaaggagattataggtgttaaccatacaaaatatctacaaaattccttcaaggaatatctacaaaattcctgcattagtgtttgattaagtaattgactgtgatagtctagccatgcctggacacataagactaaccattacactgtaccttgttccctcacgttcctctagccccagtttcatttttctccttttctttatagcaaatctcagaattatttatattcactctctccactcagtcctctcctattaggtttctgtctctactacttcactacctctcctgttgaggtcagcagttaccttcttattgcccaaatcagtgagcagctccagttgtcatctttttttctttggaaagacacagctaccattttttctccttggaacactgtcttcacttgttttctggaataccacattgtcctggtgattttagaaagctaaactgcaaatatcgagttatcttgacactcaatcttcagacaggtttttttaatgtattcactccttattgaataaagtgaaaaccaatttcatagacattatttttattaaaaaatagtgatgagtaggaaaataatatagtcacatgatttaaaattcaaagtagaccaggcactrcggttcatccctgtaattccaacactttgggaggctgacgtgggagaatcacttgaggccaggagttcaagaccaacctgggcaatatagtgggacccccatctctacaaaaaawttttttttttaattagctgggcatggtggtagctgtagtcccagctactcaggaggctgagatgagaggatcacttgagcctggtgggggtcgaggctgcagggagctgtgattgcaccactgtgctctattctgagtgacagagcaagaccttgtctcaaaagaaaaacaaaaagtaaaaaaattttatatggtgaaatgttattctttcacccctgtctctgaccttcaaattaacttccttgaagacaaccaaagttgccagtttcttacgtttttctaaacatgttatatgcaaataatagcaaatacacattcagtgagagacaatatggtgtgtttaagagctgggactatggagcaaggctgcctatactcaaattctatgtccaccaattgctatgtaaccatcaagtcttttagctgatctgtgcctcagttttctcttaatgtgaaaaggaactaataatagtacttccttcgtagatttgtgagttgtaaatgaataagtatgtttatacggcttggaagagtgactggcaagtaaaaataaataatacattcttttgcacaaatgatagcatatacacactgtaaggctatcttgtctgtatttttccattaacaaatatcttggtgatcttttgtttacaacacacaaataataccacctttttctaatttccatctagttttatggttctgaataccagtgtctttgataatgacttccaaatgtgtgtctactaggcatttccacttacataactaataaacaaaaatatttctaattatctttgccctttccatttatctcatttccttcattgtaatctaacaaattctttcagcagtatattctttttctttttcttttctttttttttttttttttgaggtggagtcttgctgtgtctcacaggctggagtgcagtggtgcagcctcagctcactgcaatctctacctcctgggttcaagccattctcctgcctcagcctaccgagtagctgggattactggcgtgcgtcaccacatctgggaaattttttttttttttttttttgtatttttagtagacacggggtttcaccatgttggccaggctggtcttgaactcctgacctccagtgatccacctgcctcagactcccaaagtgctgggattacaggcgtgagccccctcgcctggcctggtattttcaaaatacacttcatatctaacaatttctctctacctattgctgccacgttaatctaagccagcatcatttcactgagttgccaaaggcaaaaacctaagactcattattgcaaactttgagcaaaatattttcagctctgcctcactgctcctatttagtctcccttcttccagttttactgtcctatactctggtcacacatcagtttaaaatctaattcagactgtttcacatcactccacattctctaggacatcttaccctgcttagatttaattcatgagccttaaggagaggataggttaactggatcctagtaactctcttataatctggcctcttccttccttttaagtatcttcttctgcctctgactacctctgtgctccaaccagactaaatactatactctgtagtgagtaccctcctcccaacagtttaccttataactgtccctggaaagctgttctgctgtggaatcaygtgaccattccttcacttcatgctcaaatgtcaaggtctcagagaggccttcccaaatgaccatctaaaatagcacccccttaatcattaactgacgtggttttttcatttgcatattacctattcatttattgtcttcttttcctcactagaatgtaaaaatcacaaaaggaagttgtttgttttgttcacttgtgtatctctaataactagaacaatgctcagtatatgctggattgttagatgaatggacaggactttaaataagtgcttctttagctatgatgaatgactagtttttaattacgaatctgtcacaacctagtacttttgtaaaatgcggtggaaatagtatatatgtatttattagtgtcatgttattaaaatcaacaggcattaaattgtcagattgctataaaaacttctaaatgttttcaattttttgctcataatgaccttctaataaacttgttgtggtcagcacccatttgcrgacgacactatcagtaccactgtactagaacatatttaccattttatagtcagcagttaaaatgtgaaagctaaatgaaggacgtattcttctccttgctagacaagaagaagccacttaagagctgatgtcacattatgatggctgaattcctgcaggattattaacttacaaaaaggtttttttagtaataccaggaaaatttgataagtaccaattctatgcagagataagtctttttcagtggactcaattaaaacatcataatcctcattttatgtctgtcatttaatttgaggtttgtttttaatagctgtttatgtgttattcaatgaagtctcagttttacaggtttaaaaatattttatctcagtaaacactgctgtattatacctaatatgtttccgaagatatattgatcatttttaacatgtcttgtctgttttagtatgttgattactttactgtttatgtatctgggatggaaggagagtcattaaataatgacatttggagtttgggatctgggttcacaagaagatatacagctgaaagtaaaagctatgaagtttttaaaaagccgtgcctcagtttccactggtgaattgcaaccagggttggtgttaattttaatgcttttcagctcctggatattcaagtcattttgcgttaggtatgtagaggtagatactgaattaagctcctttgggtgtcacttcatatgctcataacaaacactgataaactagtattatcagcttgagtagttggaatgctccagattcctcttgtctttgagctgttctctttccttatacagtttaattttacaaattattttaaactttcatagtgtagtccaatatactactactggcaacacacaaaactcaaaatcactgtcttatattttgaaacacaagaatatttctcagtttactgtttgagacactaccacagggaaagaaacattttcatttaattcatttctaatgcaaaaatcctgaaaaatccatttctggtcactaatttaaataaatttgtttttcaggatttttgcattataattttgcattgtaatggtcactaacttaaacacgtttgttttttcaggatgtttacatttgtttttcaggttttttaccttatattttggtttaaggacagcagcaattatttaataacatagaactgatcaaaatgtaratagagtttccgaataacaaattgagtatacgtgtagatagaaatacagatacagcatacatacatactatatgtatttagaaaacacatatgtttacatatgtaattaagaaaaaataggccgggtgcggtggctcatgcctgtaatcccagcactttgggaggccaaggtgggcggatcacctgagatcgggagttcaaaacccgcctggccaacatggtgaaaccctgtctctactaaaaaatacagtaattagctgggcgtggtggtgcatgtctgtaatcccagctactccggaggctgaggcaggagaatcacttgaacctgggaggtggaggttgcagtaagccaagattgcgccattgcactccagcctgggcaacaagagcgaaactccaactcaaaaaaaaaataaaaataatgaaattttagaaacagtgcatgcttgtttttaattatatggatatgtttgcagataaatgaatcagttcttctaaagcactgaacagttcagtttttttaataaccraatgttcatacttgcacatgaataacctaaaaggagcaaaaaggggaaattatttaccagctcaaactgtcttgttcctttacctgtatttcccatattctcactatctcaatgatgaaaacaaatatgaacagacagaagtttgaggtttgtgtcatacctgtttgtcagaggatgtgaaacaaatttgaaagtgtttaataagatttacaaatacaagtgaacgtttaaaagtacattatcactgtggctggggaggataggtcaattggaaattcacaaagtacatttttaatggacttcaatgagtttggtaggattagtatgtttttcagggtttggaggttgtgcaactctctgaggtgaggaacaaagggagaggaccatatatgggggtaaagatcacaaattgattgtaaacatctaaaacatctaaggtacctttgacacatttaagtaaaggtactaaggatgcatttatatatactcatatttgatgatcagtagagaggtttaggcttgattagtgtgcccttacgtgtgtatttttaggagtaggagaaaggagttgttgaagatagaactgaaatcctttcttctgttagttaggatgaggctgtgtttaaatggaaagtgttaacaagccaagctgaggtagagaaaattatgttgcagatgagtttatttctataaattagttatcttttatttaaacttaaattatgcctgggttgtaaaacagaaattcactagtttcatttcttcatccattggctttataaatttgtaatcttatatggataaagttttgattcataggtattataatatttcttcatttcatagccatgaagctcatgactgctctggtgaatgttgccttaaacctcagtattcatcaggataatacccagagacaatatgaagccgagagaaataaaatgattgggaagagagccaatgaaaggttggagttactacttcagaaacgcaaagaggtaagtttcatgggaactgatgattttatgttctgtaaatgtgtggaatatatatgacattagtactttttaagttccctgtaaaaaggtttatgtgtatatttagttagattatttgatgtcagggtttccaaatgaagctggagtgttcattggtgatcatgtaagtgccgtctgatggcagaaaggaatcatagaacacctctgtttttgaaagaagttggtctgggagttaggcaactcaaaaaggttataaggctataggctcaaaaagtatgataaatactgaagtcagaaccgtgagccagcaaagctacatttccaggaaaaagctaaaggctacatactagctggtatataaggcactcctatgaataagattggtctcagttttacaatgacattttcatatatgtgttaaaaatgattttatactgttttttttttgggggatggagtttcgctcttgttgcccaggctcgagtgcaatggtgcgatctcaactcaccgcaacctccacctccccaaaagcaattctcctgcctcagcctcccaagtagctgggagtacaggcatgtgccaccactcctggctaattttgtatttttagtagagatggggtttctccatgttggtcaggctggtctcgaactcccaacctcaggtgatccgcccacctcggcctcccaaagtgctgagattacaggcatgagccactgtgcccggcctatactgggtttttaataggaaacatttttatttatccaatactacataaaatcttagatctgcactattagtctatcttataacttgaaaaaagaatatcacattacagcaaaggaattacgtatgaataataacttaatgggtttataataggcaagaaaaagcaacgatgttttgattattagccatactgtattagtttgatagggctgctgtgacaaagtaccacaaactgaacgaattaaacaaaataacattattataatctcacaggcttgcaggctagaattccaagatcaaggtgttggcagggccatcctcgctcggaaggttgtgttccagacttctctcctagtgtctggtagttgcttggctggtggcagcataattccaatctttgcatgacattcttcctgtgtgtatgtttgtccccaaatttattcccttcttaaggacatcagtcatattggattagggtcctcccctactccagtatggctgcatcttaatgaattaaatctgccacagtcctctcctaatttcacattctgaggtactaggggttagaacttcaatgtacaaatttttaaggaacatagtttaacccttcacacataccatacttgaaatattatagaagtaaatactagagctgggctttcgtaagtactgctgactcagaaatgtatgcctcttataaattaattagtttttatatgataaatgcaataaaaataatttttaacacttggaggaagttgcagaaatttgaatgattttgcaataaaagtattcccaaacttattttagtaaagcctgaaacaaagcatacagcaaaagaataaatctgagggaattttattgtcaacattcatgtatgtagtaaaagcaaatatttcactgaatattactatacagtaaattacagaataaattagaatagtagataccaccttgaatgtaattcagtgctgttgttgtttttgagtaataataaacacaaactttaactctgatcagttttgttgcctgaaatttgtatctttgccatagatactatttattttgttactgtacttcaccataagtagccaggatcctttttatcttctgttatacctcttattgggaacttggcctgctgtctgttacaggctagtgagatgcagagtaatgtttggatacattagatggagtaggaagttacttttagaacagcaaatatgttaattagggatgttcctttaaccaagaaaggcaaaaccaaacccagggacctgatttagacagaagagttctgttcctaaggcagatgatattttggagataggaatctgaccacacttagctataccaccactccttgtttgtgattgtgaagtttgtgtctagagagagacagtgaaaagttctaaaaccaatatgatataaatgtaaaggaataatggaaatatactggtattttcacacatctgtactacaagtgagaaaaggattgaaaactacccagaatgaaaataaccaggaattaaaaacaattggagctgttccttccaaataaaatgatcaggatttcaacttatatatattttttcatttcagctgcaagaaaatcaggatgaaatcgaaaatatgatgaactctatttttaagggtatatttgttcatagataccggtaagagattttaaaaataattttgaaggcttttcacttaaacaattattgattttttttgtggcccaggctaactgtaaaactcactaattatgatttatgttttgttttctggaaaacaactttggctgtcartgtcacactacaactatagaagaaattgtatgactgctgccactaccactgttatactcttccaaattcagaacatatgctgttggaagtagcttatgtacttggatttatactgatggaatattaattaataggatcataaactaatgtagctttaataagatattcttgttttcacatttaaaaaattaagtgccctacttcttgctctgtggtactcattttgttccatgggcaaattaataatttaaaaaaaaaaaaaacctgtgtgaagctgggcgaaaagaggacagagaagggcaaccccgcagttaatgcaacaactgtatcttcattcttgtttcctttcagataaacacattgaaataaaagccattagcaaaatatttttgttatcctccattgctaatgattttagtttgtctttctgtgaagcccaggaaccttaaaaacactaactacattgtaaaagagcatattttacattgagtgaatgaatcatatacatatacttgttaccttctgttgattagatgtgatgtgtgtaagtagatagacaaagataataaatagaagcactgttttcagacccatttgagagtatatttggctaattaatatagagcggtgggatgtggtcgctcatccctgtaatcctaacactttgggaggctaaggtgggaggatcacttgaggccaggagttaaagactgcatctctacagaaaatttaaaaatcagcccggtgtggtagtgtgcacttgtagtcccagctactcgggaggctgaggtgggaggattgcctgaaccagagggtcaaggctgcagtgagccttgattgcgccactgcactccagtctgggtgacagaacaagaccctgtctaaaacaaaacaaagaaatacacacatacacagctgacctttgaacaacatgggtttgaactgcaagaattgcctgtaaaccatttgtttctaactaaacacggattgaaaatacagtatttgtgggatacgaaacctgtttacatggaggtctaacttgttgaatatgcagattactcagagacagctgtagtacttgagtatgcatggattttgctatatgtgagcagtccgagaagcaatcccctgtgtataccaagtggcaagttgtgtgtgtatgtgtatctgtttgataatttattttaatggaacttaaacattttaaccaaaagaataaaatgttcttttgaaataggtccagggcttttatgttcagtgtggattgtctgattggagttttatgtctgctttcttgcatatactgcatgtataacatgttattgatatatttgttttaaaaagaacaaggatttgcatatacctgccatgcagtctttgtttttttttttttactgcaactttatggaggtctaattcacataaataaactgcacatttaagtgcataatttgatgagttttgacatatatacacctataaaaccaccaccacaagcgagataatgaatctctccatcatccttaagaaattcaagtgccaagttttctcatggcactttgtaactcctttctacctcccttcctgttgttctacctttccatcatcctcaagcaagcattgatgtgctgattatttacattttctagaattttatagaaatggaattatgcaacatatctgggttttttttttgtgggcggatctggcttctttctctgaacaaagtcagagttttttttatcattgaatgcgttgctagccgtaatgtgtatatatatgtgtgtgtgtgtgtgtgtgtgtatgtgtgtgcggtgtgtgtgtgtgtgtgtgtgtgtatgtatatgtatgtgtatatatatatatatatatatataatttttttttttttttttaagatggagttttgctcttgttgcccaggctggagtgcactggcacaatgtcggctcactgcaacctccgcctcccgggttcaagtgattgtcctgcctcagccttccaagtagctgggattacaggcatgctctgccacgcccagctaattttgtatttttagtagagacggagtttctccctgttggtcaggctggtctcgaactcctgacctcaggtgatctgcctgccttggcctcccaaagtgctgggattatagtcgtgagccaccaggcccggcctagctgtaatattttcatagatgccccttatcagattgaggaattttttttttttttgagatgagtctcgctctgttgcccaggctagagtgcagtggcgcgatctcggctcactgcaagctccacctcccgggttcacgccattctcctgcctcagcctcccaagtagctgggagtacaggcgcctgccaccacgcccagctaattttttgtatttattttattttttttttaactagagacagggtttcaccgtgttagccagggtggtctcgatctcctgacctggtgatccgcccgcctcggcctcccaaagtgctggggttacaggcatgagccatcgcgcccagccggaagtttctttttattcctagttttctgagagtttttattaggaatatatcttggattttgtcaaatctttttctgcatctattgagatcagtgtgttgttttattttttaaagacttaatgtggtgaatttatgttcagatgttaacatgaacgcataaagcccacattatcatgatatgtttttatctatatatggttgtatgtgatttgctgagtttttccaagaatttctgcatctatgttcaagagggataaatagctctaactttattttaatgaatatcactgtctacctttgttagcaaggtaatgctggccttgtagattgagttacagtgtattctctcttctttaattttctcggtgagtttgatagaactggtattatttcttcttcagataagagttctaccattggagcctagaattttctttgcaggaaggtttttaagtatgaattttctccagtagatatagggctgttgaggttatctgttgttcctgagtaaactttggtagtttatgtcttataagaaattggtacattcatcttggtggttgagttgtattaaaaaactatcagcataaagttggtcataatattggtaatttaacatctctctctctctccctctctctctcccactccttttccccctgcttccttcccgcttttctcttttcattgttcagtgtatgtggagctattttatcttattttatattgaatttttctattatttttgttttctatttcattgatttctgtcctttatttcctttcatctgctcactttgggtttcacttcttcagctcttcttagtttctcaaggtagaatttgaggtcattgatttgacactttttttctaataagggaatttactcctataaattttttaaagcactgctttagctatgtgtcctaaatttggatatattgcattttttatttagttcaaaatactgtctagtttcctttttgatttttttgtttcacccatggattattttgaagcatggcatttagtgtgcagatatttgaggattttctagatacctttctgttattgatttctaatttaatttcaatgtagtcaaagaacatagtttgtatgatttgaatgcttctaaatttattgagatttgtatgagacccacagtaaactctatcttggtgaatagatacctatagatacctatagatctctatacctcaagaaaataaggtatattctgcttttgttggctagcgtcttataccagttaggtcaaattggttaatagtgttgttcaagtcttctctctctttactgattttcggtctgtttattctaacaattattaagaagggtttataggagtactttctgtgttttttgggggtttttttgtttgtttgtttgttttttgagacggagtctccctcttgttgcccaggctggagtgcagtggtacaatctcagctcactgcaacctctgcctcccagatccaagtggttctcctgcctcagcctcccaagtagctgggattacaggcatgcaccaccacgcccagctaattttttttttttttttttttttttgagacggagtcttgctctgtcacccaggctggagtgcagtggtgcacggtctctgctctctgcaagctccgcctcccaggttcacgccattctcctgcctcagcctcccgagtagctgggactacaggcgcctgccaccatgcctggctaatttttttgtatttttagtagagatggggtttcaccgtgttatccaggatggtcttgatctcttgacctcacgagccacctgcctcagcctcccaacatgctggaattataggtatgagccaccgtgcccggccctaattttgtatttttaatagaggcggagtttcaccatgttggtcaggctggtctcgaactcttgacctcaagtgatccacccaccttggcctcccaaagtgctgggattacagacatgagccaccgtgccatccatgccaccacacctggctgatattcttgatataagttcgtgaacagatgtatagctttttttcattttcttgatggtgacctttacagagcaaatgttttcaatttgtatggcccagtttatgagtttttcttctgtggtcatgcttttggtatctgtgaacattgcctaacccctaagatttcttctgtgttttattttcgaagtttaatcattttgtctcttctattaaggcatatgaacctttaaaattgaatttttaattcaatttttgtagatgacgtgatataagggcagaagtctactttttgcatacaaattttcagttttcccagcaccatttaatgacaaagtatctttccccaattgaattaccatgccatctctcttgaagatgaattgaccataaacacaaggttttatttttggattttctgtctatccttacactgataccacctgcattgagtatgctttagatgagcttttaaaattaggtagtgtaagttgtcttactttattcttcgttttcaaaaattttttgactggtacagattctttgcatttctgtataaatcttagggtcagcttgtcaatttttgaacaaaagcttctgaaattatcatagggattgtaattaccttgtgaaccaatttggagagaattaacctcttaacaatatagaatttattccttatcttaatggggaaacaattagactttgaaattaggcacgatgttattaactaagttttgtgtagataccctttagtaggatgaggaatttacttctagcctgatttgttgggtgtttttatcatgatggattgatgtatttctttattttttctgttttgaatgaggtggtcatgcaggttttttcttttattatattaatatagtgtattgtgttcattgattttcagatattataccaaccttgcattctgggagaaattccacatggttatggtatacaatcctttttatatgctactggattcagtttgctagtattttgttaaggatttgtgcatttactttcataaggaataacagtgtcaatactagccttatagaatacactgggaactattcttcctgctctgttttctgaaagaatttatgaaggattggtaatatttctatgtttggtagatttcagcagagaagccctttaataccaggcttttctttgtgtaaaggtttttaattactgattcaatttatatatcctgaatttttttaarttttgttttgttttttattaatttattttcttgagacagggtctctgtctgtcaccctgcctggagtgcagtggcacaatcacaactccgtagaacctcaatgtcctgggctcaagcagtcctcctgcctcagctcccaagtagctaggactgcaggcaagcttcacgacacctggccaattttttattttttctagaaactagggcttctccctgttttgcccagaatggttagaactcttgacctcaagcagtccttctgcttcggcctcccaaagtactaggattataggtgtgagccactgcgccctgcacaccgccagattttttgttgtttttgagtcagatttggtaatttgtatttctcaggcaatatgtctatttcatgcaaattgtaaatttaatggcataatgttattcataatattttgtagttgttttaattttkggggggttgtcagcccccttatttattcttgtgtgatttgtgtcttctcttttgtctttctcagtttcactgtaagtttgttttgttgatcttttcaaataataatggacttgtaattttgttggctttctctgttttttatttccttgatttatgtttccatatttattatttgtgttgttttttttttttttttttcggagacaggatctcgctctgttgtccaagctggagtgcagtgtcatgatcattgctcactgcagccttgacttcacgggctcaagcagtactcccgcctcagccccctgagtagttgggactacaagcacacatcactatgcctggctaatttttgttatttttgtagagtcagggtttggccatgttgtccaggctcgtgttgaactcctggactcaagtgatccacctgccttagcctcccaaagtgatgggattacaggtgtgagccatcctttgctgatctttttgttttggtttggtttggtttttttgagacagggttttactctgtcacccaggtgggagtgcagttgcacaatcacagctcacttcagcctcaacatcctgggctcaggtgatcttcccacctcagcctcctgagtagctgggactacaggcacacactaccatacctggttaattttttgtattttcagtagagacgaagtttcgccatgttgcccaggctggtctcaaattcctgggctcaagccatytaccaccctcagcctcccaaagtgctgtgattaggtgtgaactatcatgcctggcctaattgtttcttaagttgaaaactaaaattattcattttatatccttcctcctttctcaactccccttataagctctaaattttccacaaagcactgctctagcccagcttcattttcttgtccttcctttgtgctattattgtcatatatattttgtctacattagttactaacccacctgtacagcattattttcagagtgttcagtcatctcttaacaaaattaagaggagaaaatacaaatacacttactgtcttctaatttactttcttgttaacatttttgacattcttcattttttcccgtggaatttagttattgtatcgtgttattcccttgcagtttgaaggacttcattttgtgtcccttgtaaggtaaattttaccctgcttaaactgttaaatggcatgtaaatatctgggggcagtcttagggctcatcttgtgttatcccctctcagagattaccattctgctctgactgataatccaacatctaaaaatcattttgtgcaatttggtttttgttttcatttacttttttcaagtgagagcataaattctgtccatcttggctccgtcatgcagtcttgaattcagaatccatatttttatgattttctgtcagtctgtaacaccagtatttattttaatgactcacctttcttgagtcttgacaaagctttcaacctattatccttgtagaaacaacagttatttaatttcttactgttacaatgttgatttacattttatttaatcagaccttgcataaactagtattggatctgtcatagcctgactgaactattcaaaactagaatacaagtgtrgttgagaatgtgacctacttggcaaaagtgatcagcatgccatggatactaatcattaatttccataagtatcactcagtctacattattgattaataggagatattactgcacgtactggaagtagtaggtactatgcagagatatcactttttaagttaccactttgtgtcccacttaccaccatccacttcaaacaaatttgatttttttgtttttttgttttgttttgtttttgagacaatcttgctctgtctcccaggctggagtgcagcagcgtgatcttgggctgattccagcccccgcctcctgggttcaggtgattctcctgcctcagcctcctgagtagctgggaatacaggtgtgcaccaccatcctcagctaattttgtatttttaatagagacagggtttcaccatgttggcctggctggtcttgaactcctgacctcaggtgatcttcctgcctcgggctcccaacgtgctgggattacaagtgtgagccactgcacccggccaacaaattggattttaatctgtatgctgctagatctaagtaatcatttacagtaagtatggagaccagaagaatgtgttttctaactgaatccttgtggtattgcttaagtctagaatttgggaaactgtacttcagaccaaatgatcagtttcttccacaaataaatggcaaataataagaaccaggggatgtaaaaacacaaaatactgaatgtgaaaaacactcacaaattcatatttaatgaacaggatatactttagaatgttgaggagacaattagtgaattggaatgtaatactgaggagtttacccagatcacagtaataaagggataaaaagatatggacggacctttctgatatgggaagggtagtgtcagatacttcaccagtcctttaaaaagaagtttcaggaaaagagagaagcccttggtcatggtagtgtgcacctgtagtcccagctacacaggaggatgaratggtaagactgcttgagcccaggagttccagggtgcagtgaactatgatcaagccactgcactccagcctgaacgacagagcaagaccccgtgtctaaaaaaatagatacatagaaagaaatgtattagagagaagtagtagtagtgagtacaattttataaaattagttaaacagaaacttcagattaaaaaaacttaatgagtgctgagtaggttagggaatatattctacatctagacataccgtagtgaaaatgaaaaacatcaaagatgaagacagttataaaagcaaccagaaagattgttatttcagtaatggtaaaagaataacaacaacaacaaaaaagaataacaaagttgttaggccataaggacaaacttactcagaggacagatttaagtacttttgagaagatgaaaaacagatgtctttaagactagttgagtcttttcatccttttatgttacaatgaaacatttcagaatcatattttcagagctattcttatacaataccataayagatttattctgaacaaactattattccattattttaatcttcttcttaatatttcatctttgatctaatgtgggggtcaggttgctagttaaaatgtaaatattaattagaggatatttttctttgaaagctaatgtatctttgacatttgatttttaatcttattaaagcctaaaattctgttaatagtaaaatattaaggcgtaatgcagggtaacagatagccatacaccttctctgtatgagactcttagtgatgcagtgcctttctgtgtattttgccactgtttttacttattaataattagcaacaaaaatgagatgaaaaatagttttataaacttgccacattttcaatacatctaaaataactcttagcagtcgggtgcggtagctcacacctgtaatcccagcactttgggaggatcacttgaggtcaggagttcgagaccagcctagccaacatggcgaaaccctgtctctactaataatacaaaaaaaaaaggggtgtgatggtctgtgcctgtaatcccagctactcaggaggctgaagcaggagaatcgcttgaacccgggaggtggaggttgcagtgagccaagattgtgccactgcactccagcctgggcgatggagtaagattatgtcccaaaaaaattaaattaaattaaattaaaactaaaattaaataactctagtaagcctgaaataataaatgaaatatttgtatttaatttgtaaacaacacagtttcagctcttcgggtttactcttacacattactacctttcaaaagccttccttgaccaccttctctcctctccattttacgtgcttctgtgttctctgtaacactctttactaactttcagcactcgctaaggtagtatttattttaatcatcttattgtaagttagggtctctattctcaagttcttagtctaataaaggatacagtatgacttttctgtaattctttcagctatttctttctccctatgctatttcataccaaaaaattctctataattattctattttggaaaatgtgattttttttttcctcgcagcctaatcttagtgataaaattggttgagacctgaattcactgggtgctgcaatttagagagtgtgccttttttggccattcataattatttctccctgtggagctctcatgagattccttgtacatgagcaataattgtgagtgtcaaaacatccatattagctaagcatggtttttgaaatttgtattataatcattttaatttagtctgcatccttactggaaaagcatccataagggtaatacaagaaacatttaattaaaattcactggagttcaacctcattttgttataagcagaaaataattaaacttccatctgctgagaaagtaatccaatgaaaacttaggtccagataccatattaaagggttatgttctccccaaaaggatgcattgtaatgatcaataattagataagtttttcctagaagcaaacatgatcattcttttatgctgtaaaatagagttaccacaaaggattaatagaattgcacctgaattattcttttctagttccttttctttgagtttccaagtaaagccttcatgtttagtttttaatttcaaggcctgaatgctaggatgttgtaaaaattagtctgtcttatgattgtctttattcctttcctcttgtcttactattttttgcaccccctgcattactctttgctttggatgctcccaaatgcctcagctagacatctttcttaaatggggtgaggctattggaaatagagattagttgtttaaaaataaatttaatatgaaaacataaaatttggaggactcttatgaggaaatatgtttatatcaaaagatatgttgtaatcaaatcagggatatttagacttacactgcatttttattttatactgtatctccttgaatatactattagttcctggagagcaagaaagcaaatatataataataataggaatcacagaagaactgagacttcactagagcttgaaagaataatcagtgtaggtaatcagagtagaattcagggtattataggcatagggataaccacaaacgtgtaggtgctgatgcacttgagctatttggactaaagaactaattgtgtaagatgattggttattattatatttctaagggtcttttataataaggaaactaataattttaattatcttttgccatgtaacaaattactcccaaacttggtggtgtcaaatatttatctcaggctgggggcagtggctcacgcctgtaaccccagccctttgggaggccaaggcgggtgcatcacctgaggtcaggagttcaagaccagcctggctaacatggcgaaaccctgtttctactaaaaatacaaaaattagccggatgcagtggcacgtgcctatagtcccagctactcgggaggctgaggcaggagaatcacttgaacccaggaggtggaggttgcagtgagccgagatcatgccactgcactccaacctgagtgacagaatgagactccgtctcaaaaagcaaacaaaaaaacatttgtctcataatttctatgggtcaggaatttgggagtagcccagctagctggttctagcttagatctctcataagattacaatcaaagcatcctccaagtcatctgaagacttggctggggttgtaggttctgcttccacaatggcttacttacatggctgatggcagaaagctctagttactcatcacatggagctttccatagagcaccttgaatgtcatcaagacatagccggtggctttccccagagagtgatcacagagagaacaaaacagtcacttagcctcaggagtcagaattcctcatttctactacattatattcatcagagatactttacgtagtatacccacattcaagaaaaggggaatgaaaggagcaaagaatttgtggacatccttcaaaactaccacatcagttgtaattttgctgtctagtctgtgattattcacatgtatatgttatgtattatgatctatcagggtgatgtcagcagtcaaagtggattggagcactagaacccaaagaggagacaagttacccagggagtttttatagctacagaataggctctctggccccacatggtcarattgcaagtctggaaaaggatatttacatttttaaagttaagatgggaaggattgaactggcatctgaagtagacaaggactgggattcctagaaaacatgtggtatgaaaatactggcaatgtgaaaccaacccaaatgcccatcagtgatagactagataaagcaaatgtggtacatacactccatggaataccatgcagccgtaaaaaggagtgagatgatgtcttttccaaggacatggatgaagctggaagccattatcctcagcaaactaacacaggaacagaaaaccaaacaccgtatattttcactcataagtggaagctgaacattaagaacacatggacacacagaggggaacagcacacaccagtgcctgttgggagttgggggtgaggggagggaacttagaggacgggtcaataggtgcagcagaccaccatggcacatgcatacctgtataacaaacctgcacgttctgtgcttgtatctgctttttttttttttttttttttttttttttttgaagaaataaaaaaaaatcggcattgcatacagagaacctgtgttctgagaacataagctgttcagtagtctagttggtgaaacaacaaagacgttagaaattaggcatagatgtagatatgggtgtaaaaaatgttttgaacaggatttccctgctgaagacgtaaaggtaagactggttgttctctagcctgttgcaaacagccattcataatctcagtattagtagtaattccaagaattaacctaactctaagagttagttggaagagttagatggaagaatgatttcactgtgtatatgtgcagttaccatactgagtagtcactaagttttaatcagcatgctgtacctattgactttgtcctcagcctgcttccatgaaattgtgtaataaaacttagcctggtttttatagaattgacttttacaagggtagtatagcagaggaaaaatgtaatggatcctcggcagagatactacttggtaggactgaaagagctaaaatgatatgatttggatgttttatagatatattttgtagttgtgttttggtttttgaggggagttttatttttgctactgttagcttgtttttatttggacatcccagtagaaaacaaagtatacaaagctgtagctcagagatggaaattttaaatagtaggataataccaaatgtcaggcaaggatgtgaaacactgatgtagacatttttaaatatctaataatgttgaagatgtgcattgcttctaacccaataatttcacttgtaggtatcaaaacagtgtctcacagatgttgttgactatgtcctacattaggtacacagtrgcttcaagaaagaatacttacttgcctactacatgtggagcattttggtattttctgtcctatatacttttatgtatttgttgccactcactgaatcaattttataatgtgctaatgggtcccgatgcagtattttaaaaacactgctctaaggaaactcccacatatctgcacagggagaaacatacaagaatattcatggactcattgttagtaaaagcaaaaccttggaaacaacttaaatttccatttatgagagaatatgtaatttataattgtttatagaaaggaacagtggacactggctaaaattaaaacatcagagctttataaaccagtatgcataaattgcaaaatatgatttgtgaaaaaagcaagttgtagaaggaggcctacaggataatatttatgtaaaacaatacatatgacgttaaacagagatggaattgatattcactgaatcaaggacagtcatttactcttgggaagggagatgtatcagacgtatataggaatttttaactgtattatatttcttagctgagcagtggatatatgcagttattcatkatattgtcccctataccttgttttatgtctgaaattttttgtctgaaaaaagaaatattcttgtcccacgcatgttcagtattatgtaggtctaggaacacctcacagtttatagtagagctactttttttttctttttagacagaatctcactctgtcacccaggctggagtgcagtggcgtgatctcggcttactgcaacctccgcctcctgggttcaaacgattctcctgcctcagcctctcgagtagctgggactacaggtgcccaccaccacgcccagctaattttttgtatttttagtagagatggtgtttcaccatgtttgccaggatgttctcgatctcctgacttcgtgatctgcccacctcagcctcccaaagtgctgggattacaggcgtgagccactgtgcctggccagtagagctactttttatactgtattcattataaatgtctagattgatgaaacaaatgaaagattataataggagggaggagccaagatggccgaataggaacagctccggtctacagctcccagcgtgagcgacgcagaagacgggtgatttctgcatttccatctgaggtaccgggttcatctcactagggagtgccagacagtgggcacaggccagtgtgtgcgcgcaccgtgcgcgagccgaagcagggcgaggcattgcctcacctgggaagcgcaagggtcagggagttccctttccgagtcaaagaaaggggtgacagacgcacctggaaaatcgggtcactcccacccgaatattgcgcttttcagaccggcttaaaaaacggcgcaccaggagactatatcccacacctggctcagagggtcctacgcccacggaatctcgctgattgctggcacagcagtctgagatcaaactgcaaggcggcaacgaggctgggggaggggcgcccgccattgcccaggcttgcttaggtaaacaaagcagccaggaagctcgaactgggtggagcccaccacagctcaaggaggcctgcctgcctctgtaggctccacctctgggggcagggcacagacaaacaaaaagacagcagtaacctctgcagacttaagtgtccctgtctgacagctttgaagagagcagtggttctcccagcacgcagctggagatctgagaacgggcagactgcctcctcaattgggtccttgacccctgacccccgagcagcctaactgggagacaccccacagcaggggcacactgacacctcacacggcagggtattccaacagacctgcagctgagggtcctgtctgttagaaggaaaactaacaaccagaaaggacatctaacagaaaacccatctgtacatcaccatcatcaaagaccaaaagtagataaaaccacaaagatggggaaaaaacagaacagaaaaactggaaactctaaaacgcagagcgcctctcctcctccaaaagaacgcagttcctcaccagcaacggaacaaagctggatggagaatgattttgacgagctgagagaagaaggcttcagacgatcaaattactctgagctacgggaggacattcaaaccaaaggcaaagaagttgaaaactttgaaaaaaatttagaagaatgtataactagaataaccaatacagagaagtgcttaaaggagctgatggagctgaaaaccaaggctcgagaactacgtgaagaatgcagaagcctcaggagccgatgcgatcaactggaagaaagggtatcagcaatggaagatgaaatgaatgaaatgaagcgagaagggaagtttagagaaaaaagaataaaaagaaatgagcaaagcctccaagaaatatgggactatgtgaaaagaccaaatctacgtctgattggtgtacctgaaagtgatgtggagaatggaaccaagttggaaaacactctgcaggatattatccaggagaacttccccaatctagcaaggcaggccaacgttcagattcaggaaatacagagaacgccacaaagatactcctcgagaagagcaattccaagacacataattgtcagattcaccaaagttgaaatgaaggaaaaaatgttaagggcagccagagagaaaggtcaggttaccctcaaaggaaagcccatcagactaacagcggatctctcggcagaaaccctacaagccagaagagagtgggggccaatattcaacattcttaaagaaaagaattttcaacccagaatttcatatccagccaaactaagcttcataagtgaaggagaaataaaatactttatagacaagcaaatgctgagagattttgtcaacaccaggcctgccctaaaagagctcctgaaggaagcgctaaacatggaaaggaacaaccggtaccagccgctgcaaaatcatgccaaaatgtaaagaccatcgagactaggaagaaactgcatcaactaacgagcaaaatcaccagctaacatcataatgacaggatcaaattcacacataacaatattaactttaaatataaatggactaaattctgcaattaaaagacacagactggcaagttggataaagagtcaagacccatcagtgtgctgtattcaggaaacccatctcacgtgcagagacacacataggctcaaaataaaaggatggagaaagatctaccaagccaatggaaaacaaaaaaaggcaggggttgcaatcctagtctctgataaaacagactttaaaccaacaaagatcaaaagagacaaagaaggccattacataatggtaaagggatcaattcaacaagaggagctaactatcctaaatatttatgcacccaatacaggagcacccagattcataaagcaagtcctgagtgacctacaaagagacttagactcccacacattaataatgggagactttaacaccccactgtcaacattagacagatcaacgagacagaaagtcaacaaggatacccaggaattgaactcagctctgcaccaagcagacctaatagacatctacagaactctccaccccaaatcaacagaatatacagttttttcagcaccacaccacacctattccaaaattgaccacatagttggaagtaaagctctcctcagcaaatgtaaaagaacagaaattataacaaactatctctcagaccacagtgcaatcaaactagaactcaggattaagaatctcactcaaagccgctcaactacatggaaactgaacaacctgctcctgaatgactactgggtacataacgaaatgaaggcagaaataaagatgttctttgaaaccaacgagaacaaagacaccacataccagaatctctgggacgcattcaaagcagtgtgtagagggaaatttatagcactaaatgcctacaagagaaagcaggaaagatccaaaattgacaccctaacatcacaattaaaagaactagaaaagcaagagcaaacacattcaaaagctagcagaaggcaagaaataactaaaatcagagcagaactgaaggaaatagagacacaaaaaacccttcaaaaaatcaatgaatccaggagctggttttttgaaaggatcaacaaaattgatagaccgctagcaagagtaataaagaaaaaagagaagaatcaaatagacgcaataaaaaatgataaaggggatatcaccaccgatcccacagaaatacaaactaccatcagagaatactacaaacacctctacgcaaataaactagaaaatctagaagaaatggatacattcctcgacacatacactctcccaagactaaaccaggaagaagttgaatctctgaatagaccaataacaggctctgaaattgaggcaataatcaatagtttaccaaccaaaaagagtccaggaccagatggattcacagccgaattctaccagaggtacaaggaggaactggtaccattccttctgaaactattccaatcaatagaaaaagagggaatcttccctaactcattttatgaggccagcatcattctgataccaaagccgggcagagacacaaccaaaaaagagaattttagaccaatatccttgatgaacattgacgcaaaaatcctcaataaaatactggcaaaccgaatccagcagcacatcaaaaagcttatccaccatgatcaagtgggcttcatccctgggatgcaaggctggttcaatatacgcaaatcaataaatgtaatccagcatataaacagagccaaagacaaaaaccacatgattatctcaatagatgcagaaaaagcctttgacaaaattcaacaacccttcatgctaaaaactctcaataaattaggtattgatgggacgtatttcaaaataataagagctatctatgacaaacccacagccaatatcatactgaatgggcaaaaactggaagcattccctttgaaaactggcacaagacagggatgccctctctcaccgctcctattcaacatagtgttggaagttctggccagggcaatcaggcaggagaaggaaataaagggtattcaattaggaaaagaggaagtcaaattgtccctgtttgcagacgacatgattgtatatctagaaaaccccatcgtctcagcccaaaatctccttaagctgataagcgacttcagcaaagtctcaggatacaaaatcaatgtacaaaaatcacaagcattcttatacaccaacaacagacaaacagagagccaaaccatgagtgaactcccattcacaattgcttcaaagagaataaaatacctaggaatccaacttacaagggatgtgaaggacctcttcaaggagaactacaaaccactgctcaaggaaataacagacgacacaaacaaatggaagaacattccatgctcatgggtaggaagaatcaatatcgtgaaaatggccatactgcccaaggtaatttacagattcaatgccatccccatcaagctaccaatgactttcttcacagaattggaaaaaactactttaaagttcatatggaaccaaaaaagagcccgcatcgccaagtcaatcctaagccaaaagaacaaagctggaggcatcacactacctgacttcaaactatactacaaggctacagtaaccaaaacagcatggtactggtaccaaaacagagatatagatcaatggaacagaacagagccctcagaaataatgccgcatatctacaactatctgatctttgacaaacctgagaaaaacaagcaatggggaaaggattccctatttaataaatggtgctgggaaaactggctagccatatgtagaaagctgaaactggatcccttccttacaccttatacaaaaatcaattcaagatggattaaagatttaaacgttagacctaaaaccataaaaaccctagaagaaaacctaggcattaccattcaggacataggcgtgggcaaggacttcatgtccaaaacaccaaaagcaatggcaacaaaagccaaaattgacaaatgggatctaattaaactaaagagcttctgcacagcaaaagaaactaccatcagagtgaacaggcaacctacaacatgggagaaaattttcgcaacctactcatctgacaaagggctaatatccagaatctacaatgaactcaaacaaatttacaagaaaaaaacaaacaaccccatcaaaaagtgggcgaaggacatgaacagacacttctcaaaagaagacatttatgcagccaaaaaacacatgaaaaaatgctcatcatcactggccatcagagaaatgcaaatcaaaaccactatgagatatcatctcacaccagttagaatggcaatcattaaaaagtcaggaaacaacaggtgctggagaggatgtggagaaataggaacacttttacactgttggtgggactgtaaactagttcaaccattgtggaagtcagtgtggcgattcctcagggatctagaactagaaataccatttgacccagccatcccattactggatatatacccaaaggactataaatcatgctgctataaagacacatgcacacgtatgtttattgcgacactattcacaatagcaaagacttggaaccaacccaaatgtccaacaatgatagactggattaagaaaatgtggcacatatacaccatggaatactatgcagccataaaaagtgatgagttcatgtcctttgtagggacatggatgaaattggaaaccatcattctcagtaaactatcgcaagaacaaaaaaccaaacaccgcatattctcactcataggtgggaattgaacaatgagatcacaaggacacaggaaggggaatatcacactctggggacggtggtggggtcrggggaggggggagggatagcattgggagatatacctaatgctagatgacacgttggtgggtgcagcgcaccagcatggcacatgtatacatatgtaactaacctgcacaatgtgcacatgtaccctaaaacttaaagtataataaaaaaaaaaattaaaaaaaaaaaaaaaagaaagattataatagccaacatttaatggaaggattaatggatgccaggtagaattctaagtcttctatttgtattaagtgattttattctcatagtaactgtgagctaggtggtattattaccactattttagagatgaggaaacctaagaaaaagggaaatacccaaggtcacacagctagtaaatagcagaaccaggatttgaactcaggatgtcttcctccagagcctgtacttttagccactatgttgtacagcctctccatgagaaaaagatactatcaaaaaatgtaggaaaactaaaggttgtaattggcagtatggcttggaaagagaatgttttccctgtttttatccttaagcaatgacaggagcctagagagaactgagacttattagagcaaggaattttgtcaccaaagagaaactaagaaaagtgccttaattatcattaaaattttagctaaaatgatagattattgccttttgtaaattggataattaaaaattacttaaaattttaacatttgtgaatggtaaatcagaaaccttgaagattgatctacagaagaaaattaggatttatgatattatagttaatatttttttcttaaagctaaggctaataaccttgtgatgaaagattataaaagtgttaacattgtatttgtttacaattcacagagattgtatagtaggaaagtcatcccaggagggttatattggatgcttacttatggtgaggtgaaaagccatctaggcaatgagccagaattctgacttttcgggttgttctgccatgacttcgcagtattgtcaccaagatggttaccattgtcactagaggtggattcttccgtctcagcctaaaaaatatattattacagatgaaagacctgtgccttgaataaagtgggctttttcttttaattcattacatgtgtgctagcttataaagattcccagttctggccggtcacagtggctcacgcgtgtaatcccagcactttgggaggccgaggtgggtggatcacttgaggtcaggagttcaagaccaccctggccaatatgatgaaaccccatctctactaaaaatacaaaaattactcaggtgtggtggcttgcacctgtagtctcagctacttggrtggctgaggcaggagaatcacttgaacctggaggcagaggttgcagtcagccgaaatcatgccactgcactccagcatgagcgacagagcaagactccatttaataataattttttaaaaaaagattaacagttcttttgagaaacattattctgtacttggatgttgtgactctgattttcttagaaagtttaacatgtttcttggctctgtaatagttgtgaggctctcagaaagctccaaatgtcattgtctagcccagtgaaaatagagtaattgggtcaaaatagtttaatagaagctttttttttccagtttggtattattagtgtttattttatagaaaacatgaaaaacagaagatacttaagttggaggccattcagaatgcaaatatatacaaacagcattagaaatatttattgcttatggaaagcgagtatgaatgcattctagctttgtatattaatttgagattgtcttttttttctctctctagtgatgctattgctgagattagagccatttgtattgaagaaattggagtatggatgaaaatgtatagtgatgccttcctaaatgacagttacctaaaatatgttggctggactcttcatgacagggtaagttactctgttctaagctttgatggaagttatgtttgtctcagtactaaaatgctrggaatcaaaatgacagtagttgatttttcaggagttgtaatcrtgtggamattttaagatgatgcagctgaataactrtttacttgatgattgtgatgaaactggaagcatttgcccaggggtgaagaccctatcttgtttagttacaatattgtcttgaaccaagtttgacaacctggtatatataaagttttcagagaaagaaaatcattatattctttttctaattcagaatcaaaggagatttcttttttcttaatatataaaaactaagcttttttwwaaaaaaaattttctaggaccatatcatagtagagtgctttatcagacttgaatagatttgttggattttagaatatttgatctaaaaatctaattctgccttctgactttaaaaggaatccctcatataagtaatcctgaataagtaatccttagaataaccatgggtaggagtgataagttattggaatttggccaggtgtggcatttacgtactgtaatagaaataatattagagtatattagagccccaaagtagagcasttatcataaaagcaactggaattttcattcccattataagttattttacagttttctgaagtatttttcatgaatactaccttatttaattgttaagaagttcctgtggtgactttacagagaacagctgtcctcagccttttgctcatccattgttgatcctttcattatacatgttacgtaatacttttgtttgctttccacctgtcttgccccctggaataccatattcattgagcaagttccataaatccctatgggttgcccttcagttactgcctattgcaattattgtgttcccaccccccttgactatgatggtcaggagaagctttgttctctctgctcttctgggatcttcacatctccattgctcctgggagccaaattttccrtttggtctgtgctgagatttgtccttagtctcatgaccaggaggaaggtctgtgtattatatcaagacaagggctactagcattgtcctataggcacctgccttatttgaggcttccaggtagtctttcagcaaaggatggagtaaggaggaaacatactatcctctaacaagtgggcatgagccatattttcaggcctacaaattcagaggaaatggggagttcaagattctcactgcatctacccagatatcctttagacttcacttttttcatatcataactcttattttgacataagagacttgcctgggattcagagttcttaaattctgtcacacttacaatttagtgctaggcctggtctttagtatcatcagttctctwtctaaaggaaataaatgtttccaaagaggcaacacttggctttgaactggtgatgaaacaccctggccctgtcattttctctttagcctttcagtgacacttagcaatagccacttaacttcacagtttttacagttactatttgctctgctccctccagtgtagaaatgttgtacaagttaatgcacatccactttcaactaaaagtgaaaatcctaacaaactgctgtcctacgtcaggaactatcaagacttcatctaccaccattgagtcttacctcatagcaatccagccttcagtaatccaatcccagaatcccattattgaagtctgattcccaggaccactcttggttccagctctcatagatcacattccctggatgccaagcctgagttggggatttttgtgctggtgatgttgcgaggtttgtactctcaagagtaacctgttggctgggcatgatgactcacacctgtaatctcagcattttgggaggcagagacaggcggatcacctgaggtcaggagttcgagaccagcctggccagcatggcaaaaccctgtctctactaaaaatggaaaactttgctgggcatggtggtgggcacctgtaatttcagctactcgggaggctgagacaagagaatcacttgaacctgggaggcggaggttgcagtgagctgaaatcacaccactgtactccagcctgggtgacaagagcaagactctgcctcaaaaaaaaaaaaaaaaaaaaaaaaggaacctataaaaaagtgaggaaagtatgacaaagcaggaaacagactaatgaaaatgtggtttcaggagaagtctaatctcaacctgatctcacagggagattgggagagtaaattgtaccttagagggtatcctgtacagaagcaaggaggctgggctgtttcacccctgtatctttctttactggctatgggcctcaacctgggcgagagaagggaagtggttgggagaggaaagatggagcataacctcctaggggtctatgtgctaggtggttctagtaaaccgtggtccattctccagagaaagatagagatattgaaccattagcagttaacactggcagacactgaagaattagcccagtaaaggggacctgggtagggcatcagcagcacctgccacaggcacttcagctttcgcttgtgtgctagggacttaccaacaaatattacgttatctcatagcacatctcatggtatgtatgctactgtaggcttgaatcagcttacaaaagagtgattatgcatctccataaatgagttcattgacatctcatcaataacttaatattggctatgaaggcactatttacattaaataaatctgcaaagagaacaaatcagaaccctattcctcagagctctttgttaaaacttttaccagcatatctctgcacttaatccctacgataattttataaacaagaaacctgagtatcagggtgattaataatatacttaacatcttgcatgtagctaataaattatatagaattggaactaaaatttagttgtatctgattccagaacttggtctcctgctgttacagcacatagcttctttcagaggatagaaactaatcccctttaaatcttttgagagacttgtctagatttctaggtgatcctgaatgcattttgatcatcaacatcctgtacgccaagttgatgastttattaaagacattccactaataaatagcactcccaggactcttcatgtatcattttgcctctgttttaaacattgtgctatttctgttttgctaactgctgtccctggaatataaattgaatccagtaaatatttgttgcatgaataaatgatgaccattttgtataaaaatcaggtttttccacagaattattcaataattacataaaggacaawtaaacatacttttccctaattataggtttaaaattctctctttgtgcctctggatgacgtgggttataccacatgttgagtcagcgttgataaatatttaaaataggcataacttactctcaagtaactaaggtcttttcagtgaatttttttttttttttacatataagggcaacacacactatacaattgttcagtctcatcctatgttgaattacaatatgcagtaagtcaaatgtttaagctaaattttagtcttcatatagacttgaaaattgtagtatggaattgactccttctgttgtgcttttatttgtatttctgaagcaaggggaagtcaggctgaagtgtttgaaagctctgcagagtctatataccaatagagaattattccccaaattggaactattcactaaccgattcaaggtaagcatcaagaatgataagcttatttaatttttctctttacaaatgctagttacagctagtttagcaaattacattatcatacaagtgtttagttcatattctttattacagcagtccccaacctttttggcaccagggaccagtttcatggaagacagtttttctgtggaccaaggtgggggttgaggggatggtttcgggatgattcaagtgcattacatttattgggcactttatttctgttgttattacattgtaatatgtaatgaaacaattatacaactcaccataaggtagaatcattgcagccctgaacttgttttcctgcaactagatgttcccatctaggggtgatgggagacagtaacagatcatcaggcattagattctcataaggagcacacaacgtagatcccttgcatgcgcagttcacagtagggttcatgttcctgttgttcctattgagaatctaatgccactgctgatttgacaagacttggagctcaggcaatagtgggagtgatggagaacagctgtaaatacagatgaaacttcactggctcacttgctcccacaccactaaccccttgctgtgtggcccagttcctaacaggttacagaccaggattggggacccctgcttttactacatgttctttaaataaacccatatgaaattgataagtgaatctctgctttacaaaagatattaccatgagttcttatttattacctttggaagaaggcttacctgcttaaaattttctttacagcttgttataaagatagtaattttgtatgttaaggcttccttgacacaaggtttagggaacagcaattgttgagaaagattttaaattacaaacatttatactaacatcccctttgtgtgagtaggactacaatactgcagtttcaagagtaaagctttttatttaacctatcattagtattgcatatatatcccagaatacattatattagatctgtcccagcttattttctgttcatagttggtttgttttacaacttttttttctcaggatcgcattgtatcaatgacacttgataaagaatatgatgttgctgtggaagctattcgattggttactctgatacttcagtaagtaatatccattactattttaactttattgatattttaataccttttccccaggatttttaatgtcctatctatatatagtccttatgtatatgtttatcattttaggttcaacttttacattttaacgttagatttaaaaagtgttttctgtttttttctatttttgttttttattttcactattgtttacttcttccacataaaaattattttatgcagcctagagaaaataccaatgatgtaacttacctttctgtttaaaacaaagcaggcccagtatgttggctcctgcctaaaatcccagcattttggaaggccaaggcgggaggatcacttgagcccaggggttcaagaccagcctgggcaaaaggggagaccctgtctctacaaatgattaaaaaaattaactggcatggtggcacatgcctgttgtcctagctacttaggaggctaaggtgggagggtcgcttgagcccagaaggtcaaagctgcagtgagtcgtaatggagccactgcattccagcataggtgatatagcaggaccctgtgtcaaaaataaataaataactcagagagaaagaagactgcaaaaggaagaaccctcaaagggacagtttcccaaataggcttctttttaatgatatagaagtagaagaaaaaaataaagcaattaaattgtctcactaatgatagagatttcaaaataataatgttatagctgtatttctacaggtttgactaaaaactagcaagaatctatgtgagagaatatatcctagcaaagtcatacataacaaatcctcctctccctactttgtgatggtacatctatcacgaactaaatatgtatgcagggatctactgttgtttgaaatccttttacattttggctctaacaccatgctctttattattgtggctttataatatatgttctaaatatagggtcattttctcctctttgtcttttttttcaaaatctagttaccttcttgtgtctgatttttgtttgatatgaattttaaaaatatacttgtcaagtgcctcaaaaactttgcctggaattttgaatattagaactccattgacttctatgatgaatttaggagagtttaaagtactttgctatgttatatcacttatgcatgaaaatgctggaattctcatcttttttaaagagaagtattcttactatgtttctcatgctggagtgtgttaacagatgtgatcatagcacattaaaactgctaactcctgaactgaggtgatcctcttttttttttttaatttaacttctggggtacatgtgcacaatgtgcagctttgttacatatgtatacatgtgccgtgttggtgtgctgcactcactaactcgtcatttayattaggtatatctcctaatgctatccctccccccaccccacaacagtccccagtgtgtgatggtccccttcctgcgtccaagtgttctcattgttcaattcccacctatgagtgagaacatgcagtgtttggttttttgtccttgtgatagtttcctgagaatgatggtttccagcttcatccatgtccctacaaaggacatgaactcatcctttttatggctgcatactattccatggtgtataggtgccacattttcttaatccagtctatcattgatggacatttgggttggttctaagtctttgctattgtgaatagtgccgcaataaacatatgtatgcatgtgtcttaaagcagcatgattataatcctttgggtatatacccagtaatgggatggctgggtcaaatggtatttctagttctagatccttgaggaatcgccacactgtcttccacaatggttgaactagtttacagtcctaccaacagtgtaaaagtgttcctatttctccccatcctctccagcatctgttgtttcctaactttttaatgatcgccattgtaactggtgtgagatggtatctcattgtggttttgatttgcatttctctgatggccagtgatgatgagcattatttcacgtgtctgttggctgcataaatgtcttcttttcagaagtgtctgttcatatcctttgcccactttttgatggggttgtttgtttttctcttgtaaatttgtttgagttctttgtaaattctggatattagccttttgtcagatgagtagattgtgaaaattttctcccattctgtaggttgcctgttcactctgatggtagtttcttttgctgtgcagaagctctttaggttaattggatcccatttgtcagttttggcttttgttgccatttcttttggtgttttagacatgaagtccttgcccatgcctatgtcctgaatggtattgcctaagttttcttctagggtttttatggttttaggtctaacattgaagtctttaatccatcttgaattaatttttctataaggtgtaaggaagggatccagtttcagctttctacatgtggctagccagttttcccagcaccattcattaaatagggaatcctttccccattgcttgtttttstcaggtttgtcaaagatcagatagttgtagatgtgtgatattatttgtgagggctctgttctgttccattggtctatatctctgttttggtaccagtaccatgctgttttggttactgtagccttgtagtatagtttgaagtcagatagcctgatgcctccagctttgttcttttggcttaggattgtcttggcaatgcaagctcttttttggttccatatgaactttaatgtagttttttccaattctgtgaagaaagtcattggtagcttgatggggatggcattgaatctataaattaccttgggcagtatggccattttcacgatattgattattcctatccatgagcatggaatgttcttccatttgtttgtgtcgtcttttatttcattgagcagtggtttgtagttctccttgaagaggtccttcacatcccttgtaagttggattcctaggtattttattctctttgaagcaattgtgaatgggagttcactcgtgatttggctctctgtttgtctgttactggtgtataagaatgcttgtgatttttgtacattgattttgtatcctgagactttgctgaagttgcttatcagcttaaggagattttgggctgagacgatggggttttctaaatatacaatcctgtctgcaaacagggacaatttgacttcctcttttcctaattgaataccctttatttccttctcctgcctgattgccctggccagaacttccaacactatgttgaataggagtggtgagagagggcatccctgtcttgtgccagttttcaaagggaatgctttcagtttttgcccattcagtatgatattgggtgtgggtttgtcataaatagctcttattattttgagatacgtcccatcaatacctaatgtattgagagtttttagcatgaagcrttgttgaattttgtcaaaggccttttctgcatgtattgagataatcatgtcgtttttgtctttggttctgttcatatgctggattacatttattgatttgtgtatattgaaccagccttgcatcccagggatgaagccaacttgatcatggtggmtaagctttttgatgtgctgctggattcggtttgccagtattttattgaggatatttgcgtgaatgttcatcagggatattggtctaaaattctctttttttgttatgtgtctgccagggacataacagggagagttagggaggattccctctttttctgttgattggaatagtttcagaaggaatggtaccagctcctccttgtacctctggtagaattcgactgtgaatccatctggtcctggactttttttggttggtaggctattaagtattgtctcaatttcagagcctgttattggtctattcagggattcagcttcttcctggtttagtcttgggagggtgtatgtgtccaggaatgtatccatttcttccagattttctagtttatttgcgtagaggtgtttatagtattctctgatggtagtttgtatttctgtgggatcggtggtgatatcccctttatccttttttattgcgtctatttgattcttctctcttttcttctttattagtcttgctagtggtctatcagttttgttgatcttttcaaaaaacgagctcctagattcattgattttttgaagagttttttgtgtctctatctccttcagttctgctctgatcttagttatttcttgccttctgctagctttagaatgtgtttgctcttccttctctagttctttcgattgtgatgttaggttgtcaattttagatctttcctgctttctcttgtgggcatttagtgctatacatttccctctacacactgctttcagtgtgtcccaaagattcaggtttgtgcctttgttctcattggtttcaaagaacatctttattactgccttcatttcgttatgtacccattagtcattcaggagcaggttgtttagtttccgtgtagttgagcagttttgagtgagtttcttaatcctgagttctagtttgattgcactgtggtctgagagacagtttgttataatttctgttcttttacatttgctgaggagtgctttacttccaactatgtggtcaattttggaataagtgtgatgtggtgctgagaagaatgtatattctgttgatttggggtggagagttctgtagatgtctgttcattccgcttggtgcagagctgagttcaattcctggatatcctttttaactttctgtctcatcgatctgtctaatgttgacagtggggtgtcagagtctcccattattattgtgtgggagtctaactctctttataggtcttttaggactttctttatgaatctgggtgctcctgtattgggtgcatatatatttaggatagttagctcttcttgttgacttgatccctttgccattatgtaatggccttctttgtctctttctgtctttgttggtttaaagtctgttttatcagagactaggattgcaacccctgcctttttttgttttccatttgcttggtagatcttcctccatccctttattttgcgcctatgtgtgtctctgcatgtgagatgggtctcctgaatacagcacactgatgggtcttgactctttatccaatttgccagtctgtgtcttttaattggagcatttagcccatttacatttaaggttaatattgttatgtttgaatttgatcctgtcgttacgttatgatgttagctggttattttgctcattagttgatgcggtttctttctagcatccatggtctttacaatttggcatgtttttgcagtggctggtactggttgttcctttccatgtttagtgcttccttcaggagctcttgtagggcaggcttggtggtgacaaaatctcttagcatttgtttgtctctaaaggattttatttctccttcactcatgaagcttagtttggctgcatatgaaattctgggttgaaaattcttttcttgaagaatgttggatgttggctyccactctcttctggcttgttcagtttctgctgagaaatccactgttagtctgatgggcttccctttgtgggtaaccckacctttctctctggctgcccttaacattttttccttcatttcaactttggtgaatctgacaattatgtgtcttggagttgctcttctcgaggagtatctttgtggcgttctctgtatttcctgaatctgaacgttggcctgccttgctagattggggaagttctcctggataatatcctgcagagtgttttccaacttgtttccattcttcctgtcactttcaggtacaccaatccgacgtagatttggtctttttacgtagtcccatatttcttggaggctttgttcgtttctttttactcttttttctcttaacttctcttctcacttcatttcattcatttgatcttcagtcactgataccctttcttccagttgatcgaattggctactgaagcttgtgcattcgtcacgtagttctcctgccatggttttcagctccatcaggtcatttaaggacttctctacgctggttattctagttagccattcatctagtcttttttcaaggtttttagcttctttgcgatgggctccaacttcctcctttagctgagagaagtttgatcgtctgtagccttcttctgtcagctcgtgaaagtcattctccgtccagctttgttctgttgctggtgaggagctctgtttctttggagggggagaggcgatctgatttttagaattttcagcttttctgctcagtttttccccatctttgtggttttatctacctttggtctttgatgatggtgacgtacagatggggttttggtgtggatgtcctttctgtttgttagttttccctctattttcttagcctcacaagtagctgggatggcaggcatgcactgccatgctcagctggatttctttttaaaaataccattaggtcttatagggtttaattttttcgtagaggttatgcattagttagtaggttaattctgaaatgccttatgctgtttttgttagaatagtatttagtattttctgcttggttattgctgaggaagagaaccttcaatttttgtgttggtctaatatgtggaccctatttgagctcttattctgagtcctagaatgcattctaatactttgttgattttgttggttttagtatgtatattattatataacctgcaaacaatttcagttttgtctcttccttttcccttttttttttttttttttttttttttttgaggcaagagtcttgctctgtcccacagactagaaggcggccaggyacagtgactcacacctataatcccagcattttgggaggatgtagcagctggattatctgagatcaggagttagagaacagtctgcctaacatgacgaaaccccgtttctactaaaaatacaaaaaattagctgagcgtggtgttgggcacctgtaatctcagctactcaggaggctgaggcaggagaatcagttgaacccgggaggcagaggttgcagtgagccaagatcatggtgttgtactccagcctagttgacagagcaagactctgtctcaaaaaaaaaaaaaaagctgtagaagaattgtgagcattttattttcttctcgttgaatctgtattttctgaattttacattattgtcttttatacttaaaggggaaacattactttcaaagtaagataaaagatgagacaacaattattaagtcttgagctttataatgaactttagcaagtttaaataaaagtagaaaggaaaataaacatttgctttagatcagatgttactttctgtatttttcagtggaagtgaagaagctctttccaatgaagactgtgaaaatgtttaccacttggtgtactcggcacatcgccctgttgctgtggcagctggagagttccttcacaaaaagtgagctaattatctttgaaaaccggttctacttttctatgttgttttcttgttgttttagagtttgtagaagagagtaatagtgactgaacacagtgctgaaaatgtccatctgatactccaggggctataacagcctcacagcctatgtatacatggtgaatcacagccttgaggatgctgtaccttgtgacatactccttttttctgaaatctgagaggatgattctcagctagatgtgagtggagattggaggaatgcatgaaatttataaaagctaacgtaattgataattcatcacactagttttttctttaaaattctgaggtctgatcttactttcttaacatttgtaatctaaatttgaagcagtatcacctttaaaatgccttccaaattttmattttttttcattctttccattatgatgatttttttgtttttttgtttttttttgagacggagtttygctcttgttgcccagactacagtacaatggtgcagtstcgactcaccacaacttctgcctcccaggttcaagcgattatcctacctcagcttcccaagtagctgggattacaggcatgcgccaccctgcccggctaattttgtgttyttattagagacagggtttctccatgttggtcaggccggtgtcgaactcccgacctcaggtaatccgcccgcctcagcctcccaaactgctgggattacaggcatgagccaccacacctggccatgatcaggattattttaatcagtaattcatagtaattctgaaagttttatatatatatagttgcagtttaattttttttaaaccttatttttttgtaaagcataacgttaatgagagtgtatgcatgtaaacatttaggatgtacatgttttagcgtgatttactgtatatgttctataattgattagtagattaactcattctttaaatcattttaaaatatatattatatgtaagtatatatgtatatataagtatatatgtatgtatgtatatataaatatatatttatatatgtatgtatatatgtatatatgaatatatgtgtatatatgtatgtatatgnnnnnnnnnnnnnnnnnnnnacatatacacatttttttttttttagagagatggggtcttgctgtcttgcccaggctggtcttgaactcctggcctgaagtgatcctcccacctcagcctcccatagtgttgggattacaggcatgagccactgtacccagttgattaattcatatttaaaatataaacatattcttggttataggtgtgtatctttttgctttgttttgtgttttggatttttgttcatggatttaaattactagctttgaataatattcacaagtgattttaaaagtttattatgtattctaacttcttcttatgctgaagtacaactataaatcatggactaggcaactgttgtgcatcattgactaactttgataatgagcaggcctggtcctctctccagtatctgcattcagtgctacaataacaaattgttctctactcacttgtacctctcaaagtgagaaaagttatttctatgtaagaaatctctgttaagaaagaaaccagctacttactgggcatgctggcaaagaaaatgaagaggaagaaagtcaaggttttcaggcatgacttaaaataatattgcatttcctagtgactctgacagctctggctagtagaataatgctgattttatatttatctttggatgttgtctgtcactgataccaagaatgtactgtagtctttcttttttcagcattattttattctaattagtctctattctctacttttcaaagaacttcgtgtttttagaaataatttgttgcttctgtagtttcagagagaaaaataaacttatgagattggttctctgtataatagaagccataaactggtaactcttgagttagaaaaagtcttagaatatacttattttatgtctgtattatatttttctatgtttgaaatattggctaaattttttatacttttaaaaattgataaatgcatatttatagggtacatgtgatattttgatgcatgcacctaatgtgtaatggtgaaattaggtaaatgggatatccatcacctcaaatatgtattatttctttgtgttgggaactttccaaatcttctattaataaatattttgaaatattccataaattattgttaactatagtcaccctactgtgstatcaaacactaaaacttatttcttctaactgtatttttgaacccattaaccaacctctctttattccaccctctggtagcgatcattctactgcccctccaggagatcaatcttttttttagctcccacattaaagtgagaacatgagatatttgtccttctgtgcttggcttaattcacttaacataatgtcatctagttccatctgtgtcactgcaaatgacaggatttcctttttatggctaaatagtattccattgtgtatatataccacatttgtttatccattcaaacgctggtgaacacttaggttgattccatgtatcactactatgaatagtgctgtagtaaacatggcagtgcagatatctstttgatatgctgatttttttcttgtagatatatacttagcagtggagttgcttgatcatatggtagatatttttagttttttgagtaacttccatactgttttccactgttgctgtactaatttacattcccaccaacagtgtactagcattcacctttctctgcatcctggccagcatgttatttttttgtctttatgataatagctattgaaaatgaggtaagatgatatctcattgtgatttcttatttgcactttctttataataaataatgagagcactttttgtataccagttggccactggtatgtcttcctttgagaaatgtccgttcagatcatttgcccatttgtaaattggattgttttcgtttttgctaaggggttgtttgagtaccttatatattctggttactaatcccttgtcagatgaatagttggccgatattttcacccactctgcaggttgtctctttattgatccctttgctgtatagaaacttttttgcttaatataatctcatttgtctgtttttccttttattgcccatgctattgaggtcttgccccaaaactctacccagactaatattcttaagaatccccagtgttttctttctctttttttttttttttcaagacggagtcttgctagttaatggaaatgggattgacttcttgacttctttttcagattgttcacttttgctgtacaagaatgctactgatttttatgttgattttgtattctgctacttttcagaatttattagttctcacaacaattttttgggcggagtctgtttttctaaatataagattatgccatccacaaacaaagatgatttgacttctttccaatttggatgtcttttatttcattctcttgcctaactgctctgactaggacttttagtactatgttgtataaaagtggtgaaagttggcatcctggtcttgagttcttatgggaaaggctttcaccttttccccatttaatgtaattgtagctgtgggtttgtcatatgtggactttattattttgagatgtgtttcatctttgctagtttgttgagagtttttatcatgaaggggtgttgatttctttcaaatgctttttctctgttgagagggtcatatgagttttgtctttcagtctgttgatgtgatgtatcacatttactgataatgcatatggttaaactatctttgtgtccctgatataaatcctgcttgattatggtacagtaccttgtggatatgttgttaaatttggtttggtagttattgttgagaatttttacatgcatgtttactagggatattgtctaatagtttttgttgttgttttgttgttgttattttgtctttgtctggttttggcatcagggtgatgctgaccttgtagaatgagcttggaggtattcccttatcttcaattttctggaatagtttgagtagaattggtgttagttcttctttaaatgcttggtagaattctgcagtgaagccatcaggtaccgggcttttttttttggggggggagactttattagtgcttcagtatcattaatttttattactgcttcaatatcattattggtctcttcaggttttcttttttgagacggagttttgctgttgttgtcctggctggagtacaatggcacagtctcggcttactgcaacctccacctcctgggttcaagcgattctactgcctcagcctctcgagtagctgggattacaggctcttgccaccatgcccagctaatttttgtatttttagtagagatggggtttcaccatcttggccaggctggtctcaaactcctgacctcaggtgattcacccaccttggcctccaagagtgctgggactaaaggcgtgagccaccgtgcccggcagttttctatttctttatggttcatttatgttaggttgtatgtgtccaagaatttattcatttcttttaggttttacattttgttggtatacagatgtgtataatagtttttactgatcctttgtatttctcttgtaaccattgtaatgtctctttttctgtctctgattttatttggatattcttttttttagttcagctaaaggtttgtccattttgtttattttttaaaaaaccaattgtggtttcattggtcttttgtatttagtcttaattacatttattctctgatctttattattcctttccttcggctaattttggtttgttttttgatgttgttgttgttgttgtttttgtgtgggtcttctagttccttgatacctttcattattgttgtctgtttgaagttttgctagttttttgatatagatacttattggtataaactttcctttagaactgctttagctgtactgtacttcataggttttagtatgttgtgtttctattttcttttctctcacgaaattctaaaatttcttctttgaaccatttgttgttcaggagcgtgttgtctaatttacatgaacttgaacaatttccattccttctgtaattgatttttagttttattgcattatggttaaaaaagatactcaatatgcattcaatattttaaaatctattgacttcttttgtgaccttgtagcctgtcctggagaatatttcatttgctactagaaaaatgagtattctgcaactgttagatggaatgttctgtaaatgtatgttaggtccatttggtctagaatgcagtttaactccagtgtttctttggaaacattgattctttttccgtctggataatcttcccattgctgaaaattgcacgttgaagtcccctactactcctattacattgcagttactctctttccttatgtcttaagtttttaaatatatttgtgaggttcaatattgagtgtagagatatttataattgttatatcctcttgtcatattgacccttttaccattgtaaaatggtattctttgtctttttttcttttcttttcttttcttttttttttttttttctttaagacagagtctcgctctgtcgccaggctggagtgcagtggcgccatcttggctcactgcaacctccacctcctgggttcaagcagttctcctgcctcagcctcccgagtagctgggactgcaggcacgtgtcaccacgcctggctaatttttgtgtttctagtagagacagggtttcaccatgttggccaggatggtctccatctcttgaccttgtgacctgcccacctcagcctcccaaagtgctgcgattacaggcttgcaccaccgtgcctggccttctttgtctttttttaatcattcttgacttaaagtctattttatttgataacaaatatatccacttctgttacatttttggtttctaagtgcatggattatctttttccataccttcactttcagtctgtgtgtgtctttatagatgaagtgagtttcttacggcataatataattgggtcatgtttttttttaatcgtttcagccactttatatgtctttcaatttgataatttaatccatttaccttcaggattattgttgatgggcatgtgtttactattgccattttgttgcttgttttctggttgttttgtagatcccattgatttttttctctctctcactgtcttccttttagttatctaataatatattttgattctgtgctgtttatttctggtgtatctattatagacattgctttgtgattacactgaggcttgtaaaaaatatcttgtagttaaaacaggttattttatgtagggcatggtggcttacacctgtaatcacagcactttgggaggccaaggcaggcagatctcttgaggtcaggagttcaagaccagcctggccaacatgatgaaagcctgtctctgctaaaaatataaaaatcagccaggcgtgatggcaggtgcctgtaattccagctacttgggaggttgaggcaggagaattgcttgaacctaggaagcagaggttgcagtgagctcagattgtgccactgcactccagcctaggtgacagagcaagactcactctcaaaacaaaacaaacaaacaaacaaaacagaaaaaaaacacagaaaaaaatacagtttattttaaacttataataactttgattgtaaagtatcataaataaactttacactttaacactgctcccctcccatgttttggcttttctgtgtttcaatttacattttaaaaattttgcttatctcagcaattgttgcagtttgttttggggtttttttgtttgtttgtttgttttttgtttttgtagagacaagagtttgccatgttgcccaggctggtctcaaactcctaagctcaagcgatcctcccatctcggcctcccaaagtttggagattacaggcatgaatcaccatgcctggccccagttgttatttttaatagttttttcttgtagtcttcatgcttaagatataagtcatttacttgctgcattttaaagtactctgaatttttttcagttttcttacttttaccagtgagttttataccttgaagttttcttgtcacacattagtgttggggtgatcagacccaacagcaggccgtgggggctacgaagtccagcagagtcaaaggaatgagaaaagacaagttaagaatgagtgcataaagtgggtccagggggccaacgctgrtatggaggctgcgaaggccccgagctctgggagcccacactatttattggtgatgaaagaaagaagcaggtggtgaggacgtttggatgtgggggtaaacaggtgaggacatgaggacgtaggggtagaaaggtagcggtgcatcaagcgttatctgtgacagtttactattttctttgatgcatataaaatatgctctgctgcttgagataatggagaacatgtttacgagcctgggagagcaaccaacaagtctgcgcacattccagaggccacgaggggttttatgctctgagccttggattccatccaagctacgaggggttttatgcctgggcttatatttgtggtgcggcagggcagccttccaccctttggcacagactttgctgttccaaaggccatgaggggttttagaccctggaccccggacattttccaagactcttttatattatgacagacaagccaatcctgcctgagcttttctgccaacacattagcattcatttctttcaaattgaagaactccttttggcattttttataaggcagctctggtgttgatgaattccctcagcttctatttgtctgggaaagtctttatctgtctttcatgtttgaaggatattgttaggtacagtattcttggatagcagttttctttcttcaaaactttgaatatagcatcccagtctatcctgaccttcaagatttctgctgataaatctactgaaagccatataggagctccattgaatatgatatgattcttttcttttgatgctttgaatatttcttctttgtccttgatttttgttaatttgattatgatatgccttgggaaattcctcttygggttgaatttgtttgatgacatctgagctttctgttcctggatgctgttgtctttctccagatttggggaattttcagccttactcttttaatatgctttccaggccctttttctctctcgtctcctttgggaatgctaattttgcagaagttagtttgcttgaacgtgtcccataattctcataggctttttaaattctttttttctttttgctcttctgactaggtaatttcataagttctgccttcaggcttactaattctttcctctgtttggtcaagtttgctgttgaagctttctagtgagtttttcacttcagttatattctttatttctaggatgtatatttgatttttaaaaattgtttctattcatcatatttctcattttgtttttcaaatttgatttagttttctatttggattttttgtgtgtatgtaattccttaaaattctttttaagaggattaccctgaattgcctgtcagacatttcatagatcttcagtttttctggatctgttgctggacctctgctggttttgtttggtagtgtaatatttccctgacttaagttgatgcttgtgtatttgaagagatagctaccgcttccacttttttgcaagttttctttggtagtgttagacctttacttcttagtttcagaacttgaaccctggcctcttgtttttttcttggtctggcaagaacttatagtggaatttaaacagtattccagaaccaagtcactgcacttctgttctttctcagtctggtgaagactcttagtactggagcttaaacacttccctggaactatattgctggccttacattatttcccaacctgggaaatccttaagtgggtactgcaacttaatcctgaccttttagttgtttccaggccaaggaaagactttatacagtcacctgggctttgtggaaaatacatctagggatttgatccttcgcttggattgtgccccttgcagtgcttttgcactggccactcccttcaacatggcattcccactggccaatgtgccgagtggctgccaagatccgtgcaccagttgctgtgatgtgcaccagttgctgtgatcagcaccctattctttctccccagttcaccccaggtgtttctggcctccaggcactcccagtggttccgtgggatggaactggagtgggcttcttgcaaagatgcccagaccagcaaggagagcaattttccacttctaattccctcttaccagaatcatgggtctagggaaattctctttgagttttgccagcttgtagggagggggcagttggcaccgtgtgaaatgactgtttctcttactaatcatagtttcttgattctgtgggcccagagggtttctccacttctcttcagagttctagcatattcagggtggtatccttgtgtttgaatagtttctggttgtatcttggtagggggagtgatgctcggcaatcttctgttccaccatcttgctgatatcacaacaccaaaaaaagtttttattagaatatctgccacagaaatccagaaggataagcctccattagtttttgtttctttgtgaaaatcaagccaattcttatgcaaatgaaagcttcactccataaatgttttttaggcccgtgtcttggagaaacttacagtttgatgacttgattaatgatctcttttatcattcttccatcatttaatatggtgacttagaaaatcttaaataagctatggtgtatccccaggagttccatgatcagctttcaaagatacataaatgtacacatccacacacgtatagtgtcttgtagtctagtcataagctattcacaatattaaccaatcatccaaaaagtagtaagatctgtctgaaatgaatgttttactacatgatcaaaaattccacattttaatactcaaaatttaagcaaattcctcaataccttatttatatgcaataaatggaattatttaaattggcacaaactgggcatggtggctcatccccataatcccagcactttgggaggccgaggcaggtggacgacttgaggtcaggagttcgagatcagcctggccaacatggtgaaaccccatctctactaaaaatacaaaaaattggcctggcatggtggcacacgcctgtaatcttatctactccagaggccgagacaggagaatctcttgagcccaggaggcggaggttgcagtaagcagagatcatgccattgccgtccagccaggccgacagagtgagacttcatctcaaaaaaaacataaaataagccgatcacggtggctcaggcctgtaatcccagcactttgggaggctgaggtgggyggattacttgaggtcaggagttcgagaccagcctggccaacatggtgaaaccctgtctctactagaaaatacaaaaattagctgggcatggtggcaggcacctgtaatcccagcaacttgggaggctgaggcatgagaatcgcttgaatctaggaggcggagattgtgccgctgcactccagcctgggtgacagagtgagactgtgtctcaaaaaataaataaatagattggtatatttcagttatcagggatattcatattttccttttaccacccctctgaaagtcacccattaaacagaaccttctcttaaatgacagctatatagattatagatatagcttcaagataagttctctagtcccctaatatgccttcctcctcacctgcccccccagaaaacctcagcttctctgtggtcgttttctggtagagattggtttattttaatatcacatgaaattattctcattttattcagttattttgcctctcatttgagaggcctactctgacttttatgtataaactagtacatgctatatacatataccgttttttttttttacttttctttataaccagcaacagtatatacttatctaccgtttattcactaaagtgagagctccatgagaacagggattttgtcgtttgttcctaagattcccttttacctagagcaatgcctagaaataagatacctttagcaattttttttttttttttttgagacatagtctcrctctgtcacccaggctggagtgcagtggcgcgatctcggcttactgtaagctccacctcctgagttcatgccattcttctgcctcagcctcccgagtaggtgggactacaggcgcccgccaccacgcccggctaattttttgtatttttagtagagatggggtttcactgtgtgagccaggatggtctcaatctcctgacttcatgatctgcctgcctcggcctcccaaagagctgggattataggcgtgagccaccgtgcccggccaacttagcagtttttaagttttgttagaataaatctaaacaaattaaaaatttcaaatctttttttttgccatatttcagatgttttgttactacatgatattttattaatttaccattaatgtcattttactaaaaactattgggttcatagataatgtttccagataataaggtgtgaattttttaaattattgatgaaacatttggttatatgttataattacatgactgtgaaatcagtgtttaggaaaatagaacttagggccaaggcaggggtatcacttgaggtcaggagttcgagaccagcctggccaacatggtgaaacctcatctctactaaaaatacaaaaattagcccagcatagtggcaggcacctgtaatttcagctacttggaaggctgaggcaggagaattgcttgaacccgagaggcagaggttgcagtgagccgagatcatgccactgcactccagcctgggtgacagagcgagactctgtctcaaaaaagaaaatagaactcagttaaaaattacatattctagtatcaatcatacaggataatagcagtccttatcattttcacacatatttgaacattgattgttcattgtaaaagtttccctttacattttatatctagtttaacctgtaggacattgttcagatgccaccattttccgacctataatgacatcagttacatatttctattgaaatagatgaataatctgatctctgattttttttttttttcggagtctctgtcacccaggctggagtgcagttgtgcaatctcagctgtctgcaagctccgcctcctgggttcatgccattctcctgcctcagcctcccaagtagctgggactacaggtgcccgccaccatgcccggctaattttttgtatttttagtagagacgggatttcaccgtgttagccaggatggtctcagtctcctgacctcatgatccacctgcctcggcctcccagagtgctgggattacaggcatgagcctctgcacctggcctgatctctgatgctcgttctccctgctccccctttttgttgttgttgttgttaaacactgaaatgatttgtgtgttgagggaagactaaagttcatattcatgtaactttgcaatgccctgtttttcatttccaggctatttagcagacatgacccacaagcagaagaagcattagcaaagaggaggggaagaaacagcccgaatggaaacctcattaggatgytggttcttttctttcttgaaagtgaggtaaaaaatgttttaagataattccttatttcttttattatattacattttaaatgtcaatwcattttaatttttttcaatcaaataaaaacaagtctgtttcttataaagttaccttcatgaattgcatgatatagaatcagtcctttaccttttgtggaaaggtgttctgaatatatatgtaggtgtggatcaacactgaatacagactggcaattgttaaacttttacagtattgcaatactgcatatctttttttttttttcttttgagacagggtctcactctgtcacccaggctggagtacagtggtgcgatctcggctcactgcagcctctgcctcccagattcaagggcttgtcctgcctcagcctcccgagtagctgggactacaggtgcccactaccacgcccagctaatttttgtatctttagtagagacggggtttcaccatgttggccaggctggtcttgaactcctgacttaggtcatctgcccaccttggcctcccaaagtgctgggattatggtcatgagccaccatgcccagcctgcataccttttttttattgttgccttttgtttttatgcctgtagcttttacattacattaaacagtttttgaaaattgtcagactgttaataacattagttttatcttgtttgaaaattatttagtaaggagaaagaaaaatacaaattcatgttttaattgatagttgtacgagcctcatagcaatatttccatgtgctatattcagttattgcttaaacaattttgtaattaacacttatatgtcaggatctgttttctcaagtaaacttcggtttttccaccaaaatggtgtgggtttttttttttttaatatattgtaatctgtatttcctactactgccgtgtcattggagaaacagtaaattaaacctgaagaactcctgaataacttaacttcttcgtttagaaatgcttgaaaatagagttgcaggccaggtgcagtggctcacgcttgtaatcccagcactttgggaggccgaggtgggcagatcacttcaggccaggagtttaagaccagcctggctaatatagcaaaagtccgtctctactaaaaatagaaaaaaattagctgagcgtggtggcgcacacctaatcacagctaataaagagtctgagacacaagaattgcttgaacccaggaggcagaggttgcatgcagtgagccgagattgtaccactgcactccacacttcgcgacagagccagattctgtctcaaaaaaaattaaaataaataagcaaacaaaatagagttgcaaaagaagtaaagaacatctagaaacctaggactctcaattttatttgttaaaaagtgtttttgatttgtgctagaatgtcagtgaagaaacgattctatgaatgctcaagtttgagagtaagaggggaacttagtaggaataaggaagagagacacaaacaggtagcctatatgaaaattaaaattggagaagaactcagtcagtggagtgaagggtgttagggcaaaacagcagaaagtggtgaaggagttgctgccattttttaagagagttaccaatgactagagaaataaagtcagaaacaaaactagctagagagttgaatttgagtaaagaatgtgtttaatagtattttaaatgtgtatgcaaattacctgaggatcttgttaaaatgccagttcttattcaatagctctagaatggggcctgagattctgcatttctaacagtctccaagatagtgctcatgctcgtggtccaaggatcacactttgcatactaatgatttgaagcattattttcttaacaagcaagggtgcatgtattacagaataaaatgcaaagtgtgaatttttttagtaaaacactaactaccccgtaaatatcacatgtctagtaaaccatttcaacttacactcttacctcccttaggttttttagaggaatggaataaaaagtagccagacatggtggctacttgggaggctaaggtgggaggatcccttgagcccaggagttgcacaggctgcagtaagctatgatcgctccatttgtactccagcctgtgcaagaccctgtctctaaaaaaaaaaaaaaaaaagcaacaatagtttcagaaattgataagtatgagataactactaaaaagtttagggaatatgatgatcttcgctaactgactttgattattcattaaaggaaaatgttttttatctctgaaagctcaagggcttttcaatttattaaaaggcatgagtacttagtttcaggcgttttgtcttttatttaaagaagtaatttgtaatgtttattactgcacaattttcagatggtcttactgtattcctgtgtttgctaccattttctaaagtcttacaacagaattagaatgtatttgccagctgtattacattccttttttttccttctttttttttttttgagacagagtcttgctctgtcactcaggctggagtgcagtggcgtgatctcagctcactgcaacctctgtctcccagattcaagcaattctcatactttatcctccaagtagctgagactacaagtgtgtaccaccatgcttggctaatttttgtatttttagtagagacagggtttcaccatgttagtctggctggtctcgaactcctaacctcaggtggtccacctgcctcggccttccaaagtgctgggattacaggcgtgagccaccacgcctggccctgtattgcatttttcacagctacaaaagcaactgcaaatagtattgaaaggtttctggttgattctaatgattcatggtgtttatattgacttttatggtatcctgtgtttcacaagaaatattctttgtgaaaatctctcctcttatctttttatactagtgtacacctaggatgaatgcttaatgaagccatattctcatagtatgatggtattccaattgtgctctactctgaatttctctttgttttactgtcacacactttaattggtaaaattttgtaatagacttgtgaaatactgaatttaaagagactttagaaataatagagtagaaagagtcttttttttttgggatggagtcttgctggagtgcagtggtgcaatctccactcactgcaacctctgcctcctgggttcaagcgattctcctgtctcagcctcccgagtagctgggattagaggcatgcgccaccacgcctggctaatctttttatttttagtagagatggagtttcgccatgttggccaggctggtcttgaactcctgacctcaggtgatccaccctcctcagtctcccgaagtgctgaaattacaggcgtgaagcactgtccccagccaagggagtcttttatagattagttacagactgatatggtttggccctgtccccacccacatcccatcttgaattgtaataatccccatgtgtcaagggtgggaccaggtggagataactgtatcataagggcagtttttcttacatggttctcatggtagtaagtctcacgagatctgatgtttttatcaatgggatttcccctgcacaagctctcttgcctgccaccatgtaagatgtccctttgctcttccttcatcttctgccatgattgtgaggcgtccccggtcatgtggatctgttttgtgagtccattaaatctctttcccttataaatttcccagtctctgatatgtctttattagcagcatgagaacagaccagtacacagacatttacctgggattaactgaactgattatttttttctttattttactgaaatgagaagtagtaacattttagtagaattrtaaaatgttgaattggaatcagtttgcagtgcatgtaaaatgtgattaagagatctgcataaacaagtcagtaactttgttttcttttggtaccaaaaggtgattttttaagatgtttcaacctgtgacagtcattgatttcaggtgacaaaataccttgtattttagatgcatgccagatagttggataagtcgtacttgaatgtgataagtctggatttccctagaggtagtatgactctagaatttattataaaaagtgtgatgcagccaggcgcggtggctcatgcctgtaaacccagcactttaggaggtggaggcgggcagatcacgaggtcaggagatcgagaccatcctggctaacacggtgaaaccccgtctctactaaaaatgcaaaaaattagctgggcctggtggcgggcacctgtagtcccagctactctggaggctgaggcaggagactgacaggaaaatgacatgaacccgggaggcggagcttgcagtgagcccgagatcgcaccactgccctccagcctgggcgacagtttaagactctgtctcaaaaaaaaaaaaaaaaaaaaaaaaaaatgtgatgcttttcagagggataaggatgctattagtaattatttcaaaacaacaagaacaacccagaacatttctggataatactggcagtatggtcacccttcttctttttttattgttttattttttggagaccaaatcctcggtctgttgccagactggagtgcagtggcagaatcttagctcactgcaccctccgcctccctgggatcaagtgattctcctgcctcagcctccctgagtaggtggtactgcaggcacgcgccaccacacccagcaatttttgtatttttagtagagacggtttcaccatgttgcgccagatggnnnnnnnnnnnnnnnnnnnnnnnnnnnnnnnnnnnnnncagtcacccttcttatgaatgaggaggataattgtgacagtcatttaagacaggaaaattgacagcttcttatcgatatttttaagaaatttcccaaaaatgccaggcacgatggctcacgcctgtaatcccaacactttgggaggccgaggcgggtggattacctgaggtcaggagttcgagaccagcctggccaacatagtaaaacacagtctcaactaaaaatacaaaaattagcagggtggcgtggtgggatgcacctgtagtcccagctactcaggaggctgaggcaggagaattgcttgaacgcaggaggcaagaggtggcagtgagccgagattgcgccactgcatcctgggcgacagagcaagactctgtctcaaaaaaaaaaaatatgaaagagaaattaaggtacagtatagattaagaaattttattatattgtgtagtaggagctgtgtaggagaacagaaacaagggaggccaggcactgtgactcatgcctgtaatcccaacactttgggaggatgaggcgggtggatcacttgaggtcaggagttcaggaccagcctggccaacatggtgaaagcctctctctactaaaaatgtaaaaattagtcaggcatggtggcaggtgcctgtcatctcagctactcgggatgctgagacaggaggatcgcttgaacctgggaggcggaggttgcagtgagccgagatcatgccgtagcattccaggctgggcgacagagtgagactctgtctaaaaataaaataatttaaaaaaaaacaatgaagggaaagaaccaaatcaaaggacatgcagtcagattactgcctaatagactctatatgcagattattacttgaacatgttttctagggaagtgaaaaatcaatacaataaaaggaaaagaggagtataagaaacattggtgagcaaataaattaaaaaacaaaaaacaaaaacctgagcgctaaacctaaaaactatgacattgatgtttaaggcaaatatctattaattagtttttaaatgtaggagtatagtgttcaaattaaatgaagagaagtgaaaaataggctaaggattttgataacggataaatgctagaaaataaaaccctgaatgaaggacagataaagtaatcaagaaaacatcacaaatagagcacagaaaataaaatgccagcaatattttcagcatgagtaatcccagtaaatataaatcaattaacatattttattaaaatgcagattatcatttgggattgaagtaaatgaagaatagctttatgctatttacaaacacatcttaaaataacttataggaagtttataaataataggctggataaaggctggaaataactaataaatgattacacaaagatagcagagggggcaatatcagtacaagataaaccagaattaaagaccaaaagcattaagagggatagaaaggggatagtctgtatttattgaaggtataatctgccaaatatatgcgattgtaaatcttcatatacctattctacagaaatacacataatcaagcacaaaagcatattcagctgatttattgtaaaatatataaaacaaaatttaccttgttaagtatacagttcattggcattaagtacatttatattgctaggcagtcatcactgccatttatctccagaactttttcaaatcttcccaaactgaaactctttattttagcttaaaataaagctctttaatttatatatgtataaataataactctttaatttagcatgggttaatagcaacagttttgaaacaatttatttttcttttttctgctgccattgttcatctttgactcttgagttgtgcacctcttgttcctgtcactgttggagtaatgttatggatggtctaaggatagtttctcagaatatgcgaattaggaaagtttgaagatatctccctcaaacctttgcctatattatttacaagcaaagatgctaatcagtattatttactctggctttgatggaattcaccaggacatgttgtgtgcatttgaaatgcagtcgaaatgaagtactgaattagtgtcagaagaggcagagcattacataagtcattaaaattcacactgaaaccagcctagtaacatggtaaccccgtctctacaaaaaaaaaaaaaaaagccaggcggggtagcacactcctatagtcccagctactccaggggctaagttcggaggatcacttgagcccaggaagtcaaggctgcagtgagccgtgattgtgccagtgcactccaggctgcgcaacactgtgagaccctgtctccaaaggagaaaaaaaaatcacactgaagttaagagtgattatagagttaggaatgaggaggaaatccaactcaagtgctgaatgtgccaagataacagtagataaccaatagtagatctagaagggtgactttcatacttttgggccactacttatgatgagaaaaatattttctctgacaagtacaagcacatataacagattacagttaatgaaatagtatttaccctttctatgtgctatgcactctttctactgtgcatcattttttgaatcttagttctcaatgcattgaattggtttaataacccaagaatggattgcagtctgtagtttgactaacactgattaccaggactgtttaactgaatgtaatgagcctcaaaagtggaagatcttttatattagggtggagaagttacttgtaagtagcagaaaccagaacaatgccaacaccttctgtacttgccttccctgaaaagcttcattagagtaatattctcagggcccagcatggtggcacacacctgtaatcctagtactttggcaggccgaggcaggcagatctcttgaggtcaggagttgaaggccagtctggccaacgtggtgaaaccccatctctaccaaaaatacgaaagttagccaggcatggtggcgtgggcctgtaatcccagctactcgggaggctgaggcaggagaatcacttgaacgcaggaggtggaggttgcagtgagctgaggtcacaccactgccctccagcttgggcgatagagcaagactccatctcaaaaaaaaaaaaaggataatattctccaaggcttaatgactggcaagtggtagagtttggtgtgaagtgtttgatgaagaccttaactatgtttgtttactgtgggaacatgggctccaaagaaaattgtcaagagaataatgaccaacagaaaatgggggtggagtaaggaatgaaatgagtccagtggaaatgagagtagaatagtggagagatggagtaacttgtattttttactttgactaagatgacagagatgtgaagtaagtacagctggtccaagagtttctaatggaattccaagggaaaatkattaatttcctttaaaaaataaaaataaagatagttgaagagaccgcaaggagtagggaaaagtgacctagatccagcatataacttcagaaaattttctaactagctatgctctgtttcctcatctataaatgatgtcattggactaggagatccttacttttactactgtaaatggtaaaaagttgattctacatactgcatccacactattgacagtggaatgtgaatatatatattgttctctaagtggtttttagaatcatggaaaccaagccattttaattatgaagaaaatgatttcttaactcaaattagtattagtagtttctttattaaatattctttggtcacacttgattttttctttttagttacatgaacatgcagcctacttggtggacagtttatgggagagctctcaagaactgttgaaagactgggaatgtatgacagagttgctattagaagaacctgttcaaggagaggaaggtatagyattttgacaagttaatttacatgattttgtatttccattgatagcaatacagttgtatatagatcrcttcttaaaaatgagcatatataagcatgttgtgtctttttgccaagagaacaatttgttttctgtaacaagtaaggatgtgtcaatcgtttctaacatgtttccatataaacactgccaccatgccacataagtttttaaaaatccatgcgtgtcatgtaatagtcaaaaaagtttttctttactttttcctttttaaatttaagtgacagggtcttgctctgtcacccaggctggagtgcagcggcccagtcataactcactgcagccttgaactactgggctcaagggatcctcccacctcagactatgggcacatgccaccacactcagctaatttttaaattttttgtggagacagggatcttactgtggtccccagattgcctcaagtaatcttcctgccttagccctccaaagtgctaggattacaggcatgagccactgcacctggccaaaaggttttcttgatgctgatttgagatacaaaatactgacgtaacttaatgtttttttttttaagtacatccagaattttttttttcttgatttatatgtgaactttgaaaaaaccttttatgcataatgatttaattagaccacagccatcccctcttttgttgcattttctttaagataaaaatcaggaaatcagagataaagtcatttacctagctactcaagaaatagggggacataagagccacatgataatttttgaagtatgcatctttttatatgctacttaataatatgcacagcaaattgaacatgtatacctaataaagagattgtgttctgaaagcttatacgcatattcgttcgttagaactagaaatgctttttcctgtgtatggttacgttttcaaactagcccacaatagtactttaaagaattggtaactcatttaattcatacaacagctttagaaggtgagtgatgccttgaggtaagtgaggcccacagtagattgaacatggtcttcagaatcaaaagaaaatttttgtgtgtgtgtgtgattgagtcttgctctgtcacccacactggagtgcagtggcgcattctcagctcactgcaacctctgcctcccagattcatgtgatccttctgcctcaggctcctgagtagctgggactgcaggcacatgccatcatgcccagctaatttttgtacttttattagagacaggatttcaccatgttgaccaggctcgtcttgaactcctgagctcaggtgatcctcccgcctcggcctaccatagtgcttgaattacaggcgtgagccaccgcatctggccaaaatctaaagtaatattaattcaartttttaactctctctctttttacttatgtcctcagattttctaatccttagtttgcctttttctgtaacagagattatttccttgtgtaccttatatagctgtgaagattaagcaagatactgttctattgagtcccttttstgcttcctgtaccctcctgtgtggttcatccttttggaatattacaagagcataatgagccatcccccgcagtagactacccatgcagattaccgggagagtgagcatcccccagtgttccttccaagcagtgatactaatttgtattatctattctggctttgacataattcattgagacaaacaagtttgtgttaaacccagatacatgctggtaaactggcccaaaatgcctcttctaaactaaaaacttttttctaatttattatgtgtgacacaaattcttcccaaacttttctcagacctttcaaggaagagcttattatgctatatttgcctctagctgtaattattatttattttatttgcacatggtctttcactccatgatatccttagtaagaaagtggtcctagaccaggtgtggtggctcacgcctgtaatcccagcactttgggaggctgaggtaggtggatcacctgaggtcaggagtttgagaccagcctcgccaatatggcaaaaccccgtctctactaaaaatacaaaaattagccaggtttggtggcgggcacttgtaatcccatctactcgggaggctgaggcaggaggatcacttaaaccctggaggcagagattgcagtgagctgagatctcgccgattcactccaccctgggcaacagagcgagacttcatctcaaaaaaaaaaaaaaaaaaaggaaagatggtcctgttgttaagttgacagggccctctgctcactaggtgaaactgtccactatattttgaattcccttcacttttgtgatcacaggaatatgaacctctgccttcccagcttaagcaatcctccgacctcagcctcccaagtggttgggactacaggcgtgcaccaccatgcctaattttttttgtattttcagtaaagatggggtttcaccatgttgcctaagctggtctcaaactcctgggctcaagtagtcctcccacctcaccctcccaaagtgctgagattacaggcgtgagccaccactccccggcttacacattctgtttctaactaaccttaatattttccctgataaaaatcaatttccctctaatgtctactgccttatcaacacttgagtaaagggcctcaggttagtattgaatggtaggttccannnnnnnnnnnnnnnnnnnnnnnnnnnnttgtttgtagctataaaattgccagagtaaggtagagcttctccttcctattccaactcattttctgtatatcaccccatgttccataaggttatttccaaggagaagggaggcaaagaatataaattaagggcagggcgcagtggctcaggcctgtaatcccagtactttgggaggccaagatgggtggatcatgaggtcaggagatcgagaccatcctggctaacacggtgaaaccccatttctactaaaaatatgaaaaattagccaggcctggtggcgggcgcctgtagtcccagctactctggaggctgaggcaggagaatggtgtaarcccgggaggcagagcttgcagtaagccaggattgcgccactgcccttcagcctgggtgacagtgtgagactccatctcaaaaaaaagaaaaaaataaatatataaattaagacaagacaagatggtctgctttgatattgttaactttctctcatgttaataagatgtgtaagtcagtaaataataattactaagtgtttcagtaatgaaggtggtctaggtgcattttacttgttaaaatatatactattaggtgtttcattgtggtttaaattctgtttacattggattttttaaacttccggtcagaaggttggtttggcttggcttgggtttggttggttggtttaagctagaaaagtaacttaccagatgggaacatttttggaagtcaaccacagtttcactgatcgaatctaggtaggcagagtctgagaaattaggcataacagttgcagaactgtatctacataatgacttaatttttcaaatacattttatctctatgcatgttgtaccacatgcaaaccacatataagctctggcatggagtggcatctaaattaattttctgtgctagtattttgctgtattttatgacaacaaaatgctaccagtaacttttttttaaagtaattttttagataggtggaatgtggtagaattccagtggagaaggctgtggttagcagttggagatgtaggactaaattttgggaaagcagacacactgtgacagactaccaacatcagtttaaatcacagtggccttaagactgtcttacagtgtktgtgtgtgtgtgtgtgtgtgtgtgtgtgtgtgtgtgtgtgtgtgtgtgtgtgtgtcggggggtgttttacagcaaaatcaagttgctgaataaatttttagtataatgtttggatctggttcttgtcaacagctctgccaccaggtaacaagaccataaccaaatcaagtaacttctggatatcagcttcttaaactgtaaaatgagaaactttatttttttttttatgggtttttttttttttttttttgagtctgggtcttgctctgttgcccaggctgtagtgcagtggcggatctcggctcactgcaacctccgcctcccaggttcaagcgattctcatgtgtcagcctctctagtagctgggattacaggcgctcaccaccacacctggctaatttttgtatttttagtagagatcggtttccccatgttggccaggctggtctcgaactactgacctcaagtgatccgcctgccttggcctcccaaagtgctgggattacaggaatgagccaccacacctggctgagaaactttaactagataatcttctttggttatttctagtgctaacattctgtaatccagttgatgaatgaagtagctgtaaataataagattcttaaaagcaggaattattaattcattaataatttaaaaatatttattaactatatgagtcaaatattatgctaagtgctgagcgtatagtgttatactagatgagctcactgccaatatggagcttacattctcctgaagaaggcagaccaaaattgagtaaatattcaaaataatttcaagagttaataagtagctttggtggataattataggggatctatctttagactgaatcctgatggaagaccttcctgagcaggccacctgtgagccaagaaactaaatgataaggcaaccaggcacggtagctcatgcctttaatcctagcactttggggagccaaggcgggcggatcacttgtggttaggagttcaagaccagcctggccagcatggtgaaaccccgtttctactaaaaatccaaaatgttagctgagtgtggtggcacgcgccttgtcatcccagctactcgggagactgaggcaggagaatcacaggaacccggcaggcaagatcatgccactgcactccagtctgggcaatagagcgagactccatctcaaaaaaaaaaaaaaaaagaaaagaaactaaacgataagggaccagatatggaaattgtcataaaagagctatctagatagaggaaataacagtttcaaagtatctgaaacatgaatgatgttatgttctaggagatgcaatagctggaacataatgagccaatgatacaagatgtaatagaagcagaaatcagatgatatagagcattttagtttataagtgaacttatctcatcctaaatgtaataagatgcttttgaagattttaaacaggggaataatgtgatccaatgcatattttaagaaaaatccctttcataaacattgtttggaaaaatacataatcattgcagtggtctctatgaggaatgatggtaaaaatataaaagagggagatggcttataaagagggaaagagcccatggctgagttaaagattgtggataggggatgaaagcaggaagagcaagaaagaatgagagttctacctaactataaaaaggataagagataattataacctttgcaagcccagtaaagaggatgttcaagagagccatagttaataatatatattgcagaggagaaaaaagactacacaaatcattttgtgatgatttaggtcattggtgattttaaagcatgattcaatgataccatatatattcagtgatactaaaagggagaagccagagttcaaggtgataagactaaaatcaatagtgaggaaatggagatgctgtgtagaaacttgtatagttatatgttgtgttaggaagttcaaatgacagtttgtaccatgaacagctacccatttgtttcagtcagtgtggctgtttggctcttgcctgtggcttaaggcttgtttgctttcaattttattatgtagttttgctgtcatatcccaaaaggaatttcaattaaatttcaactgcttttgagtttaccttatctccccgttcagggtaagtttctaagtggatggcttcaaatgataaagtaacaaaattgatggaattgaacactgtgcaaggttgagttaagcttcaacactactgtgaattttactcccactataatgggagaatgtttctgttcttgagataagttgttctgtccttcctcactttccgtaagactgtgttttcttcctaaataacagacaatgcatttagttcatgggcagccttgtacttcctttagctccagccaaatgtgaaaaattatgaatttctgaaatcataaaaatagaactttagttgttattgagcaaaaagctttttttgtattactaggcattggatcattcggatacagatggacaagctgatgtttcatttgtttttcctaagataagctaaagttcatgtgtttttttaaaagacaattgttaaaacactgaattaagatgtacatacatatttttacaagataattttggtacagaataaagaacaagatgttgtatcttttttgccttttctttgattttgctccaacttagtttaaaataatcaatgtaaacttttaaacctttgtaaattaattgaattcttaaatttatacctagttctgtgtctataatacctacatctactggtcttcaatataaataagtatacagagggaaggagaaagaaagaactaaactattcgaattatcaaaatctgagtttaaggctgggcacaggggctcacacctgtaatctagcactttgggaggccgacgtgggtggatcacttgagctcaggagttcgagaccagccaggccaacatggtgaaaccctgtctctactaaaagtacaaaaattagctgggcgtggtggtacatgcctgtaatcccagctactcaggaggctgaggcaggagaatcacttgaacctaggaggcagaggttgcagtgagccgagatcacgccactgtactccagcctgggtgacagagtgagactccacttccaaaaaaaccaaaaatatctgagtttaaaaatatgtaagaatgaggccaggcgtggtggctcatgcttggaatctcagcactttgagaggctgaggccggtggatcacttgaggtcaggagtttgagaccagcctggccatcatggtgaaaccccgactctcctaaaaatacaaaaattagccgggtgtggtggcacacctgtaatcccagctacttaggaggctgaagcaggagaatcctttgaacctgggaggcggaggttgcagtgagctgagatcacrccattgccttctggcctgggcgatggagcaagactgtctcaaaaaaaacaggctgggtgcagtggctcacacctgtaatccccgtgctttggtaggccaagacgggtggatcacgaggtcaggggttcaagaccagcatggccaagatggtgaaaccccgtctctactaaaactacaaaaatcagccaggggcggtggcagccacctgtaatcccagctactagggaggctgaggcaggagaatcactggaacctgggcggcagaggttgcagtgagccaagatagcctcactgcactccagcctgggtgacacgagtgaaatgccgtctcaaaaaaaaagaaaaaaagaattcgggaaagtatagaatctatgtgaaggaaaccatagttttaattaaatgacttaagatctcaaaactgaaaagctatattgtatttctagctgaaaatgtcattttttttaatggtactagtcataattccagtgggtttgagagagttctgggagatatggtgaatacgaactaactaagcaaaatgattttaaagtttatgtagaattctaagcttatgctgaaaagacagtatagcgtagtgcttaagagaactgactctggggtcaaactacctgagttcatatatttgaatgctctactgctagctaagtgcatttttctgtggctcattctccctgtctgtgaagtgaggatattagttcctatctcttagaaatgttttgtggataaaacaagttattacatataagccacttatgatcgtgctttagatatagaaaattcttaataaatgaattgctattagcgttatagaaattaaacaaaattttagaaaaagggctagataagggaaacttgcttatatattcaagttggttgaattaagttacatattaagttataacaaattatgccrtaagtctagtataatcaaagcagtaaagcattgtcatagaaatatacaaatagattagtgaaactaaagaatccaaaaatgcctgaaccatgtttaaaaatgacatttaaattaaaaagggaaatctggtttaacagtggtggagacaactggctatttggtgggaataaacagacccacctactatcatcagaaataaatgccaaataggttaaaaatacaaaagtgagcaagcaagagagacagaaaaagtgaaaggaaggaagagcaaaagagcaagcaagcacacgagacagcaaaagatgaaataaattagaagaaaatgaagaacatattagtgtaatctgcaggacagagagatctttgaaggcaatacaagaaacctggaagccataaaacaaaaggagacagacgtggctttttaaaaattaacaatttctgtctgacagaagataccrtgaagagtctgataacaaatgacaaactgggagaaaatacttgcatcattcaaaagataaaaagtactacccctaccatacaagagttctcagattgataagaaaggtgaatagtagcacaaaaacaggtgaagaataaacatagacaaatcttagggaaaaatagaaaatatattccacttaactaattagtagataggaaggagcaaaataataaccaaataccccttttcaaccattggactggcaaaaattaaaatggtttataacatctagtgttcacagggatataaggaaccaaacattcataacattgcagttggggatataaattataataaataatcttatgatttctcaatatcaaggtcttgccatttgaatccattatttcttctttggagaatttattgtacagaaataaatgtatcagttacataaatatatatctattaatgatgtttattgaagcattgttcagtgtcaaaaatcaggaaattatttgaatgaccataagtagaaggctgactgaattatggtacatacgttagatagtaatttattaagataattattatgtgtgtattgacttgaaaaatattgtctgttaagtttttaaaaacatacggcatagtctttttcattaaaaaagaaaaattaggagttttgaaattatgtagaaggaaacactgtgaaattttagaattgcctaacttagaaaggtagcattagaagagaccagagtttatcctcttattctttactttgtatctctttcctatttgacttatgacagcaagcacataattactttaaaaaaaaaaatagcaaagtacagagcttaactttagtctttaaaataagcagtaatagaatgttttcagtttttttaataatgtgttcatytttaatacatggttgttgtaaaactgtctactcatgctcatgtattttgttttaccttagcaatgtctgatcgtcaagagagtgctcttatagagctaatggtttgtacaattcgtcaagctgctgaggcacatcctccagtgggaaggggtaccggcaagagagtaagttacattagtgagaaatctcctaaaaggtttttaatggcaattaactgtcttaaatatttggaaattttactgatatttgtatccctaaaaacatggtgtttttataaatgatggactatggtgcttcatctttatatcctatatgctatactcaggttccaaaaatagattctttccttcatgctcccatagcacctgtacctgcttctgttattgtacttacgtattttatatatatatatattttaaggatttttacgtctattaaaagtacataaaggctctggaagcaaaatgcctagtttgcaagttcttctatttagcagctatataatctttagatagatgaatgatttttgtatgtcttagtttccttatctgtaatatgggactagtaatacaggtatttatattaaagatgagttcagataatcatagatggagagactcctggctctgttggtttgaagaggtaggcagatctttctgcaaaaagcaagtataaaactggaatgtattgtcaaraacattacatcagggctctggaaattcaccaaagattaaaaaaaaaacacacattgggaaatattttttcctgaaaaattgatagagcttcaggtaaaagcagcggaagtctgtggccttcttgccaatacacatgtacccacatgcttggtcgataagatctgtagtttgttaccagagtggcactgcgtgcaaaaaccagaagctttgttgtcagagagaatggattaagtggmtcatgcctgtaatcctagcacttatgaggcctaggtgggggattacttgaagtcaggagttcaagaccagcctggccaacatagtgaaaccccgtctctactaaaaatacaaaaatgagctgggcagggtggcatgcacctgtagttccagctactcgagaggctgaagcaggagaatcacttgaacccagaggcagaggttgcagggagcccagatcatgccactgctctccagcctgggtgacagagcaagactctgtgcccccccccccccaaaaaaaaagaaaacaaaaattaaaatctttagttactgtattattcaaaaatgtctactttcaagaaaaactacagccatgcaaagaaacagtaaaatgtgaccayactcaggaaaaaaagcagacaatagaaatggcttctcagtagggctatatgttggatttagcaggcaaagacttcagaggccttttaataagtatattcaaagaattacaggaaaatatgaaaacaagaagtagagaatctcaataatgaaaacccaaatggaatttctggtgagaagtacaatgcacaaatttaaaattaactgagtaagttaattagcagatttaagatgatgaaagagacaatagaaaaacatgaagattaatagaaattatccattctgaagaacagagaagaaaaaagattgaagaaatactatcagagcctcagaaatgtgtggaaccaccatcatgtgcactgaaatatgtataatgggaatcccagaaggaaaggagagaggaatagaggcagaaaaaatatttgaagaaataatcactgaaaacctcccaaatttgatgagagacaatttgcagattcaagaagcttaacaaaatccaaataaaataaacacaaaagttccacatatagacacaacatagtcacattgttaaaagacaaagacaaaaaatcttgaaagcaacaagagatcaacaactaatgtagagggcagtagcaatagtattaacagttagcttatcagaaatagtggagtccagaagacagtggaatgacatattcagtgaaagtcaacaaaatggccaaccaagaattacaaatttaataagattatcttccaaagatgaaggtgtaaaaaaccattaccagagaaacaaaaaggaaaaatttggagaatgtgttgctagatctcccataccagaaatgctaaaagaagtccttcagccaggcacagtggttcacgcctgtaatcccagcactttgggaggctgaggcaggtggatcacaaggtcaggagttcgactccagcctggccaacatgggaaaccctatctctactaaaaatacaaaaattagccaggcatggtggcatacgcttgtagtcccagccactcggaaggctgaggcaggagaatctcttgaacccgggaggcagaggttgtggtgagccaagatcgtgccactgcactccagcctgggcaacagagtgagactgtgactcaaaaaaaaagaaaagtccttcaagccataaggaatatcataaggtgataaaacaaatccacaagaaggaatgaaaaaagaaggaatgggctgggtgcagtggctcactcctgcagtcctgtcactttgggaggccaaggcaggtggattacctaaggtcaggagttcaagaccagcctggccaacatggcgaaaccccatctctactaaaattacaaaaattagctgggcatggtggcacatgcctgtaatcccagctactcgagaggctgaggcaggagaattgcttgaacccagaaggcagaagtttcagtgagctgagatcaccccactgcactctagcctgggtgacagagtaagactctgtctccaaaaaaaaaaaggaagaatgtaaatctgaaatggtaagtatgtgagtggatataaaaggtaaaaggctgtgtgtgtgtgtgtgtgtgtgtgtgtgtgtgtgtgtgtgtgtgtgtctgtctatgtctgtttccttctcttaatttccttgaaagaacatgaaattatttaaatcaagcttgtccaacctgtggcctgcaggctgcatgtggcccaggacagctttgaatgcagcccaacacaaatttttaaacttaaaacactatgagatattttcgctttttttttttttttttaagctcttcagctatcgttagtggtagtgtattttatgtgtagccccagacaattgttcttccattgtggcccagggaagccaaaaaattggatacccctgatttaagtagataattatagcactatagtgttgagattataacataaatatatgtgacaagagtaacacaaaagggaaaaagatatggaactatattggagcaaaattgctatgttttattataattaattcaatatcaacctgaagtcagttacaagttaaaaatgtatattataatccctacagtaatcattcatatttaaaaataaaaacagaggaattatagtgrtcctcatctgctagagacatatgctgaaatatttaagggtgaaattatataccgtttacccttgaacaatgcaggggttagtggcactgacctgcacagtcaaaaatccatgtgtgctcacttcggcagcagatatactgaatttggatcaatatagagaagatgagcatggcccctttgcaaggatgacatgcaaatttatgaaatatttttatgaatcttaaaatttaaaaaattcacgtgtaacttttgattcccccagaacttaactactatagcctaccaataacctaaatgatcagaagccttaaagctgttaacacaaacaatggattaacacattttgtatgtaatatgtattatacactgtattcttgcaataaattaagctagaggagaaaaaagtttttaagaaaatcagaaggaagagaaaatatatttactatttattaactggatcaacataaaagtcttcatccttgacatgttgacattgagtacactggggaggaggaagagggtttttgtcttgctgtctccagtggcagaagcagaagagatggagaaggaaggagaggcaggtacactcactgtaactttacagaaatacattgtaatttctgtctttttgctttttcattctgtgtgataccaatcctccttccactatttgctttaatttcagtgcccacgtaatacaagggtctgtgtcaccaaagaagcaaaagcagtcttaaataattggaactcttctgccaaattatctaatgttgatttaggcaccccttcttcagcattttcttcctcatcatctggtaccagttcagaagcactcatctccatcaagtcatcctctattagttcctctggtgtagtcttttttgtttttgagacagagtttcgctcttgtcatccaggctggagtgcagtggcgtgatctgggctcactgcaacctccacctcccgggttcaagcgattctcctgcctcagactcccaagtaccagggattacatgcacccgccaccagggccagctagtttttgtatttttagtagacacagggtttcgccacgttggccaggctggtctcgaactcctgacttcaggtcatccacccgtttcggcctcccaaagtgctgggattacaggtgtgagccacctctcccagcctgcgctctgttccaggctggagtgcaatgatgctatctgggcttactgcaacctctgcctcatgggttcaagtaattctcctgcctcagcctcccgagtggctgggttttacaggcctgtgccaccacgcctagctagttttctgtatttttagtagatacggggtttcaccatgttggccaggctggtctcgaaytcctttcctcaggtgattctcccaccttggcatcccacagtgcggggattacagacgtgagccctcattcctggctggtgtctatttgctctctaatttctctaagatctatatgttgaagtctttcattccccacattttatactataaccacaatctctttgatgattttcttgattggttctgtcataagttctgtgaaatcgtacataacatctggacacagttttctccaacaggtatttattttggggggcttgatggctttagaacaacaatggcattttcagtggtgtaattcttccagacttccatcatattctatcagggttctcttcaatagtgttgacagccctttccattgagtactatgtttaatgacctttaagggttctatggacccctgatctgtaggctgatttagagatactgtgtttaggagcaagtagaccattttgatgcctgtggtgttgaacttactgggttctggttggtcaggggcattgtccgttatcagaagaactttaaaaggcaatcccttactggcaaggtacttcctggcttcagggactttacagcgtcagtgtaaaccaatccagaaaaggggtccttgttgtccaggccttcttgttagacattactggcaaaaaaagacaggcagctgatgtttatcttttcccttcaaggcttttgagagttagcagctttacagataagggcagtcctgatcataaacccagcttcatttgcacaaatgagtagattagtgtatttcttcttgctttaaagtggtactcacctctcttccttactaataagtgtcctttgtggcattttttttttttttccagaatagggcactgtgatctgcattaaaaacctttgcaggcagatatccttttcttcagtgattttcttaatggcgtcttggagagtggtcagctgcctcttggtcagcagaaacagtttttcctcttctcttgacatttttaaagtgaaacctctttctaaaattatcaaactatcctttgctggctttaaattctcagctttgtaaccttcacattcctttggctttaagttgttattatatgacttcacttttttaaaatcatatgagtataggtgtgccttttttatagcaattctgcacccatatataagctgtacttctaatgtgaaataaaaaggtattttgcaaaaggtacagtggtttttgcacctgctagtatagcagtaatggctttaagaattttttttttttttttttacaatggtccttataccagattcatttatcttgaaatggtgggcaactgtagctgcagacatatcaagcaatttaatttttttctttaaattttttcttgtaataacttttctctgcttcttgggaacacttccagcatcactagtagcacatatgggtcccataatgttattcaaggtttatggtatggcactaaacatggtaagtgagaaccacaagatcacttttgactatgatacacaattcactggagagaccaactgttcatgcaaagatgattagtgtcatggggcttttttagtgaatacttggcaatacttgagctcactgcaatagcaacagtagatgtgtacaatattattgtagtagaatgtgtgctaaagttaattctgtacagttatgattaatactatatcttttttttttttttgagttggagtctcgctctgttgcccaggcaggagtgcagtrgtgtgatctcggctcacttcaacatctgcctcccgggttcaagcgattctcctgcctcagcttcctgagcagctgggattacatgcgcttgccaccacatcccactaatttttttttttttttttttaagagacgagtctcgctctgtcgcccaggctggagtgcggtggcgcgatctcggctcactgcaagctgcgcctcctgggttcatgccattctcctgcctcagcctcacaagtaactgtgactacaggcgccacaccyggctaatttttgtatttttagtagaggcagggtttcaccgtgttagccaggatggtctcgatctcctgacctcatgatccacccacctcggcctcccaaagtgctgggattacatgcgtgagccaccacgctcagccggtattttttagtagagatggggtttcattatgttggccaaactgctcttgaactcctgatgtctagtgatctgtctgtctcagcctcccaaagttctgggattacaggcgtgagccaccattcctagccacgatactgtatctttattcacattgctgtcatgtgcgaatggtgccatgtacaatctgtaagtgtgtgtgtgagttttgataaattttaagttcttacaatagattcatatatatttaatagtagtgaatgttaaatatctacatatattttatacatcatgatgagtctaaatttgcttttgttttccaatatttctaggctacatggcttgtctgcaagttttattgtttgtttgtttgtttttgagacggagtctcgctattgcccaggctggagtgcagtggcgcgatctcggctcactgcaggctccgccccctgggggttcacgccattctcttgcctcagcctccagagtagctgggactacaggcacctgccacctcacgcagctaatttttttttgtatttttagtagagacggggtttcactgtgttagccaggatggtctcgatctcctgacctcgtgatctgcccgcctcggcctcccaaagtgctgggattacaggcatgagccaccgcgcccggccacaagttttttttttttaattgttgcaaatctccaaaaaattttccaatatgtttattgaaaaaaatctgcatataaatgaaccatgtagttccaaactatgttgttcaagggacaaatgtacaaggatttcccctaaaatgccatagaaaaaaaaaactgagagataattaatgaaacaagaatgacagtgctaatggttattgttctgcttttgagtgtttctgaaattttccttaatagtctttaaagtatatgctatcccaactttgactagtgataagccccttcatactaatttcttgtccttttcacatatcttattttttaattactttcttgcacttttcacatatcttcttcttttatagatatatatgtatatgtatatatgtttatatatatacatatatataaacatacatacatacatacacacacatacacgtatttaaatcatacattcatattggtatttgacctaaatttagcctaatagagtttttacctctttgaatttatgagtttttttcccaaacttatttttttgaaataggtaaaacatttacattagttaaaaagtcaaaaccatgtgaaaagatatagtcagagaaatcttatttatataactttctctacacctcattcttattagtaaccatttttatttgtttctggtttattcttcaggtgtttcattttgcacaaataggtaaaggcatgtacacatacagatatatatattcatatttcacattccacccactcaccccccaatcttttaccaaagatactatactttatatactattctgtacctttctttttttagcagtgtatcctggaaatcagtccatgtctttatttggaggtcttcattttcttctggctgtatagtgtctattaggtggatgcactactgaaagttcacctacgcacagtcttttgtactgttgctagtcttttgctactagaaataatgaataatcagctgggcatggtggctcatgcctgtaaacccaacactttgggaggccggggcgggcagatcacgaggtcgggagatcgagatcatcctggccaacatgatgaaaccccatctctactaaaaatacaaaaattagctaggtgtggtggtgcgtgcctgtaatcccagctactcagaaggctgaggcaggagaatctcttgaaccagggagtcagaggttgcggtgagccgagattgcaccactgcactctagcctggcgacagagtgagactccatcaaaaaagaaataatgaataatcttatgcatatctmattacttgtaccaggtgtgttggtgagatagaattggtattgctaggtcaaaggaaaaatatatatacaattttgttagatattggcaaattccttcttcataggtatcatgccatttttgttatcccctcagaggtattttgaggactagatgagttcatgtatgtagagtgcctaacaaaatgaccactcaggctgggcgcagtggctcacacctgtaattccagcactttgggaggccaaggtgggcggatcacttgcggtcaggagttggaccagcctggccaatatggtgaaaacccgtctctacsaaaaatacaaaacttagcccgacttagtggtacgcacctgtagtcccagctacttgggaggctgaggcaggagaatcgctcaaacccaggaagcaaagcggaggttgcagtgagccaatatcgcgccattgcactccagcctgggtgtcacaacaagacttcgtctcaaaaaaaaaaaaaaaaaaagatcgttccatcaaaaatagccatttccctaaaatcagtatccttagatgtttcatacattgtcaaatgaatttcaagacttttcaatgtattgaatacattcctagacatacatgtagttcccttaattgctttgtgcagaggtaaacacagtagttggtagatcattcaaaagtgattattttatatgcttaaaagattgaacaacaaggccgggcgtggtggatcacttgaggtcaggagtttgagaccagcctcgtcaacgtggtgaaaccccatctctacaaaaatacaaaaattagccatgcatggtaggacatacccatagtcccagctactcaggaggctgatgcaggagaatcactagaacccaggaggcagaggttgcagggagccgagatcgtgccactgcactccagcctgggtgacagagcaagactctgtctcaaaaataaaaaaaaataaaaaaaaaaaagactgaacaatcaaataggcagtgctattacttcttgcacatattcttaaacattgaggttcacatttatgaagtggcaatttatattggaatgtttctgttcygtaaaaccatttgacattatgatggcaaatcccttcaagataataaaatgcagaatacttaggggaaatgattatgttaaactgaacttacattttaatattttatttttggaatcacctgtggtttcacatgttggatacaggctaaagtgatgagcattagcagcttaaatttgttccatgagcacaaactatactcttttttcttgatagctgtttaacagatttgtgagtttagttacaaggagactcaaatgtaaatgaatccagagatattattagtgtgtgctttaaaaataagtgagaatgtgttagcttctgttggtatttaaaaggcgttactttaaaaagtgtgtgtatatttaacataggaagatcactgttaacacactgagattaaaaccctagaaaaattgggtattgattggtttcagtattttaataatggtaactatggttttattaatatgtatatatttttatttgacataaacaaatagtaattcgcccagactttagctgtttgataaggtagtagtgcatgttatgtaaaaatttgcataaactttcttgtgtttatttcagtcattaagtttctcttaaaatttgtggttatattatttgccagtgcttcatcaatatatgtaacagtttggatttataatttaacacaatactcttcttcttttccgattttgtttctaggtgctaactgccaaagaaaggaaaactcaaattgatgatagaaacaaattgactgaacattttattattacacttcctatgttactgtcaaaggtacagtttcatttacagttttgttatgtcactgagtttgctttcattgtactattaaagtagttactgtctttttctttgcytctccttctagtattctgcagatgcagagaaggtagcaaacttgctacaaatcccacagtattttgatttagaaatctacagcacaggtagaatggaaaaggtaatgatattatgaaattgaaattcagctgttatagttttattaactgaattattttcatgtactcttatagacttgttatttgacagatgctaattttttattttttattgttaacctaaatattacagtttttctttttttgtctcctcagcatctggatgctttattaaaacagattaagtttgttgtggagaaacacgtagaatcagatgttctagaagcctgcagtaaaacctatagtatcttatgcartgaagaatataccatccagaacagagttgacatagctcgaagccagctgattgatgagtttgtagatcgattcaatcattctgtggaagacctattgcaagaggtctgttctaaagttaatgtgtacatataataatattgactgagaattacttaagatagctgagtgtgtaaatcattttcattttaaaatgaaattgagtagaattgtctgccccttccaaaacttagcaaccttattacaattgtgtattctataaagatcagccttggttatgccttatttttattctaaaaatctgtcataaaaactagaatttcttttctctttcaagaaatttttttttttttttttttttgaggcagagtcttgctttgtcacccaggctagagtgcagtggcacgatctcagttcgttgctcaccgcaacctccgcctcccaggttcaagtgattctcctgcctcagcctcttgagtagctgggattacaggcacctgtcaccacgcttggctgtttttttatttttagtagaaatgggttttcaccatattgaccaggctggtgaactcctgatctcaagtgatccgcccacctcagcctcccaaagtgctgggattacaggcatgagccaccacatcgggcaaaaaaatctctttaaagtctaatttttcctaactcattttctatttctgggacctaatttacattttaatattgctgaattattgtgatatgctaatgaatagagcgtacaaattaagtctacttttaaggatgcctgcttatcaatggtatgcccaagatatcagcaaacatctccaattgcttattttctaattatttctgtgacttcttcctctttccctctctctcatcaatctatataaggcagtctggaatttccatagttctctgtgctctgatgaccatgtaactgatttataaaagactctttcctactattgaaacttaccagtttttttcaaccattatttatgattttccttgtgattttcaagctacaaaagtgactgacaataaataaaatattggaaatcattgaaaatctttcaagtacatttttctcttagaaattttaaagggttttatctatagtatcagaaaacttttcaaagtcatgtttatcacaacattatttaaaatgcagaaattatttctaggttgttagagttatgggtgtttttgcctttttgcttatttgtattatggatctacaatgaatatatactattaatataatttagaagaatttttatttaggcaataagtagtaatatactataaggtgagtaaagttgtaatgatgtgatgtttcctttttttatagggagaagaagctgatgatgatgacatttacaatgttctttctacattaaagcggttaacttcttttcacaagtacgttattttatttaaagtaaaggcaacgaggtggctcatgcctgtaaccccaayactttgagaggccgagatgggcagattgcttgaggccatgaattggagaccagcctggcgaaaccctgtctgtacaaaaaatacaaaaattgggcatgagagtgtccacctgtggtcccagctactcaggaggctgaggcaggagaagcaggagaatcgcttgaacccaggaggtgggggttgtcgtgagccgagatcgtgcctctgcactctagcctgggcaacaggctgtctcaaaaaataaataaatcaagtaaatgtagtaacccaggtgtgtaagcacacagctatggtcccagccacttgggaggttgaggaaggaagatcacttgagcccaggagttcaaggctgcacttgatcatgacactggcccatgatcgtacctgtgaatagccactgcacttcagcatgggcagtatagtgagatctgatctcagtaacaacaaaaagataaaatagatttagtgaatgacatgtaacagccaacatacactgactgattgttgtgtttgacattaataacaatgggaattttaggcctggtgtgatgactcacaccttataatcccagcactttgggaagccaagggaggtggattgcttgagccccacgagtttgagaccagcctgggcaataggcagaccctatctcaattaaaacaaaatagttgttttttaaaaaatgggaattttagagaatattgagatatgtttttcctttattcagttttctctagatgattatgttttgctatcactgaattacttttttttttttttttttttttttgacagagtctcactctgtcgcccagactggaatgtagtggcccgatctcggctcactgcaactgccgccttccaggcttaagtgattcttatgccttagcctctcgagtagctgggaccacaggtgtacaccaccttgctcagctaatttttatatttttaatagagatggtttcaccatgttggccaggctggtcttgaactcctgacctcaagcaatccactggcactcggcctcccaaagtgctgggattacagacgtgagtcactgtgcctggcctatcatttaattacttaaggtataaaatttatttactgtaatgatttagctatcacttaatgtaatgaatatatactgtaaaagtttcagcccatgagtatttaacaaattaggcttattttatcactagagtgctacaggtataattttcaaatgatagcttttagaaatcttgctcttaataagtaagaaataagatttgggaccaggcatggtggcttatgcctgtaatctcagcactttgggaggttgagataggtggatcacttgagcccaggggttcaagaccagcctggccaagatggcaaaaccccatctctgctaaaaaaaaaaaaaaaaacacacacacaaaaattagccgggcatggtggcacacgcctgtattcccagctactcttggggctatggcacgagaatcgcttgaacccaggaggcagagattgtagagagccaagattacaccactgcacctcagggcaacagagcaagactctctctttaaaaaaaaaaggctgggtgcggtggctgaaatttgtgttgtcaaattgtaattttcacttgcattgtaatgagatatgccggtcttctccatgaagaaaggacaaaaagaactttgttgtccaaagagagtttgaatatagcttttgcactaatcagtacttcaaaattcaaaagcagtttccaaaatctaagcctttatatacaagtaaattttttttagaattcccyagaaaagcaaacttttatttttttaaaaaactgtcatttgaaaacagaagttactagtgtcagaatgactatttttagtagtagagcccatgagaatataaaaatttaccattatcacattcataagtcctcagcccaagtaaatagctataatgcagtttttgagctttcccatttttcctttccccgagttttatctttatctccattttgaaaatacaaatctcttttaaaaatacacatgtggttatatttttaaattgtaaatggagttctttaaaatgtacttttaaataggcctgacgcggtggctcacacctataatcccagcactttgggacaccatggcgggtggatctcttgagtccaggagttcaagaccagcctggccaacatrgtgaaaccccatgtctacaaaaatacaaaaatcagccaggtgtcatggcgcacacctgtagtcccagctactcaggaggctgaggcatgagaatctcttgaacccgggaggcggaggttgcagtgagccaagatcttgccacttcacttcagcctgggcgacggagcgagaccctgtcttttaaaaaaaaaaaatactattatatatacaataaagggattttatccatatatggaatagaatataagcttagcttgacyatgtggtagaaattttcaattaaatatgtcaggttttatttttttgttgatttctttaataaattcatagaatcatctctttctttccttttcctttctacctttctttcaaatttgagcatttaatgagtatttcctttatggatctttttcaattctgcaaggaaatgaaaaaaacctttttttttttttttttttttttttttttttttttttttttggaaacaaagttttgctcagttccccaggctggagtgcaggggcccaatcttggctcactgcaacctccgtgtcctgggttcaagtgattctcctgcctcagcctcccgagtagctgggactacagtcatgcgccaccatgcccagctaatttttttgtgtgtatttttaatagagacagggtttcaccatgttggccaggctggtctcgaactcctgacctcaagtgatttgccagccgcggccttccaragtgctgggattacaggcgtgagccagtgtgcccagccgaaatgaaattattttattcttccactcacctgaactgagctcaaatttaaatttccttccattctagaataaaacagatgcatttttgtttatttcagtgcacatgatctcacaaaatgggatctctttggwaattgctacagattattgaagactggaattgaacatggagccatgccagaacaggtaggagtttattggtattccttctgtatgactctagaaagttgtttttctgaagtcatatgattatcagaagccttttatagaaagtaattgacgattcattagggcagctgcctcttttgagagaattattgctgtagtaattaaatgttattgataggtgtattatactggcttatgtgttaagagtagaaaaaacttttgctataacatatcttaaaaattttactgttaaggtagacttttctctattaggagaaataccattaatatctatggcagcaattttaaaactttggataatgaaaattgatgatgggtatattccagccgtgttctaggtattaatcatattaagtatggcttagtttttatattagaaccatagttaaattaacatggcagcctttaatagactttagaactttgtacactcatatatacaagttagagtagaaggggcagaaattcaacaaactttgcctaatctgaaagagacttcagtagaataattactctacttgattcagtatgagaaaggaaggagttattttgtacactgcagatattcatgtagaccaaaatatcatctccatcattaagtgtaggtaatatttaggggttatctcattcatttccatttggtagtatagaatgcttagatgataccttattactctaaagcagtaagaatttcaacagatacaataataatcttatattaaaaattaatcatgggctgggcacagtggttcacgcctataattccagccttttgggaagccaaggcagggtggatcacctgaggtcagaagttcgagaccagcctggccaacatggtgaaaccccatctctactaaaaataaaaaaattagccagatgcagtggcatgcgcctgtagtccccagctacttgggaggctgaggctggagaatcgcttgaacctgggagacggaggttggagtgagccaagatggtgccactgcacttcagccttggtgacagagtgagactctgtctcaaaaaaaaaaaaaaaaaaagttaattatgaaaacagtactttattattgctgtgattaattcatttaaattgcctaacattagtcattttcttggtccctacaaatgtccctgattatattaggtgtttttattgtagtttgtgaaaagacactaaatattttaccctctcttttttaaaatgtattgctgacatcaacttcccatcctctcttcatctcagaccagcaacctaaataaaattcactcatattttcaagccatgcttctaagttgaaagtgaatgagagagttaagatattctttttatccttttctccattttctccagggagagaataagagtacatctctgtttcatctactgtgtcaaaatttttagacttactataccatcattattgtgctagtactgacttgtgacagcttcacagtgttgtcgtctttgttattttggttttctgttgcttatgttcattgcatatgtcttatttcctccatttttattgttggataaaagtacatacttatgtgacattaaaagttttgtggctttaggggctgggcgcggtggctcacacctgtaatcccagcactttgggaggccaaggtgggcggatcacaaggccaggagtttgagaccaacctggccaatatggcaaaaccccatctctactaaaaatacaaaaattagccaggcacggtggcgggcacctgtagtcccagctactcgggaggctgaggcaggagaatcactggaacccagtaggtagaggttgcagtgagcagagattgtaccactgcactccagcctgggcgatgagcaagactccgtctcaaaaaaaaaaaaagttttatggctttaactttgttaatttcttgaacacgtatttttaaccatgtgtatgaagtttgagtgcatgactcaaatatgactagattgtactcttgttcattttagcagctctgagaaatatctcttaagatactgttgaaaatacagaaattctgtatttaaccacttcttttttgtttgtttgtttgagaccgagtctcgctctgtcacccaggctggagtacagtggcgtggtctcagctcactgtgacctccgcttcctgggttcaagcgattcttccgcctcggccgcctgagtagctgcgtcaccacgctgggctaatttttgggttttagtggagacgaggtttccccatgttggccaggctgtcttgaactcctgacctcaagtgacctgcttgccttggcttcccaaagtgttgggatttcaggcatgagccaccgcacccggccctcaaccacttcttaatacaaccatgcaagctcactttttaaggttccaactgtgtacttacaataagaattcagagaaaataccttttggagcagggatactgaagagctaccaaaatatttattactgttgaccctcagttgtgcttaatgttttgaagataccttaaaactgtctagctgtttggggagattatattagctatatgtttgacttttttgtttgtcttgttttttgttttttttttataataaccaattcaactagaagttcctagttccttccttcactgaattgttacacaagcagacctcattttattgtgctttgctttattgcgtggtttttttcaaattgaaggtttgtggcaaccctgcatcaagcaaggctatcagtgccattttcccaacagcatatgctgacttagtgtttctgtgtcacattttggtaaatcttggttatttcagactttttcattagtattaaatctgctatggtgattggtgatcagtaatctttgatgttctattgtaattgttttggggcaccatgaactgtacccacataagatggtggacctaatccatcaatgttatgtgtgttttgactgctccattgacaggcccttccctgatccctttccctcacaggcctccctattccctgagacaaaacaatattgaaattaggccacttaataactctacaatgttccttaatgttcaagtggaagagtcacacttctctcatttttcatgactgttaacacaacagaagtaatttttactttcaagccttaattatttaagaaaaaacattgcataagccttgtggctgccatagaaagtgactctgttgatgcatctgggcaagaaaattgagaaacttctgggaaggattcaccattctagataccattaagaaattagtgattcatgggaggaggtccaactatcaacattaacaggagtttggaagaagttgatatcagtgttcatggatgactttgaggggttaagacaagtggaggaagtcacccagatgtagtggagatagcaagagagctagaattagaagtggagccagaaaatttgcctgagttgctgctatctcctgctcaaacttgaagagatgaggagttaattcttacggatgagcaatgaaagagatggtatttagtcctagtgaagatgctgtgaacattgttaaaatgacaacgaaggatttaggatattacataaacttagttgataaagcagtgacaagggtgggagagggttgtctccagttttgaaagaaggtctgtggagaaaatgttgtcaaacagcatcacatgctacagagaaatcttttatgaaaggaagaatcaattgatgcagcaaacttcactgtcatcttgagaaattgccatagtcaccccaaccttcaacaacgaccctgttaagtcagcagccatcaacatttcaagcaagaccctccaccactgaaaaaattatgactcactgaagagtcaggtgatcattagcattttctagcaataaagtattacattttttagttaagctatgtacattgttttttcagacataatgctattgcacacttttatatgcactgcgaaaccaaaggttttgtgacttgctttattacaatatttgcttttttgtgatggtctgggagtaaacttgcgctatattcagggtacacctatgtatttgtatattttttctcctcctagtgatttatcttttatcatatcagtactgttttaaccatagtagttttagaatatgtggaagactgaccaggcatggtggcacacacctgtaatccaagcattttgggagactgaggcaggcagatcacataagaccagaagttcgagaccagcctggccaatatggcaaaatgctgcctctactaaaaatacaaaattagctgggcatggtggcacatgtctgtaatttcaactactcgggaggctgagtcaggagaatcgcttgcacctgggaggcagaggttgcggtgagccaagatcacgccattgcactccagcctgggcaacaagagcaaaactccatctcaaaaaaaaataataataataatatgtggcagatcaaaaagaaattacgtattctaataattttttaaaataaatttaaaaaacaatcaaattatagacatgttacagaaaattcacctaatccattttcaatattttcccagatttccgcacttagacactatgtatatataatatatattgtatacgatatatattgtatacgatatgtaatatacgatatatattatatatagtatacattatataaattatatataatatataatgtgtgtgttacacatgttaatatgcatatataaaatatatattaggccaggcaaggtggctcacacttgcaatcccagcactttggtagaccgaggtgggtagatcacttgaggtcaggagttcgagaccagcctggcctacatggcaaaaccctgtctgtactaaaaatacaaaaaagtagccaggtgtggtggcacgtccctgtaatcccagctacttagggggctgaggcactcgaatcacttgaacccaggaacaggaggttgcagtgagctgagatttacgccactgcactccagcctgggtgatagaacaagattcggtctcaaaaaaaaaaaaaagaaaaaattgtcacaaccaccccaacctttaacaattttttttcagcctaggaccaatgcagaataatgcattgcatttagttgttacatttgtttttgtctcctttaacctggaattgtttctgagcctttttgtttcatgacattttgaagagtatagactagttattttacagaatgttcttacttgagttttgtctgatctgcatgtttaaattttagtttcacattcttggcaggactactacataaatgatattttgtcctcaatgcatcacatcaggaggcacgtgatgtcagtttgttcattattcatattattaactctgatcactgactaaagtgaggtctgcaaagtttctcctgtgtagttagcagtgtcctttttaattactgaagtgagctgtagacgtattctttaaaactatgtaataatcctgtttcttatcagactctgacataatagttttagtaccgatttatgatctttgcctgactcagttattactgtgagggtcacagagtagtgactaaaatgatgattttctaactctgtcgtttattttgtatttcttagttggcactctactgtaaggaagaactttcctttctccatttattcattcattcactcactttttacagttctgaattccttttaaaaaaaattggtatcactgtagactcatggatacctattttatttctgttttatttgacaagttgtaaatcagtactctttttttattttggttctcaaattgtagcagatttggccagtgggagttcctttcaatccagttcctatgtacgttagattttgtttgtttgtttgtttgttttttagacgaagtctcgttctgtcacccaggccaatatggcaaaatgctctctctactaaaaatacacaattagccgggcgtggtggtccatgcctgtaatcccaactactcaggaggctgaggcaggagaatcgcttgaacatgggaggcggaggttgcagtgagccaagattgtgccactgcactccagcctgggcgacagagtgagactctgtctcaaaaaagaaaaaaaagaaaaaaaaaattcccagaaattccctagtgtacttccccttctatttcagaattatgtgacattcccattcctgaaacactccctggctagaggaatgggatgcctgtttaatttagtgaagcacatgggcatgtggacgaggcttttagaggtttcattagaaannnnnnnnnnnnnnnnnnnnccatgtaggccaggctggtctcgaactcctgacctcaagtgatctacccacctcggtctaccaaagtgctgggattgcaagtgtgagccaccttgcctggcctaatatatattttatatatgcatattaacatgtgtaacacacacattatatattatatataatttatataatgtatactatatataatatatatcgtatattacatatcgtatacaatatatatgcccgggctaatttttgtattggtagatatgggatttcaccatcttggacagactggtcttgaactcctgaccttgtgatccacctgccttggcctcccaaagtgctgggattacagatgtgagccaccacacctgacctttattattattattttttaagcatctccatcctttctgacacacgaatatgtttcagggtctgcttatgcccttttctgtgctaatgaattatttttaatctatgaaaagtactaaaagtgattgcagttgtgtaacaacaataatcattagcttgtgaaaagcacacatttcagaatttattgtaatatctcttatacccacttttgtagaataaagtcaaggtatatttaaattctattctgttttgtgactttgttcctattttctgttggtatagttttaaatttaaatatcatcccagataacctctaagaaaaataattttttattttattttttatttttttcatgaaaccatttgaaagatgaaatattttctggaaaaataaaatattaatttcctgctttatagtttgtacaaccctcagtagattctaaaaatggaaaaccaatcgatcatttacaggtgtttttgtaaatagtatttgccatagaacaaaattgtgcgactacacccataaaaatgaagtataatcatgtatcactaactttgggcctctcaagtcatcaggatagaaaacttttattttgctcttacatacaaggtactattttaagctccccgtttgtctgcccaagctggagtgcagtgatgcaatctcagctcactgcaacctccacctcctgggttcaaacaattctcatgcttcagcctcccaggtagctgggatgacaggcatatgccaccgtgcccagctaatttttgtattttcaagagattctcatgcctcagcctcccaaatagctgggatgacaggcatgtgccaccgtccccagctaatttttgtatttttagtagagatgaaatttcactatgttgaccaggctggtctcaagctcctgacctcaagtgatccacccaccttggcctcccaaagtgctgagattacaggagggagccaccaggctggtgtattttaagtcttttacatttaagtctttttaagtctttacatttgtttcattttaagtctttacatatgtttcattattttcattttgttgatgatgaaaccagagatactaaataactagccttaggtcacatagcagtggcgcacccactcaaatccaagttttttaattgttttcattgtctcttcccattttcttctactaatgtgttgtttgtggtagcttgcactactcttccactttatccttgccttctgatgttggtcttagggcaaactttttattttcaaacagagtcttgctctgttgcccaggctggagtgtagtggtgtgatctcagctcactgcaggcaacctccacttcccgggttcaggcaattctcctgcctcagcctcccaagtagctgggattacaggagcccgccaccacaccgagataatttttgtatttttagtagagacaggatttcaccatgttggccaggctggtcttgaactcctgacctcaggtgatctgcctgccttggcctcccagagttctgggattccaggcatgagccaccatgcccggccagcaaactcttattttttgtatttatcttttttttttttttttttttttagacaaggactttccctgttgcacagattggagggcagtggcacaatcacagttcactgcatcctctacctcccaggccctcagcctcccaaggagctgggaccacaggcttgcaccaccacaccgcagctaattttttaaaagaaatatttcatagagatggggtctcgctatgttgcccaggctggtctggaatcctgggctcaaatgggatcctcccaccactgccaaccaaaatactggcattacagacataagccacaacacccagctgaatttatcttttttcagatatctttttaggttgttttaatggcagttaatggggagagattagatgctagtatttaatacatcatcatgaactagacatgaacacattcttcagactgagtgtaatgtagggggcgagtttcaatgtagtcacattttggctgggcacagtgactcacagctgtaatcctgtcattttgggaggcaaaggcaggtggatgannnnnnnnnnnnnnnnnnnnnnnnnnnnnnnnnnnnnnnnnnnnnnnnnnnnnnnnnnnnnnnnnnnnnnnnnnnnnnnnnnnnnnnnnnnnnnnnnnnnnnnnnnnnnnnnnnnnnnnnnnnnnnnnnnnnnnnnnnnnnnnnnnnnnnnnnnnnnnnnnnnnnnnnnnnnnnnnnnnnnnnnnnnnnnnnnnnnnnnnnnnnnnnnnnnnnnnnnnnnnnnnnnnnnnnnnnnnnnnnnnnnnnnnnnnnnnnntggtgcgatcttggctcactgcaacctccgcctcccaggttcaaccaattctcctgcctctgcctcccgagtagctggaactacagtgcccgccaccacggcaagccaatttttatatttttaatagaaacagggtttcaccatgttagccaggctggtctcaaactcctgacctctgtgatccacccgcctcggcctcccaaagtgctgggattacaggtgtgaggcaccgcacctggcttgtgacttactatttatgttatttatattgatagagtcatgctattcttagaagactacacacttatttccatgactgagcttagaaattattttagttacatacttctgattattccttgatcatactatataaaaaccttttagtattcttctatccattttttatctgtctagacttctaagtcaaaaagacatgaatctaggttaatgcctcccttttcttcatcagcacacacactgtacatcctacttgytgtctaccttgtcattatttaccaaaaatgcatttgagtgccaagtcctgaggatataatggtgtgctacaagcaatccttaatctcatgagactcttgattgttttttataaattctaccttctgaatatcttcttgccgtactcttttagccccactaccatatctttagtttaatcccttatgggttggtgcaaaagtaattgtggtttttgctgttacttttaatggcaaaaaaaaaacacagtaacttttttaccaacctaatactttcttttgtggatcacatcagaacctttctgttttagtaacttcagtttcaccctctctccattctaggttctgttacagtaactcttaactatgtgtatccatgagaaactctgataatgttttttaaaaaatacctgacttctctcaaatactgttgtatgtgtagattacttgccaatctctatcagaattgaaagtggacatacctttctctgaggatttgtggttccaggaatttagattataaatatacacttggatgtgtgtacagaggcatagatgcaaatatgttcattgtagcatttatgaatatttaaaatttaaaacattctacatgttcatctacagagaaccagttaaatacagaaggataaaggatgatgagaagatttatatatacatacatttagttgaaatatatttttggatgtttcataagaaactatgaacagtggctttctcagtggaaaactagaggaagaaagttaacttgaattgtacaccagttatactgttggatattttaccatgcacatctaatgctttttttttttttttggagacagagtcttgctctgtcgcccaggctggagtgcagtggcgtgatctcggctcactgcaacctccacctcctaggttcaagtgattccactgcctcagcctcctgtctaatgctttttaaattaaaatacagtccagtcacagtgactcatgcttgtaatcccaacactttgggaggctgaggtgggcagatcacctgaggtcaggagttcgagaccagcttgtccaacatgatgaaactctgtctctactaaaaatacaaaaattagctcggcatggtggcatacacctgtaatcccagctacttgagaggctgaggcatgagaatgacttgaacctgggaggcagaggttgcagtgagccaagatcgcaccattgtactccagtctgggtcacagagtgagactctgtctcaagaaaataattatttagcaatgaacgattgaaaaatgaaatattatgaaatgtattatttacagtagtgccaaaaacatgaaatacttaggtataaatctaacaaagtatgtgcaagatctgtatgctgaaaagtataaaacattaatgaaagaggctgggcacagtggcttacgcctgtaatcccagcactttgggaggccgaggcaggtgatcacctgaggtcaagagttcgagaccagcctggccagtatggcaaaatgctgtctttactaaaaatacaaaattagccaggcatggtggcacatgcctgtaatcccagctactcaggaggctgaggcaggagaatcgcttgaaccccagaggccgaggttgcagtgagctgagattgcgcaactgcgctccagcctgggcaacaagagcaaaactctgtctcaaaaaaaaaaagagattgcaaaaagagaatataatctctacaccacactgttaatatgtgatttttctttttacacttccttgtttccaatatttggaatttatatgtaagcttgacaataaaatttcagagtcttgaattgccaaggattaatgtgcattagcctgcttcgtatccattctttgggaaatcttttaattctttaatcacggaagttaaccttttactgcttgaattttttacttgagtttttcacgcttctaatgatattttttatttttttaacttatgatatagcatcctgctaataatacagtacattgattggataatcaatcccctatttcctagaatttattaatcttttctctttactcaatcgtttgctactttatatcactgaggatttgcatcagtgtttatgtatttcttaatatttccttaaaaatgttacagtgaattttactctgccatattattttgaattattatacaataaaaatgactaattttttatttatgtacagtcttatgaattttaatgtgtttagatttttgtagtcatcaccataatcaagatacataacagtttcatcatcccagaagacttcttcatgctatccttttatagtcatatgctcaccccaactgaagctcctggacatcagtgatttgtttttcattactatagtttcatctttctaagatttccaaataaatgaaatcatacagcatgtaaccgttgagagcatgtctttcactgagcataatatcttcctgaaagtaatgtttttgacattaattcaagttgtgtgagtcaaagttggttcctttttactgctgagtaatattccactgtgtggatacttcagtttgctttatccatccggctactgaaggacattgagttgtgtccagtatttggctatcacaattaagtctgtcatgaacatttgtatgcaaatttttgtctgaattcataagtactcatttctattaagtaaatgccccagagtaaaattgctaggttttatggtaattatatatttaactttattagaaactgtcaaaccattttccagagtggctgtaccattctgcattcctgctaacaatgtatgagcttcagttattgtgtatcgtcattggtacttgataatctttactttagccatccttctaagtatatagtggtatctcatcatgcttttaacatttttccttttttttttttttttttttttttttttttggagatagagtctcattctgtcacccaggctggagcgcagtggcacaatctgggattacagacacctgccaccacacccagctaattttttgtatttttaatagaaacggggttcaccacattgcccaggctggtcttgaacttgtgggctcaagctgtccacccacctgggcctcccaaagtgctgggagtacaggcatgaaccaccacwcctggcctaacatatttttcctaatactaaagatgttgaggctggacgcggtgtcctatgtctataatcccagcactttgagaggtcgatacaggcagatcgtttgagcccaggagtttgagaccagcctggccaacatggtgaaaccctgtctctactaaaaatataaaaattagctgggcatggtagcacacatctgtaatcctagctactcggaaagctgatgcacaagaattcactgaacctgggagatggaggttgcagtgagccgagatcatgccactgcactccagcctgggcaacagagtgagacttcgtctgaaaaaaaaaaaaaaaaaaaaaaaaaaaagaggttttttcatgtgtttatttatttgccagccttatatcctctttgggaaagccatattgattatttatttgcatctaaatgctcattttttgaagaggatgttaattgtcgctcatattaacccagtctaaaaatgatagaccaatattggctatcagacacaattaagtttagttcactcttttatcatgcacatgtccactaaaaagtttgagcctccttctatttaaggtctcttgccaacagaaaaatagaagagcccagattttccactgtcattacgtggatttttaggwttttaaacatgtcctataggtgtgggtaatatgcatgtatacacacacacacacacacacacacacacacatatatgcataattattttccttactattattctctagtcttaattcagactttgttttccaggtaaactcagttttctaaacttaaacattccagaagctttacattaattagaaaattaatcttcaagatgtgtgatatctgtcattagccacaagctgaatgattctcactgattcagccagctagtcagagataaaaaggtatagttcttttaaagaactattaaggaaagggactaataacaattttattttgattaaagtagtgctggctgctataatcagttaatttcaaaatctgagtggcttaacacatagaaatttatttctcacacccataaccgtaaagtatcattagggggagtagggtgttaattgctctccccagtcattcagggaccgaagttttcatggggtattggtgtcctggcagacaggagaagataaaaagatagaaaaggcactcctacttgttaatttgcctagaaatgtgcaatacacattagcgtttcctcctaggaacaccatttcctcatggaaacaggagggcagagaagatgggttggaagaaattattagtcatcagactaataatgacttgctgtcatttgatgatcctctccaggctcagagcaatgttaatccaaggcagaaagagtatggtactcaaggttgcaacagtggcttttgcctttttcaattttttgttccttgtttcttgtgtcatttgtcctccagaaagacgaagttactgaacaatgatttctggacaagttaggataacattgctggtgtggaggacaaaatatcaaaatggctaagagtgaagcttgacaggagaagttctaaatggtgtctgataagctatattgttatagaattatgtctgcgagaaagcagaatgtttccaagtcaataagagcaagctttttattttaaggtaatgcagtggagtccctttaaaagtaaacttaaaaggaataccaatgtgtgaaacagattagaatggaaattctatatttgaaacaggtaatgggatggccaagtgtctctgttccctcataacccctgacaagaaacttctttaaaactatgaaacagcctgaaatatttatagtgtagaataatagaaaagtagaaggaaaggaagtgatatttataatgagtaggrcaatgacataaccaaaataaagcaattyttcaacattactcttttccagcttaatttcccattgattactattaatttatatatcactcttctagtaatttaacagatagggttgtttcaaattcaaatcttgtyttttccattcagacctcattattattgtacttaatattataatttagaatttaccttaaggtatctcaggaccattgaacatcttctagtgtattagggtaatttttttagcactaatgtttataacttgacaatgttccagtagtctattttctgcattctgacatgagtcaatcatttaattatgtttaataaaatcctgacatcatctcattaattttgcaccaaaggcagcgcaccacttattcctctaattctttttttcttcccytttcctttttcttttttttttcttttcttttcttttttttttttttttttttttttttttaagacagtctcactctgtcgcccaggctagagtgcattggkgtgatcttgactcataaaacctctgcctcccaggttcaagtcattctcctgcctcagcctccttagtaaccaggaatacaggcatgtgccacyatgcttagctaatttttgtatttttagtagagacagggttttgccatgttggccaggctggtctagaactcctgacctcaggtgatccactcacctcggcctcccaaagtgctgggattacaggcgtgagccactgcacccaggaccaggtcattcctcatacctccaattcttaagagttattgtcagtctcaagtaggcacattggaagtatcttttgcttgagtgatctgaaacctgaaaatttattatttttttttcttttttagacagagtctcactgtcacccacgctggggtacagtggcatgatctcgactcactgcaaccttctcctcctgggttaaagtgattctcatatctcagcctccaagtagctgagacaggcatgtgccaccacacccggtaattttttatatttttagtagagacggggtttcaccatcttggccaggctggtcttgaactcctgacctcaggtgatccacccgcctcggcctgccaaaatgctgagattacagatgtgaaccactgtgcctggtctgaaacctgaaaattttaaagtaaaatcagctaggccgggcacggtggctgacacctgtaatcctaacactgtgggaggctgaggtgggcagatcatgagctcaggagttcgagaccagcctggccaacatagtgaaaccccatctctactgaaaatacaaagattagccgggtgtggtggcacgcacctgtagtcccagctactcaggtggctgaagcgggagaatcacttgaacccgggaggaggaggttgcagtgagccaagaccacaccattgcactccagcctgggtgacagagtgagactctgtcccccccaaaaaaattaaattaaattaaaaaaataaaatcagctctaactctcaactagttcctgcagcattctacttattgattttccttttaacttattatctacatatgtttacctttatggtttgtagtttatcaagtggggaagatcatagtgacacaagataaatttactgattacataatggaatattgggtgggcgcggtggctcacacctgtaatcccagcactttgggaggtcgaggcgggtggatcacctgaggtcaggagttagagaccagcctgaccaacatggtgaaccctgtctctaccaaaaatacaaaaattagtcaggcgtggtggcacgtgcctgtaattccagctgctcaggaggctgaggcaggagaactgcttaacccaccactgcactctagcctgggcgacagagcaagacttgatctcaaaaaattaaagtaaaataaaataaaggaatatcaatattaggtatgctttattgcgaaaagatacatcgtttattcaaaaaatgtagtaaacattttgtgtacaaaaatgcagtaaaagatctatccaaggcccgggagacagtgcaatactccatctcaaaaaaaaactgaaaaggtgctcatcctcattgtatttagagaaatgtaaattaaaaccactacccatatgtaatagaattcccaaacttaagcaatctgatatcaagtgttggtagaaatgtgaagacccagcaactgtcaatgactagtagatacaaacactttgaataacagttkcagaatatctaataacattgtacatacacatactgtatgatccagaagtcctattcttagagcatcaggaataggattttgtccctattttccagagagacaaatatcagaattaaggaaagtaaaattgattaaggattacaacgtaaaagagaactccaatttggataggttttttaccacatttttgtttgaatacttgatgtatcttactgcaataaaacatacctaataatattgatattctcaaaatgtggcctgggaacccatgggcggtttccaggagaggtccatgaagtcaaaactatttttacaataagatcaagatgttatttcctttttacactctcattctcttgcaagtgtacaggtggggtattggtgtcatagsaaggaatattcatgttgtctacagaggttattaaactataccttcttttcccaaactactttgtgagactggattttttcatatatttcaatgaaaacaatgtattgtaacaatgcaaagcagataggaaaattcagttgttttctattaagacagacattaaagagatttgcaaaaatgtaaaacagtgctactcttaataaatattctttcctttagaaaatttattttgaggccaggcacggtggctcacacctgtaatcccaaccctttgggaggctgaggcgggcggatcatgaggtcaacagttcaagaccagcgtggccaacatggtgaagccctgtctctactaaaaatacaaaaattagccaggcgtggtggcaggcgcctgtaatcccagctacttgggaaactgagccaggagaatcacttgaacccgggaggcggaggttgcagtgagccgagacagtgccattgcactcccgcctgggcaacaaagcgagacttcgtctcaaaaaaaaaaaaaagaaagaaaatttatgttgcggccgggcrtggtggctcacgcctatggtcctagcactttgggaggcagaggtgggcagattgcctgatctcagaagttcgagaccagcctgggcaacatggcaaaaccccgtctctactaaaatacaaaaaaattagtcaggcgtgtgcctgtagttccagctactcaggaggctgaggtaggagaattgtttgaacccggtaggtggagtttgcagtgagccgagatcacgccactgcactgcagcctgggcaacagagcaagactctgtctcaaaaaaaaaagaaaatttttgataattggttaccgtggctcagacctgtgatcctagcagtatgggacaccaaggcaggtggattgcttgagtccaggagtttgagaccagcctgcgcatcatggtgaaaccccgcctctactcaaaatacaaaaattaaccagatgtggtggtgcatacctgtagtcccagctatttgggaggctgaggcgagaggaccacctgagccagggaggctgaggctgcagtgagccgtgatcacaccactgcactccagcctgagtgacaaagtgagaccctgtctcaaaaaaaaaagaaagtttgtttcttttcagaaagttttattatttgttatgtaataaatttttaagtgaattaataagtattttataaacatttcttagttttagtttctaatatgatagtattgagagatataacacacataaggaaaaactctttgggactcttagtaacttttaagagtataaagagatcctgagaactaaaaactctgaaaacctctgccctagaaaaatgcatgcagagtgcaccaagacacatatataagcatgttaatcgcaatatgatccayaatggcctaaaactcaaagcagtgtaaaagtttatcaatgatagacgaatagggagtattctaaatattacacggaactaaaaactaatgaactctaggtacatgcaacatcaataaatctgaaacataaatgttaaatgaaaaaagtcagactcaatacatatggtatgattacgtttatgtactgttcaacgatatgcgtaaaaaactaggaatgcagacttaggtaattaaaatataccaattcccaaataatccataataactgttgcccttgggagaagaaagataattatattgggaggaggtgctggcaatgttttatttcttgatgtgggtggtggttacacaggtatttttgctttatattcattaagctttatactcataaatgtatatttgatatgactgttttcacattaaaatactttaaaagaagtagaaattttcttataaaatgtgggtaaatattttagattcagttatttcaactataaaatttggataaaaataatttcatcagtctccttttaaaaatttgactaagtaaaatattcatgacactacatttttgtttaaacatagtgctatttcaatctgtatttattcccatatgttgtgtstttattctccagattgatacattggtttgtcctttttaaccaagtattttatacattctcattaattatacaaaaatttggacttgaagctatactataaaataacaactgtgataaatattatcttagcacggtgcaaacagatgatctcatttttttgaatttttcattaaaaaaattttttttcatttgatacagatagtcgtgcaagcactgcagtgttcccattattcgattctttggcagttggtgaaaattactgatggctctccttccaaagtaagtaagagtttctgtaggcagaagggttattactgaaataataaccttgcttaactatttaataatttactattatcagttattgtataatataaattattgtaatatttaataaaatatatgactattaccagttcttggtttatcttatgagtaagtatacatttacctctttgggaagagccaaaatcttcaagcaaaagacacatagttatgtgtgtgtatatatatgtacacacacacacggattaaaacttcttatataaaatcactgtagtagacacaagagctctgataggtaacatgctattaaaaagaataacattgaggccgtgcacggtggcttacgcctataatcccagcactttgggaggccgaggtaggcagatcacttgaggtcaggagttcaagaccagcctggccaatatggtgaaactccatctctactaagaatacaaaaattagctgggcatggtgatgcacacctgtagtcccagctacttgggaggctgaagcaggagaatcacttgaacccgggaggtagaggttgcagtgagctcagatcacgccactgctctccagcctgagcgacagagtgagactcttgtctgaaaaaaaaaaaaatacaaaaattagccgggtgtggtgttgggtgcctgtaatcccagctactgaggaggctgaggcaggagaatcgcttgaacccaggaggcagaggttgcagtgagccaagatcgcgccattgtactccagcctgggcaacaagagcaaaactccatctcaaaaaaaagaataacatcattgaaagatagtagtatgatacctagagacmcaaartgaacaaccctcttgaagttaaaaacaacttaaaatgttgggtaaattttttttttttgaattttaatgtatccatgaccatgcaaaacaaagaaaaatgtgggctagggattaaatgaaaaaaagtaagatcaagaaagccaaaaagagcactgaagcctgctttaccttgaggatgtttctcaaggtccatccaggatagaatgtctcataggtggccacatctcccagataattttgggatcctaatgacctgctcttaccacaggggtgaactagaaataaacgcactccagtttccttcaggggctgggggattataaggaaaagagtctgtcttaaaatttgtcattgattaaaatggggaaaaataaatctcccatgaaagtttatgacttagcttttgcataggttttcacctgaattcatactattttgatggtaaaaaaaaaagaaagaaaaaaagttgagattttgattaagtgttctataatggtggtaatccccaaccacctaacagaatcaaatctaaatatcttctgaaggaacttgccttaaagaattttccacaagtaaaaccttaagcaaaatgagctcacagcaaaaatatcactcatgaaaacaaccatgaagagaatcagacaaaaaatacttcacattggaattatctgacacaaatataaatgtttcagttatttcatgtaatgagaggcctgaacatgactaagaagtaaacatttgataaagaaccaaataaagatattagtatgtttgtgtatctcctcttaacaaaacaagctgtttaaccagtaaagatgagtaatgcatttgcatatagaacaaacagcttgatatggagtgttattttttcagagtaagaattttttttcctttctgagtaacaatttgaggatctctgcatttagaaagtagtaggatttttaaattctttttcattagaagaatggtaatatattggttagcctcttggtttttctcttttattaataatttcagtcttgaaaaacaaaaataacagttaaccttttattagtaatgaaagccactttaaaactgtgttacagcctggtgcggtggctcgcgcctgtaatcccagcactttgggaggccgaggcgggcagatcacaaggtcaagagttcgagaccagcctggccaatatggtgaaaccctgtctctactaaaaatacaaaaattagctgggtgtggtggcaggcgcctgtagtcccagctgcttgggaggctgaggcagaagaatcgcttgaactcgggaggcggaggttgcaatgagccaagatcatgccactgcactccagcctgggcgatagagcgagactgtctccaaaaaaaaaaaaaaaaaaaaggccaggcgcggtggctcacgcctgtaatcccaacacttgggaggccgaggtgggcggatcacaaggtcaggagatcgagaccatcctggctaacacagtagtgaaaccccgtccattcttaaaatccaaaaaaattaaccgggcgtggtggcaggcgcctgtagttccagcttctcaggaggcttaggcaggagaatggccggagcccaggaagtggagctttaagtgarcggaaagatcgcgtggctgcacccccgcctgggggacaaagggagactttgtttcaaaaaaaaaaaaaaaaaaaaaaaaaactgttacactgggcctggcggctcacgcctgtaatcgtagcactttgggagaccaaggtgggcggatcacctgaggtcaggaattccagaacagcctggctaacatgatgaaaccctgtctctactaaaaatacaaagttagctgggcatcatggcgcacatctgtaattccagttacttggaggctgaagtacgagaatcgcttgaacctgggagctagaggttgcagtgagccaagatcttgccactgcattccagcctgggtgacagagcgagcctcttgtctttttttgaaatgttatttaatatagtaaagtcaaaggagattgaatttatatattaaaatttgataggaagggtttaatgattttacacaattgcttttattctcacccttctgattgagttttagatagtttttcccacagacgtcatttttgttgagttacttgcattttggctaaatattgattattgcatttagcaaatttagaatatgttattccgtaaaaattcagcataattgatagttaattcctccttgtaaatctattaataatttaaattttgtcttttttttaattgagatggagtctcactctgtcacctaggctggaggagtgcagtggtgcaatcttgactcactgcaacctctacctcccgggttcaagtgattctcctgcctcagcctccagggtagctgggattacaggcgcatgccaccatgcccgggttttttgtatttttagtagagactgggtttcaccacgttggccaggctggtcttggactcctgacctcaagtgatccacccacctcagcctcccaaagtattgggattacaggtgtgtgccactgtgcccagcctaaattttgtctttttacaactatattccataattggaatgagaatctctattcttcaatcgacttctttgaatattttctattttttaatctttttacagcagaattattttgaaattccttgccttttttgtctgacacattctcctaataaaagatagttttatttttgtattagtcatattacatatttcattggcaatgcagattttgttaccagaactgattttgttttgttttatttttgagacagggtctcaccctggttgcccactgtcacggctcactgtggcctcaacctcctgggctcaggtgatcctcccacctcagcccctgaagtagctgggactacaagtgtgtgccaccacgcctagctacatttttttttttttttttttttttgagacagagtctcgctagagtgcagtggcatgatcttggctcactgcagtctccgcctcccaggttcaagcgattctcctgcctcagcatcccaagtagctgggattactggtgcctaccaccatgcctggctaatttttgtatgtttagtagagacggggtttcaccgtgttggccaggctggtctcgaactcccaacctcaggtgatctgcctgtcttcgcctcccaaattgctgggattgcctgtcttcgcctcccaaattgctgggattacaggtgtgagccaccacacccagccacgcctggctacttttttatattttttgtagagatggggtttcaccatattacccaggctagtctcaaactcctagactcaagcagtccacccgcctcagcctcccaaagtgctgggattacaggtgtgacccactgattttctttatgccagaaagaatgctgcagcatcttttatgtgttttattcagttaattacaatttatagttttatgtgcatttatagcatatgtggaatttttcttacttaggtatttgtctctcaagttatttcttctcattttgaagttgttggtagtttctttaaaagtccagggtatattcagtagtcatcgtacatcagttctgtctataattttaaaatggttctctaagtgataatcttcaaaagcatgaatttttaagacacatgcaaactttaaaaattcatgtttcagctgggtgcagtggctcatgcctgtaattccagcactttgggaagccaaggcaggcggatcacgaggtcaagagatagagattatcctaaccaacatggcgaaaccccgtctctactaaaaatacaaaaatttgctgggcgtggtggcatgggcatgtccctgtagtcccagctactcagaaggctgaggcaggagaatcgattgaacccaggaggcggaggttgcagtgagccaagattgcatcactgcactccaacctggcaacagagcgagactccgtctcaaaaaaaagaaaaatccatgtttcaggctggacacagtggttcatgcctgtaatcctagcactttgggaggccaaggtgggcagatcacttgaggtcaggagttggagaccagcctgaccaacatggtgaaaccctgtctctactaaaaatacaaaaattagccaagtgtagtgacacatgcctgtagtcctagctactcgggagtctgaggcaggagaatcgcctgaacccacagcaggtagagattgcagtgacctaagattacaccagtgcactccagcctaggcaacagagtgagactctgtctcaaaaaaaaaaaaaaaaaaaaagatgaagcgtaggaagggactttgttgttgtcattaccttattgttttacattttgtttgctcgtttgttcatttgtttgttttgagacagaatcttgctgtgttgcccaggctggagctcagtggcatgatctcagctcactgcaagctccgtctcccaggttcaaaggattctcctgcctcagcctctcctgagtagctgggattacagtcacccaccaccatgtccggctaatttttgtatttttacaaaagttggctcagtttgtaatgccaggactaacagtatatggaggacttctgtgataatgcacctaaaactcyatccattttttccccttaattttttccctgaagtttaaatgtagtatggtagatactgggatttttatatatgttaaatgtatttaatatttgtaatgttggtcatttagaagcaagctgaaagtttgttacgtaaagtaattttgtattattttgttgagaaaatgttaaaatgaaatgggtcatttagayagtgagggagcaagccagccaaccattatttgtttttctttctgtagtcatttatacagttatagaaacatttaaatctctcaagaggtcacatatttttattaataaaatatgcttattattttttgttataaaatacaaggtagagttctcataaatttgagctctcctacttcagcatatgcttattataaaagaagaaatacaaaaatagtaatataaacaaaataaaactgactcttaccacttgtagataacmactgttaatattttggkgtattttcttttcttttttttttttttttttttgagacggagcctggctctgtcacccagggtggaatgcagttgcacaatctcggctcactgcaacctccatctcccaggttcaagcgattgtcctccgtcagcctccccagtagctgggactacaggcgcatgccaccacgcttggctgactttttgtatttttagcagagacggggtttcaccgtgttagccaggatggtctcgatctgctgaccttgtgatccacctgcctcagcctcccgaagtgctgggattacagccatgagccactgcgcccagcctggtttattttctttagkgctttttctttaatatatttgtaattttattgagattacaatgtactttcaatttttatcttctcttcaattaacatattttcttcagttattaagaaaagtttatagagaatatttttaatatatgcataatctattgtgtagctataccgtaatttattttacctctctccgctcttagatatttgggtttaaatatttttactaataaaattaatgctgtgatgatgggcattctggtgcaaaaagcttgttctgtgtttttcattgtttcatcttgtattatattcttagaaatggaattgctaggtcaatgattgtatatacttttaaggttcttgatgcatactgccaaatcgctttttaaagagtacttttctaaaattttttttcttttctattgtcataaacactcattcaggagattatgaatggtagttataattgaagtttaaattcaagttataatttaactcaacagtaaacactattaaataaagtttatgagaagactatatcaagaaaaagctttgatcgttatttgaaatggaagtgcactgggtttcaccaataggttttcctctgttcccctgattcccagagttggaagctctggggcagtcttacaggttatgctaagtatactttgctccagtgccccctagtgctggtcctgtggaagtaaccttcattttttctttgtagcagaaaacatccttcttccttcagctccttctggacatacacaaagacatttaaagagccaggcaaataagagttagggctaaaatgggccgggcatsgtggcttacgcctgtaatcccagcactttgggaggccraggcgggcagatcacaaggtcaagagatcaagaccatcctggccaacatggtgaaaccctgtctctactaaaaatacaaaagttagctgggcatggtggcgtgcgcctgtagtcccagctacttgggaggctgaggcaggagaatcgctttaacccaggaggcggaggttgcagtgagccaagattatgccactgcactccagcttggcgacagagtgagactctgtctcaaaaaaagaaaaaaaaaaaaaaaaaaagagggctaaagtaatgccctattactttctttggcctgcggatctagaatttatccttattttttttctctcctgggaggagctgtcctgctttctgtagtcttatatttgtgctactctctctgccttaccctgcatgtttctattctagactgcaatagggagggcctgggccaaacatccctacctctgraccctcaccctrtttcaaatcctttatgtcaaagaaagtcaatataccctaggtagctacaagtccaattattattgaggtatttagctgtaaaatttgtccttccatcactgtcttgactaaaggttctcctctgaaaattccaacttgttgacctgcaaacagactggagaaaagagcagtaagggtgaaggtgggactgatagtggccaagccccatgagaagacatgtttaaccttgctgtccttcccacaaacatgcattmctacaaatgtgttagaaataggctcagatgtgtaaaaatctacaggctgctttctrtagctctttcttttctcttccctacccactccttcagaatagcagtgagcaagagatagctcattagagtcctggcccggaattcctgtaataacaaaatacagatagcaactccctatctgcagagttaactgctttgagaggaagggagtggggccaggcgtgagaaataatagtgatcctygtaggaacaaatttttagtcgcatgtaagcattttatttcacttcttttcttagagaatctttgcccccaccttttatttattggaaattctgttccattagttagttctaagcctttcctttcggtcgttccatgactccagagttgttctttaatacatgtgttcctgttaatattatgtccaatcacaagtgcctgattggctggtctagaaaagttagagaagaaagatacaggtcttgtttaatayccatttcatgttcagctctcagaatattcatttaaaagaatctggaatgtaaaagtaggtgtctattcataccaaattcagaacttctccaaaattatattcaacccaatattttaaaattctctgaaaaccagaaataaatatcttcgatttagaaaatgacttacaagtcatggtttcagcattccattaagagtaccatgttgtgtttgcagccctgttcctgagtccctagatatagaggcttgcttgctggtagggaatcccctctttaaaaatagcataaggggccgggcgtggtgactcacacctctaatcccagcaatttgggtggccaaggtgggcagatcacaaggtcaggagttcaagagcagcctggcccatatggtgaaaccccatctctaccaaaaatagaaaaaattagttgggcgtggtggcgggcacctgtagtcccagctactcgggaggctgaggcagaagaatcgctggaacccgggaggcagaggttgcaatgagccaagatcatgccactgcactccggcctgggtgacaaagtgagactccatctcaaaaaaaaaaaagaaaaaaaaatagcataaggccaggtgcggtggctcacacctgtaatcccagaactttgggaggccaagatgggtgkatcacctgaggtcaggagtttgagaccagcctggccaacatggtaaaaccccatctctactaaaaatacaaaaattaaccagatgtggtggcacacgcctgtaatcccagctactcagaaggccgaggcaggagaattgctggaacccaggaggtggaggctgcagtgaactgagatggcaccactgcactccagcctgggcgacaaagcaagaatccatctcagaaaagaatgataaaaataaataaatccagcctgaccaatatggtgaaacccygtctctactaaaaatacaaaaaaattagccaagtgtggtggtgtgcgcctgtagtcccagctactcaggaggctgagacagragaattgcttgaactgggaggcggagatcacaccactgcactccaccctgcgtgacagagtgagactcagtctcaaaaaaaattaaataagcaaataagtaaataaagcataaggccttctcagcctcactagcctgtccccagtgaatgctgtttttacttattaagagacagttgcctcgtttacaaatatccaaacttcttaagacatttaatacttcatgatctaagtaacaaggcaggaccaagataattaattctaagtaacaagtattacattgtaaaaatatgttttcactaagcttatcagaagcctaaaacaatattaagaatatttagacactttgggaggccgaggcaggaggattggttgaggccaggagttcaagaccaacttggccaacatagtgagatcccatctctattttttaaacttattatatataaaaaaagaatatttagacaaaacataacactttctagtacagagatttgagatttcctccaccaaaattaatgataaaagaagtttcctttcctgtcaggttatttatttgagtaaaaaagaaatgggtatcttatcctgcttaatatcccctaagtggtacagtaatcattttccttactacagtaggtttttcattaaaaattgtttttcctaataagtaacagttactagttgtttgttaaatgayttcttgttgcttacacaatttatctatgtaagtagctccctgccaggtgcggtggctgatgcctgtaatttcagcactttgggaggctgaggtgggcggatctggaggccaggagttcgagatgagcctgaccaacatggtgaaaccctgtctccactaaaaatataaaaattagctgggcgtggtggtgtgtgcctgtaatcccagctactcaggaggctgaggcaacagaatcgcttgaacccaggaggcggaggttgcagtgagccaagatcgcaccactgcactccagcctgggcaacagagcgagactccatctcaaaaaaacaaacaaacaaaaaagcagctcccagttcttctgtttccagcattttgtgtgtgtgttggaacatggtctttggagttaaaattgagtttgaatttttactccacttcttaccacctgtggcaagataagcaaggtacttcaccttgagcttcactttcctgatatataaaatgagaatgatactcactgctggataggtttgttgagaagatgaaattgaaagaagtgtttgaattaacagtaaatgttattttgttggcactaagtcgcagtcctaatctttgtttttgtagtcttctcccctgctcaaaccaaaatgaactattgaactattgcctgaggccatgggcatacataaacatacttaatgggtagtgtaggtttgggatacagcgtgatagatttagtcctccatctgaatttttgggataatttgggaattcaagtctctcactttggtcctaacagtcactgcttttcccctgttcctctgactccttctttagcttccttcatctttgtatactacaggaaagaaatcagaagatgttttggaactacagtaggcagcttaagggttcctggatcataagtggattagcctttgaggcaatggcaggagtcagcaggtggggattcagatcgccaagagcagcaacaacactgaaaactaggtattacatttggggtttaaatatcaaatagtcgttttattatatattcacaaaagttgcacactctccccctatccctctgaagaaagttgccagtagcaattactcttagaagaaaacaatctcagaaatacagcatagtgtttacccttctacaatggtggggccttttgtgtcttgttctttttgtcacttgttccaagtgaatgaatttagttctgttttatatatagtatggataatgacttacttcaggtgaaaagtaatttaatgagccttgttatatattagtcactgtggtaggtacaaaaaaacataatacagtttgtctccaaagatctttatagctcagaacaggctcagcagacttcagaccatgggccaaatctgacctgatgtgtttttgtaaatgatgttttattggaacacaaccatgctcattcatttaagtactatctaggactatttcatgctacactgacagttaagtagttggatccagaccatatggactgcaaagcctaaaatatttactatctgatccttaacacaaaaagtttgccaaccagtggcctaataagttaacttctttgccttgtgtaccaaactttgtcagttagaaaaacgtatttgcctattctgggtaagcagtttagttttgtgctgccttttcatcatgaaaattgatcactaaatttttagcaggctttatttttgtattctgagaatttttatctggtctaggtccttgttttgctactttactgtttatttctgcccattccaaaaatctatatttgtcagataatgttgagctaaagttttatgtgtttactaattagtttttccatggcttcattttctgactgtgattatgttaaccgtatttcatagttatggatgaaaacgcaactaaatttggtcctccgctagccatgtaaaattttggaacaaagcctgggcaacatggtggtacctggtctctacaaaaaaataccaaaaaaaaaattagctaggtgtagtggtgtgtgcctgtagtgcttgctactattgtggaagaaaattaaaaggaatcacacatttaaaatctatatacttctgtttttgtgtgtataggtattaaactcccttacctttcctcactgactgtaatcatacagtttgctgttatgggtcagtctacatttaaagatcttttttcttcctaagatgtcaaatttgagcctttgtgcctttaggaaagcttctttctaatatagcttatatgataaattcaccatcttaattgtgccttccatatttggggttcttcattgttgatatcttgctgacaagacttttattttatttttatttatttatttttgcgacagagtctcactctgttgcccaggctggagtgcaatggcacgatctcggctcaccacaacctccgcctcctgggttcaagcaattctcctgcctcagcctcctgagtagctgggattacaggcgtgcaccaccatgcccagctaattttttttgtatttttagtagagacggtgtttcaccatattgtccaggctggtctcwaactcctgaccttgtgatccgcctgcctcgrcctcccaaagtgctgggattacaggcatgagccacygcgcccggccaagactgtattttaaaaacgtcaacttaatttgttgaaagaggtttctcttcttggctaagcatggtggctaatgcccgtaagcccagcgctttgagaggctgaggcgggaggattgtttgagcccaggagttcaaagtcagcctgagcaacatatcaagaccttgtctctacaaaaaatataaaattagcccaggtgtggtagcacacatctatattcccagccccttgggaggctgagacaagaggatcacttgagcccaggagttcaaggctgcattgagctatgattgtgccactgcactccagcctgggagacatagtgagaccctgtctctttaagaggtttctcctcttatcttggttagtagatcactgataaactgaaactattttagcccttttatatatgggtatatgtaggtttcagtcttctaattctcggtttcactagatctaccaggaagcaaaaaccttagccaatctaataaagctacttgcaaaatggatacaaaatataaccaagatactatgatttacatctcagtgtgatcttactactcgagccatctgaattcctttctgcaggtactctaggaaaaagttggttttctgtagagacagggtctcactctattgctcaggccagagtgcagtggcacggtcatggctcactgcagcctcaatctcccaggctcaagagatcctcccgcctcagcctcctgagtagctgggactataggtgcatgtcaccacacctggctgatatattgtagagacaggtcttgttttgttgcccaggctgatcttgatctcctggcctcaagcgttcctcctgcctccccctcccaaagtactgggattataggtgtgaattgccccacccagccagaaaaagtgcttttgatgccatgctgctttctaaaaataagataaaatattggtttcatttaggaaaaagaaaatttgaaaggaagcrtcaatataaggacattttatatgaactaagagaagtagataaagtagcatagattactcttctgtattcacccattagcttcagttcccactcctgtaatccaggtaatctgactagaaaggggatttgtggaagtaaaattccaatgtattctagtttcttaaaatgacagtctgtataatcagcatatcttgttcttgtattattctttttcagtgtctagtgagttaactggcttttttgtttatatataaatatatttgagtaattcaactttcaaatttcttacttacttttttttttttttcttgaaatggagtctcactctgttgcccaggctagagtgcagtggcgtaatctcagcttactgcaacctccgcctcccaggctcaagtgatccttctgcctcagcctccagagtatgggactaaaggcgtatgccatcacgtctggctaattttttgtatttttggtagagatggggtttcacctgtttggccaggctggtatcaaactcttgacctcaagtgatccacccaccttggcctcccaaagtgctaagattacaggygtgagccaccacgactggcctcaaatttcttttttttttttttttcttcttctttttgagayggagtcttgctctgttgccraggctggagtgcaatggtgcagtctttgctctctgtaacctacacctccaaggttcaagcagttctcctgtctcagcctctggagtagctaggactacagacatgtgccaccacacccggcagtttttgtatttttagtaragatggggttttgccatgttggccaggctggtctcgagctcctgacctcaggtgatccactcacctcagcctcccaaagtgctaagattacaggcatgagccaccacacccagccaaatttcttactttcataatgctgcctgtctctgcaagttgccacatattaattttatcatattaaagagtcattatagcatactggttaagaccacagtctggaggcagactgcttttgttatttcactttgctacttaatggctctgtgtctttgggcctgttgcttaacatctctgtgactgtttctgtttctttttttttttttttttttgagacggagtcttgcactgttgcccaggctggagtgcagtggtgcgatctcggctcactgcaagctctgcctcctaggttcatgccattctcctgcctcagcctcccgagtagctaggactacaggcgcctgccaccacgctcagctaattttttgtatttttagtagagacggggtttcaccgtgttggccaggatggtctcgatctcctgacctcgtgatccgcccacctcggcctcccaaagtgctgggattacaggcgtgagccaccgcgcctggccgtgcctgtttctttatacataaagtgggggtgataataccaatacctatcacagttgtaaggatcagttgttaatctgtgaaaaatttagattagtgcctggcaagtagtaagtgtggataaatgttaacttttattattattgtattctggcccagataaaatgaagtaagttaagcatatttactttttttcataatgaattacagctattatagcagatgagaagtgacagtatccataatatgaggaatgtaacttttttcaaattaaaaagcagtcagtgatatattttaaaagaattcatagtaagtgtgctaattttcacctatttagagcaagctcttataatttgccctattccaaatctttttatatttctttttctttttctcttgaatattatctattgttctttaaggggcattaagagtaaagctaactctatgagacttctttgttttcttactattggagtcttaaattggcaaatcctgaactaatttcaaaatcttgatgtaacaccctgaaaatgtatagatacttactatcacatgacccagtaatggcagccttcctcaacttgagcaaaatcacagtcttgggaatcataattcccactacttaaatgaaatgaagtatagtaacaggccaacatcatgaagtggatgaataaaagcactgagttctgaaattttcaggaacctaaattatcttcccaactgttcaaaggatttactataagagattaactaactttgttaagtatacaatatctgtgcttatttacccaaatctgtcagtatgtataattctctcagtggaatatagttacaattaaattaacttncttgagcactcaaataatatttagtttgcatccaaatctaggccaaactttattgctaaagaaggtctttagtccatccccattgggaaaaaataataacaataaagaaagcctggccaggcgtggtggctcatgcctctaatcccagcactttgggaggccaagacgggtagatcacctaaggtcaggagttcgagaccagcctggtcaacatggcgaaaccctgtctctactaaaaatacaagaaaaaaaatagtagctgggcgtggcagtgggcacctgtaatcccagctttttgggaggctgaggtaggagaatcgcttgaacccaggaggcagaggttgcaatgagccgagatagcgccmctgcactccagcctgggcgataaragcaaaactctgtctcaaaaaaaaaaaaaaaaaagaaagccttggttgtttcacatttccagtgtctcttaaaatactactgttaattagttcatcagttgattgcttacttatttgtggtattaaatgtactactctttagatgttttgggaagtaatcattttacataagacacatttgctttgtgttcagcctttataaaggaatcctttgcctccaactcctaagatggctgattccctagactttcttacatactaatcaagaaatctgagggagtaaaggaacattagtaactcctagcatcatttcttaaaaacccaataattatttattgtttgatgaaattaacacattataagttgcccccaggattgtggtaaacatccatattaagtataccaacatttcattgagtaactatttattaaatatctactatatgcaaagcactattttaggtactaacagtggaacagtgttcctttgaatactggaaggtttacaagttgacagctatctgttctcatttgagtttcatagagttaatttagcagaatcagagtaacatagaaccttagaatacctagttcaactctcttgtttatagattttaaaaatctttaatcctgagatgtaaaataatttttctgagatcatatagctagttaatagcattgcttgctttttgttcttttagttacttttcattcagcaaacattctcacatcttttctattaaaaaggtcaagaatgaccaaaaaaaaatccatyaaccttaaaagacttctatcagccccatcctatttttcactgactctttataatcatacttttttgaaagagttgacttcttccttatcttcctttcagcttactgcagtctgattcagcactcataactccattgaaagtgctctccccaaggttacccacagcttcataattgctatatccctggcacttttaatacttatctctaatctctctgtggcatttgtcattgttaattattcatttttttaatgttttcttacctccgggatatcatattcccctggttttatttctacttctcaaataatttcttagatttcttcataagctcttctttgtcattcatctttcaaatattggtatttcccaggatacttgctgtcaccyttctctgtgtattctccytgagcagtctcatccacttctgacacatctgttgctatctaaatgctgaagactcccaaatccttgtttacttctttctcttaggctttgaactcacatacgcagctgcctactagacatcttcaagatatctattagggatctcaaaatcatcatctctaaaatttaactattactaactgcatttgttcctatgtttctttttttttttttttcttytttttttttcgagacagggtcttactctgtctcccaggctggagtgcagtggcacaatcaatctcagctcactgcaacctccacctcctgggttcaagcgattctcttgcctcagcttcctgagtagttgggattacaggcacccaccaccacgcccggctcatttttgtatttttagtagagactggatttcatcatgttgcccaggctggtcttgaactcctgacctcagatgatccgccaacctcagcctcccaaagtgctcggattacaggcgtgagccatcatgcctggcctgttcctgtgttttttatcttgatgacttaataccacaattcctctagtaggcagctccctagaaattaaggagtaatcatcaacaggctctacccgattgctccctaaattctatcagttctactgctttatctttcatctatccatatctttagagccaatatattattttcaggccctcattctaaattatccctggctgggcacggtggctcacgcctgtaatcctagcacttagtgaggctgagastggcggatcacgaggtcaggagatcaagaccatcttggccaacatggtgaaaacccgtatctactaaaaatacaaaaattagccaggtatggcagcacacacctgtagtcccagctactcaggaggctgaggcagcagaattgcttgaacccgggagacagaggctgcagtgggccaagatcgcaccactgcactccagcctgggtgacagagtgagactccgtctcaaaaaaaaaaaaaatcctatggcctttgttaatatgcaataaaatacacagtaatgattaagaacatggactttagagtcagacagccccacgtttgaatccttgctctgtcacttagcatctatgggtgctgtgagtatcagttttcttgtctgtaaaataggaatattaccatttactttgtagggtgatggtgaaatgtaaatttatagttctgggaacacagtatgtggtacatatcagctctcaacgaaagatgtgactactctaactggcctattccacatcattctccattgtgtttagaatatgattcatttacacaaaattttagcactcttatgctaaaaatccttcttcagtagttcctcattgccagcaggacaatattcaaatgatttaacgtgatattttaaatggtcttctatgtaaatgcaaatggttttattcttctttagctttttttcttgctgctgtcttccctatttataccccagctacaataaattaacagttcctcaaaagcacctctgcacttttttkttgttgttgagatagagtcttgctctattgaccgggctggggtgcagtggcgcagtctcggctcactgcaacctctgcctcccagattcaagccattctcctgcctcagcctcccgagtagctgggattacaggcatgcaccaccacacgyggctaatttttctatttttaatagagacggggtttcatcatgttggccaggctggtctcgaactcctgacctcaggtgatctggccgtctcagcctcccaaagtgctgggattacaggcgtgagccaccgcacccagccacctctgcttttttgaatatctgtgccttaactggaatacctttttctgtagctagattatttttctccttcaggactcagcttacatgttatcttctttgggaactcttccatgactacttttgactctgagttaagattttccaacatggggcccatgttttctcctaccatagcactccttacactatattgcagttgcctgttctcttatctgtttccctcagtgtattttgaatgtttaaaattaaagtttcaggaatgttgaagtttagttattagatatttatctgcagaaacatgaaaagttctcaagagggtgtcctttttacttctctccacaagatgaactcgctccttcttccacatactatactcatgttagcaaaagaaaatatgtgtgtaatttttgaagtatcattatttgggatgtaaagatccccaaaaagactaagtgctgtcatctgtataaaatagagtggcttaaagagttttagttgagtactttttaagtgtttctatattagcctttgctcaggtaattagtctgcattactgttttaaatgttggtatctgcatgtgtcttactcattagtcagtgagaagaatatgagctcttatatcagatagtcctagtttcaacccctcgctaataattactgtttcttaggatcaatgtaaatgttaaactrtataatagtaagcccttaaaccagtgcctggtgggttgtaagcactcgataaatttaaaatattttaagccagggtcttgctctgtcacccaggctggaatgcagtggcacaattatgtctcacttcagccttgatcccatgggctcaagtgatcttcctgcctcagcatccccagtaactcggactacaggcatgctccaccatgcgcggctaattttctgtgttgcccacgctggtctccaactcttggattcaagcaatcctctcaaacctgggcctcccaaagcactgggattgcaggcatgagccactgcactcaacttgaaatttccttttggacttttcaaatgttccttatggaatcttatctggccatctaattaaatctatttacccatccaaccttagattaaagcccatcctcctatgaagatttctccaactttgctgcagttaagagttaatacaataactgaacacttcatctccgtaattggcctgtctgctagaatgttaactatttgagggcatggcactgtcttaaatttatctttcttcccctgacattttgcagagtgctgagatataagataaattcagtacacatttgttgcctaattgagttttttcagtgtgctgctctgctgcctcactttactagcagtaatgtgtgtcacaggaatgactagcaattttaatcaacctaaataaaccatatttataaaggaaatctgttgaaaacaatcatactgagtattccatagctaactataactgttttagagtgtcagtgtcactaccccttctattaggacagataactaagaaatgactacattaaatggttcccaacattaaatttggttatatgaatttccttgagaataaaccagttttgctattttccacttactgtttcttctagatcagttttctgtgatcctgtaattcacgcttgcaaatttgaatgtgtcttacaggaggatttgttggtattgaggaaaacggtgaaatcctttttggctgtttgccagcagtgcctgtctaatgttaatactccagtgaaagaacaggtaagaaattatcagtaagagctctcaataaaatcaactcaaatacattaatgaacattaagaagatacaattttttatggcagtttttgtacacatgttcattcctaacatttactggacctggaacaagactgtagatgtgtgaatttatgttataaagcaagctaacaaacttattatataatatacattctttccttttactttcacaagtatactgtcatcagctggaagggcaggttgaaatgtagactttttttttttttttttttgagacagagtctcgctctgtcgcccaggctggagtgcagtggcgcaatctcggctcactgcaagctccgcctcccgggttcacgccattctcctgcctcagcctcccgagtagctgggactacaggcacccgccactgcgcccagctaattttttgtatttttagtagagacggggtttcaccatggtctcgatctcctgacctcgtgatcagcccgcctcagcctcccaaagtgctgagattacaggcgtgagccaccgtgcccggccgaaatgtagactttttgactcctaagaattgacaccagaatggccgggcgcagtggctcacgcctgtaatcccagcactttgggaggccgaggtgggcagatcacaaggtcaagagatcgagactgtcaaccccgtctgtactaaaaatacaaaaaaaaattagccgggcatggtggcaggcgcctgtaatcccagctacttgggagactgaggcaggagaatcgcatgaacccgggagacagaggttgcagtgagccaagatcgcgccattgcactccagcctgggcagaaagagcaaaactctctcaaaaaagattaaaaaaaagaattctacaccagaatattgagggtctggggagctgacatatgacatacccttttatcatcttaccttcagctccttcccacaccagttaagtttctcacacatgcatgccaacactttagccccacatcttgaaactcttgtcaataccacccgcccaaacagctgcccattcaccacccaggggcctagtaatatgtacattgggtatgcagtatgcctagagaagaggcctttgcaggctcagacaacaggatcaggactgtagggcaaggagtttctgagtccctatacttggacaatggtgtagaagtggggtttggtaagcaggtgggcatatcccattggtctgatagattcctcatctcttgtagaggggcacagcccaaagagggtcagggtgggggtcagggtgggccagggaagtactgtttccatgatatgattttgtaaactattttttaaaatagactgttgtattggggagtacatttgtgtaaaacaaaatgtatattttccatactatttcttattttgatattgggctagagtcgtttggtgaaagagtacagtattacttatcctttgctgtctcttanaaatagtgacaagtatctttattgagttatcagcatttaacttaaaatggaaacagagatggtcttccctaaaccttattctttaaatcttcagaacactacttatggagaaatacccagctctgccatttattttattttgdtttattttattttattttattttattttattttattttattttgttattatttatttatttatttatttatttatttatttatttatttattttgagacggagtctcccactgttgcccgggctggtgtgcagtggcgtgatctcggctcactgcaacctccacctcctgagttcaagcaattccctgtctcagcctcccaagtatctgggattacaggtgcccaccactacgcctggctaatttttttgtatttttagtagatatgggtttcactgtgttggccaggctggtctcaaactcctgacctcatgatctgcctgcctcagcctcccaaagtactgggattacaggtgtgagccactgcacctggcccagctctgccatttaaaccccaaatccagtgtttctgcatcagacctgcttggtgatgtccaaaactatggcctgctggttaaaaagtattccctgtggattctctgtatgctgcctttttttcaaatggctctttctaaatacctgagtatatttcatggttgtgctgtcagggcataaactgccaagactcttgctgcagttggacaaccagatatacagttatcccaaactaaatgccaaaattatgttttcccatagaagtcaactttggagggggcagtgttagtggattgtttggaagtttcagagccctcaattatcccacaacaaaatctttctattgtaataaactgatcagacccatttatttcactcaatccattaaatagggcaaatttggcagcatacctataatgtgtacaaatgtattcaaagtctctatataattaaatttgtttggaggctttattagatactggtttttatatgaatggttttctaatacagtcatgcaccacttaacaacaaggatacattgtgagaaatgtgttgttaggcaatttcatcattgtatgaccatcataagagtatatttacacaaacaaatggtattgcctaccacatgcctatgctctatggtatggcctattcctcttaggctatgatcctgtactgtataatactatactgagtagtatagataattataatacaactggtatttatatatctaaacatatctaaaatacagtataaaagatttaaaaatggtatacttaccataagaatggaagtagctctgagtgagtgaatgagtgattggtgagtgaataggaaggcctaagacattactatacatcactgtagactctatatgtaccatacacttagactatactaaattaattaaaatgtttttctttcttcaataataaattaaccttatcatactataattctttttctttgtaaactttttaatttttttaacttttaaactcttttgtaataatacctaacacacaaacacattaaacagctgtacaaaaaaaaaaattttttttttttgagacggagttttgctcttgttgcccaggctggagtgcagtggcacattctcgggtcaccccaacctccacctcccaggttcaagcaattctcctgcctcagcctccctagtagctggaattacaggcgtgcaccaccacacctggctaattttgtatttttagtagagatgggatttctccatgttggtcaggctggtctcgaattcccaacctcaggtgatcctcccaccttggcctcccaaaatgctaggattacaactgtgagccaccgtgcctggccaaaatatttttttcttatatctttattctagaagcttttttctatttatttttgaataaatacagtgtgctgtatccaggaaacccatctcacatgcaggcacacacataggctcaaaattaagggatggaggaagatctaccaagcaaatggaaaacaaaaaaaggcaggggttgcaatcctagtctcggatgaaacagactttaaaccaacaaagatcaaaagggacaaagaaggccattacataatggtaaagggatcaattcaacaagaagagctaagtatcctaaatatatatgcacccaacacaggagcacccagattcataaagcaagtccttagtgacctacaaagagacttagactcccacacaataataatgggagactttaacaccccactgtcaatattagacagatcragacagaaagttaaaaaggatatccaggaattgaactcaactctgcaccaagcagacctaataaacatctacagaactctccaccccaaatcaacagaatatacattcttttcagcaccacacctattccaaaattgaccacatagttggaagtaaagcamtcctcagcaaatgtaaaagaacagaaattataacaaactgtctctcagaccacagtgcaatcaaactagaactcaggattaagaaactcactcaaaaccgctcaactgcatggaaaccgaacaacctgctcctgaatgactactgggtacataatgaaatgaaggcagaaataaagatgttctttgaaaccaacgagaacaaagacacaacataccagaatctctgggacacattcaaagcagtgtgtagagggaaatttatagccctaaatgcccacaagagaaagccggaaagatctaaaattgacaccgtaacatcacaattaaaagaactagagaaacaagagcaagcacattcaaaagctagcagacggcaagaaataactaagatcagagcagaactgaaggamatagagacacaaaaaacccttcaaaaaatcaatgaatccaggagctggttttttgaaaaaatcaacaaaattgatagaccactagcaagactaataaagaagaaaagagagaagaatcaaatagacgcaataaaaaatgacaaaggggatatcaccaccgatcctacagaaatacaaactaccattagagaatactataaacacctctatgcaaataaactagaaaatctagaagaaatggataaattcctcgacacatacaccctcccaacactaaaccaagaagaagttgaatctctgaatagaccaataacaggctctgaaattgaggcaataattaatagcttaccaaccaaaaaaagtccaggaccagatggattcacagccgaattctaccagaggtacaaggaggagctggtaccattccttctgaaactattccaatcaatagaaaaagagggaatcctccctaactcattttatgaggccagcagcatcctgataccaaagcctggcggagacacaacaaaaaaagagaattttagaccaatatccctgatgaacattgatgcaaaaatgctcaataaaatactggaaaactgaatccagcagcacatcaaaaagcttatccaccatgatcaagtgggcttcattcctgggatgcaaggctggttcaacataggaaaatcaataaacgtaatccagcatataaacagaaccaaagacaaaaacgacatgattatctcaatagatgcattaaaggcctttgacaaaattcaacaaccttcatactaaaaactctcaataaattaggtattgatgggacgtgtctcaaaataataagagctatctatgacaaacccacagtcaatatcatactggatggacaaaaactggaagcattccctttgaaaactggcacaagacagggatgccctctctcaccactcctattcagtatagtgttggaagttctggtccgggcagtcaggcaggagaaggaaataaagggcattcagttaggaaaagaggaagtcaaattgtccctgtttgcagatgacatgattgtatatttagaaaaccccatcgtctcagcccaaaatctccttaagctgataagcagcttcagcaaagtctcaggatacaaaatcaatgtgcaaacatcacaagcattcttatacaccaataacagacagccaaatcatgagtgaactcccattcacaattgcttcaaagagaataaaatacctaggaatccaactcacaagggatgtgaaggacctcttcaaggagaactacaaaccactgctcaatgaaataaaagaggatacaaacaagtggaagaacattccatgctcatgggtaggaagaatcaatatcgtgaaaatggccgtactgcccagggtaatttatagattgaatgccatccccatcaagctaccaatgactttcttcacagaattggaaaaaactactttaaagttcacatggaaccaaaaaagagcctgtattgccaagtcaatcctaagccaaaagaacaaagctggaggcatcatgctacctgacttcaaactatactacaaggctacagtaaccaaaacagcatggtactggtaccaaaacagagatatagaccaatggaacagaacagagccctcagaaataatgccgcatatctacaactatctgatctttgacaaacctgagaaaaacaagcaatgtggaaaggattccctatttaataaatggtgctgggaaaactggctagccatatgtagaaagctgaaaccagatcccttcctcacaccttatacaaatattaattcaagatggattaaagacttacatgtcagacctaaaaccataaaaaccctagaagaaaacctaggcattaccattcaggacataggcacaggcaaggacttcatgtctaaaacaccaaaagcaatggcaacaaaagccaaaattgacaaatgggatctaatwaaactaaagagcttctgcacagcaaaagaaactaccatcagagtgaacaggcaacctacagaatgggagaaaatttttgcaacctacttatctgacaaagggctaatatccagaatctacaatgaactcagacagatttacaagaaaaaaacaaccmcatcaaaaagtggrcaaaggayatgaacagrcacttctcaaaagaagacatttatgcagccaaaaaacacatgaaaaaatgctcatcatcactggccatcagagaaatgcaaatcaaaaccacaatgagataccatctcacaccagttagaatggcgatcattaaaaagtcaggaaacaacaggtgctggagaggatgtggagaaataggaacacttacattgttggtgggactataaactagttcaaccattgtggaagtcagtgtggcgattcctcaggaatctagaactagacataccatttgactcagccatcccattactgggtatatacccaaaggattataaatcatgctgctataaagacacacgcacacgtatgtttattgcggcactattcacaatagcaaagacttggaaccaacccaaatgtccaacaatgatagaccagattaagaaaatgtggcacatatacaccatggaatactatgcagccataaaaaatgatgagttcatgtcctttgtagggacatggatgaagctggaaaccatcactctcagcaaactatcacaaggacaaaaaaccaaacactgcgtgttctcactcataggtgggaattgaacaatgagaacacatggacacaggaaggggaacatcacacactggggactgttgtggggtggggggagtggtgagggatagcattaggagatacacctaatgctaaatgaygagttaatgggtgcagcacaccaacatggcacatgtatacctatgtaacaaacctgcacgttgtgcacatgtaccctaaaacttaaagtataataataatataataataaaattaaaaaaagaaacacatacattagcctaggcctacaaagtgtcagaattatcagtatcagtgtcttccacctcccacatgtctcattggaacgtcttcagtggcagtattttgcatggagctgtcgtatcctatgataataatgcattcttctggagtacctcctgaaggacctgcctgaggatgtttcacagttaatttttttcataagtaggagtacactctaaaatcatgattaaaagtatagaatagaaattagtatagtatagtatagtatagtatagtatagtatagtatagtatagtaaatacatacgccagtaacatagtcattcattatcctcaagcattaggttctatacacaagttagatatgctatactgttatacgactggcagcataatacaccagcatcaccacaaacaacatcacaacaaactcgtgagtaatgtgttgcaccacagggttatgttactacatcactaggtgataggaatttttcagctccattacaagcttatgggatccaccatcatgtatatgcagttcattattgacggaaacatcactgtgcagtagtacactgacattttttaacattagaatttttagaaatattcattatactatgttgaattagagtttcaaattttatgctaatttgattaagcagtatacaattgatttctaatctttgttataatctatcaattttgtatttgcaaagttgggttaaactcattttgttctttgacctgtaatcaacaccttgcttaaactcattttttaaaagttcaagtcaaactatcttaatgagctatttttgagttgatacagcaaagtaaaagaaataggttatatttgggaaaagtcttaaatatgacacttgtttagtgagaaaaaataattttattaaatttggaaattataacaatatttggaatttaaatactgaaaatttatattatggtactgctattaaactatgttttaatttcatacattttcattaatgttgacttgtagttatatttgtgtaatattttgctgataaattgcctttgtattccaggctttcatgttactctgtgatcttctgatgattttcagccaccaattaatgacaggtggcagagagggccttcagcctttggtgttyaatccagatactggactccaatctgaactcctcagttttgtgatggatcacgtttttattgaccaagacgaggagaaccagagcatgggtacttgtagctatcatcttgtcaatattgatttttttttaccaaccccaaaagataggagaaaagaaacaaattcagttctaaaaattatcgagatttctttcttttaaaaaagttggccaggtgcagtggctgacaccagtaatcctagcactttaggagactgaggcaggaggattgctccaaacccagaagttcgagagcagcctaggcaatatggcgagaccttgtctctacaaaacagaaaaaacataaattaaaaaaaagttaatagtaatacattcatatagttcagaaaccaacaagaataaaaatgtacatagtgaagtctccctcctttaatactgtacctcagatcttttcctgtcgttatatagagagctctgtctttctctaacagctacacagcatttctttatgtagatatagcataattcatattatccatctcacacagattgacatatggctagtttccaatcttcaactattacaaactatggtgtaatgaatagtagtgtacatttgtcatttgccacatgtacaaatgtgtatgtaggatagatgttgtttctaattggctatgtccaggttcataatttttctaaaagaaagtatccaggttcctttctgttcctaagtggtcattatgtattacttaaatgaacaaaacctaactgtttgatattaaatgctgaaaaactgttatcaaacctcactagtgaaaattgtgctatgcctgcagaatgataacttagcaatattagactgaattgttaatgattagttgtaaataagttcacttagaatacattatttgtgaaatagattatttaagctctctaaaataatataagaagtatatttgatccacaagtctatttgatgctgttcggctgttctttcacaacattttggaaaatactagtctgtgaaasagtatgtttatttagagtctatattcatctcaggagacaaatttacctgctacttgtcttaagcaaaaaaatgtgttcttctcaaaccactgatgcttcacaataagactaattagtagaaaggaaagagactgacagcaagttctttttgcgaatctatacatataagggagagaagaaagaaggttgattccaaataaggacaggccaggacacgggagggtcagtacagagcctgaaacaaatgttatcatctggagtcttgttggcatgttttttctaggattagaaatagaaaccccagtggggtctggaacttacaaatttgaggaagaaacacacttgttttgaaagtatttgatagggctttaaaaattttttatatgtgcataacatggtatgcaaaatattttgtttctcagttgataatgtaaccatgtttaggatgagcactgaaaatttaactcatccatatttcaatttcttccctaaatatttttctaaaagaaaactttttccttgtgtcttaaaatttttcagaagtgttctctcagtgagaatgtattaacacataaggaatattgaaataagaaaagacagcgttttaaaggtaatcagataatttcacagtattgttatgacacaagtatcagaaaaccaatctttatacagctgtctctcagtattgtgggggattgattccaggactcccactcataccaaaatccatggatgcccaaatctcttaaataaaatggtagagtataatcagccctccctatctgtgggttctgcatccacagatagggagggtagactatacatggtttgcttatcttattcagtctttactatgataatctcctaagaagacagaaaccttagtacctattaaatgtttgataaatgagtaactaaatacagcaccctaaaataattaatgtaacagtttttgtcccatctaaaactgaattgtactatttgtgaagttataatattaagctaattttcaattatacagattatctgcattgttttacgtggataaagtaccagaattcataaccaatttgtaatctgtgtttagagggtgatgaagaagatgaagctaataaaattgaggccttacataaaagaaggaatctacttgctgctttcagcaaacttatcatttatgacattgttgacatgcatgcagctgcagacatcttcaaacactacatgaaggtatagttaaatattcttatttttctccttcctctaactggcagagaaattagcaattgaaaggatgatgacagaagctaaaattgacagcttttcacctatgtaatgtggatgattttatgataaagtttctcttatataagctttttatcagtctgtactattatatcagttccattgagtaggagttccagcatttatatgaaagaacatactttctagctactttcataagctccattttgttcctgactctctgaaaaagcagggctcagagaccttcttgatgtggcctgacaggcacagatgggagggaatactcagttttcctgtatttgccttgttcttgtgtcagagagaatgttctcttttatttagaatattgtatgtgtcatttgatctacttgtgtcttcatgtttgggtgtagtccaattccaattatggcatagtagctgatttatcatattatgctgaacaactgcaatgtgttgagtaatgtgctggtagccagaggtttaagtaagacatgatttctgcactaaggagcttacagattaagagttaactaacatctaaacataatataatgtagcatactgataatgaatgactgccatgtgttcatgccatttatatttgagacactgttctaagactttcacattatcattgatctttctaatccccctgtgatgtaagaaatagtatcatcatttacatataaggaaactaaggctcgagaggtaaacctttcaaggtcacacacaactattaaaataacagaaactgggattttattttaggcttgtctaacttcaaagcttagctcttttcactagaccacaaagcttcagcatgattattgtagtgatagatgcataaattactaacctaacaccaaatatagagagagacttaagtgagaggagcaagagaagacttcctaaagctaatgtgtaaacagagttgcatggataaataggagcttactagatgagcatgggaaggaagacaagcccttgccaagacagcagcataaatatgcctacctgtttcagctcatttttctctacttaatccaaaaagaaatcatgaaagaacttgtcaaactaattattgatacccaaatagactgtgatatttgcatgttgaacctttctaaaagaaaatgtcatgatctgttagcaaacttctgcttgcttccagtgaccatttactttccaaatattcgcaggcattacatttaatttaataatgtattctgtaatcttaggctcagcatcaagctcaccgatggtattgttcagaaaagttattcctcatcctgattttccatcagtcacctggaactttattccaaattacatgttcctgggtcccactcaacctaaatgaaaaatatttagggtggatcccaggcatttgtggaggaggggttaattttccatataaccttctttccttttggaaaatcagaactatgattatctttctctgtcctctagcacctttcctattcttcaccatttcttaaagagcacaaagtttccataatctccacaaattttcttaagacacgattcatctggcctaggaaactaattcaattcggaacaacttgatgctttcattatctcttcactaaacctggatgtcagttccattttataagtgtttatcctaccctttttatatagttttctctttagcaggaaataaagggcatgaaatatgttgaattctggtttttcctggtaatcctttaacaatacttcattggttccaaaaagtgagtcttattcagaacttttatcatccttagcatttcagggacacttctattcactataggctctaacctttttgtgagtattataatagctatttgctcttctgatatatggctatgtggcttttcctccaatttttgtacataattggttcagtctgaacttaaaagaaatctgcctgctccagtactttagtgttttgatatttatctttttctcttcattgagataattcttctttgcactaaaaggatccttttgagctgttcgccttttagcatttcacatcatggaaacatacctatctttttgagattttgaaaatctaattgccaaactattattaatcacttcttcacataggctgtagactttagcttggaaacaatgtccagatttaatggttttaaatgaaaccttttgattatttactcacagaaaaaattatttaaatcttgtgtcaagaaactgaattataacttttcccagtcactgtcgaagatgtctgtgttttacttttttatatttcgatagtaaaatatagacatgttgatgggggggttacagggatgagatagtgcacaaagtattaaatgaagagttaagtctgttaccctaatccccccttccccctatttaggcccaccccccagaagtaagcagttttaactgttttggttttagttcttcaggaggcttctaccaaaattctatttcttgatctgtcaccttttagatgttgtctgttcaatcatgttataaagaatggggccaggcacagtggctcacgcctgtaatcccagcacttttggaggctgaggctggtggatcacttgaggtcaggagttcaagaccagcctggccaacatggtgaaaccctgtctctactgaaaatataaaaattacccgatcatggtggcacacacctgttgtcccatctacttgggaggctgaggtgggagaattgcttgaacccaggaggcagaggttgtagtgagccgagatcatgccattgcactccagcctgggcaacagagtgagacttcatctcaaaaacaaataaaagcaaaaacaaaaaacaagaatggagaaggccaggtgcagtggctcacgcctgtaatcccagcattttgggaggctgaggtgggtagctcacttgaggtcaggagttcaagaccagcctgggcaacatggcaaaaaccccatctctacaaaatattttttaaaaaaattagccaggcgtggtggcacatgcctgtagtcccagctatttaggaggctgaggtgggaggatcaccagagcccagagttgaaggctgcagtgagctacgatcacaccactgcactccagcttgagtgagaccctgtatcaaacaagaaaaaacaagaatggggaatttttctcaccacctctcttcctggaattcccagcttttttggttttactagtattagttcataatcttaaacatcaaatgtgcattcctgtaactttagttatttaactcctgttatgtttaagatgaagaaataaaacacttttttatttacctttcctttcttttaccaaccaacctgttctttttttttttttttcattttcaaaggaggtgacaccaacctattctttatctcatgaaatgtcagtaattttaaagccatgttttctttctttccctcacagtattacaatgactatggtgatattattaaggaaacactgagtaaaaccaggcagattgataaaattcagtgtgccaagactctcattctcagtttgcaacaggtaagaaatttggagagagggagacaaagaatggaaataacattattgcacttctctgtgcttaatatttgctaggtatctcatctcayttaaactaggtcattttatatcattttgtcagtgcattactgtggatattttctggtacaaagacataggttaggtgtcttttcttttggaagaaaatcctagagttcatatttcaaatagatgcaatcctaaggtgatttattcttggactagatgaaatgtcaaactggaaatttaaaaagtagtaatttaagaagaaaaatataaaaagtatttcatgaggaagggcaccaggagataagaaaatgtttttcatgttgcgtaaataagatttctaataaatgcttagtaatttaaaatgatttcagggggcctagtggatatatatatgtgatatgtgcatatataaaaatacataatatatatatgtttgtatttagtttatgataaaagtcttatatcagtggcaaaaggattgggactattcaataaatggtgatgggtcagctgactgtgtatttgaaaaaaatagctgtttatagtcctacctaatgtgtacccaaaataactactagatggtttatatataaaaggacaaaaataagggtttataagaaaataagaggatattttttaaatcctctttctaaagaagtcacagagttcataattgatgatccgtataaatttcttttcttttttctttttttttctttttttttttttttttgcagagatgatgtttcaccatgttggccaggctggtctcaaactcctcggcctcaagtgatccacctacctcggcctcccaaagtgctgggattatagacataagccaccttgccccagccaatctgtataaatttaaatagattaaatagatgtatacatcaatcagcactttgagcaaagttaaaaaaaaagtgacagatggaaatattttcagtcctacataacaaatcctacagatcagtaggaaagataaataaatcccatagaaaagtgagcgagggatatgaaaaaggcacttttccaaggaagaatcttacaaaccagtaaacatgagaagaggcattaggctggacgcagtggctcacacctgtaatcccagcactttgggaggccgaggcgggtagatcacctgaggtcaggagttcgagaccagcctggtcaacatgatgaaaccccatctctactaaaaatacaaaaaattagccaagcgtggtggcgggtgcctgtaatctcagctactctcaggaggctgaggcaagacaatcatttggacctgggaggcgggggttgcaggtatccaagatcatgccattgcactccagcctgggccacaagagcaaaactctgtctcaaaaaaaagaaagaaaagaagcattaattatatataacataagtaattaataattaatgaaagccaagcacagtggctcacacatgtaattccagcactttgggaggccaaggcaggcagattgcttgagcccatgaattcaagaccagcctgggcaacatggcaagaccccgtctccaaaaacaaaaacaaaaatagccagatgtgttggcacgcaccccgtagtcccagctactcgggagggtaaagtgacaggatggcttgagcctgggaggtcmaagctgcagtgagttatgattgcacctctgccttccagcctaggtgacagagtgagaccccatttctaataataataattattattaatgaaatacaaattaaaatggatacttactgctcaacagattggcatgaatgaaaatgattgacaaagatatagaggaaaaggccccttttgaaaactgccttgttagaagacagttttgtagtatattccaaaattgaagatatatattccctttaagccagtaattttgcttctaggtatctacatggatatgcacaggtgtgtaccaataaatatatgtaaaagatgttttattgcagcagtctctgtaatagtaacaaactggaaatagtctaaatgtctatcaacaggggaatggttaaataaactgagctagataaaggatttttaagacaaaatattgagtgaaaaatagcaagtttcaggacaaatgcagtatgctaccatttatgtaaaaataaaaactttagctgtaaaagtaatatgtctacactgatctagaaaactttcagactttaaacactggttacctttggagagaataatggtatttggtagaagagagaaagaataacttttactttgatattctttgaatttttcacaacaaaatgtattctttgtattcactttaaatgtacactttaagttttaaagtttaaggctattgtatataccaatatgtgaaaacattttaaagtttaagaatttataaacagcctgtaatcccagcactttgggaggctgaggcgggcagatcacaagatcaggagatcgagaccatcctggctaacatggtgaaaccccctctctactaaaaatacaaaaaattagctgggtgtggtggcgggcgcctgtagccccagctactcaggaggctgaggcaggagaatgacatgaacccaggaggtggagcttgcagtgagccaagatcatgccattgcactccagcctgggtgacagagcgagactcctcaggaaaaaaaaagaatttataaacaattatctatgaataaatttgaaatccctggaagaactgttccttcagtaatgacatagcaagtagttcaggccaatctattgctgaagaaaactaaaaaggtgcagaacatattagcacccaggagctatttcagtgaatggtgtgattagaataaattgagagattgggaggtgagagactgaagaaaagaaatgtcaacaatacttttcaggacctttgctataaagggaatcagagaaatgggttagtagctggcagaggaaatggggtcaagaagttaagagtatttttaagatgtatacatctagtacagaaggaatagtttaggaggcaggagagagcagtaaacacaagagcaaaactattgagcaggcgaaaccttacatactcccttcttatctaatacataggagggaatggctttaggtgaaagtctggacagttcacccctcataacaggaggaaaggtagatgtctacagataaaattaagtttttagatttggtagtggaatgataattgcttgtatattacctccagggttctgtttttgttgttattttcacaggaaatagctaacagatatgcaatttataaaactccacccagcttaagaactttttggtatattttgttactgggtgggaaaaatcatagcaccatgtatgtaaatggtcttcttttatataatgttcttgtttgaaatataataagtgaaaaaacaaacctcttaaccctatatttcatatattgtcattcctgtaaaaacaataacaaaaagaatagatgtttataaatatacagtgtacttctataaatatatttccttttcccatctcaaaatacattcttttggccacgtgtggtggctcacgcctgtaatcccagcattttgggagcccagggcaggcggatcacttgaggacaggagtttgagaccagcttggccaagatctctgctaaaaattagatgggcatggtggtacacgcctattatctcagctactcaggaggctgacgcgtgagaattcctttaacccgggaggtggaggttgcagtgagctgagatcccaccactgcactccagcctgggtgacagagcgagactctcaataaaagaatgtgtttttttattattattagaaacaaatttctgtctgcatttaatcacaccactagcatgaaaattaactcaagctattaataatagacaatttgtagaaagggaacagagtagctaaaattcaatgcaagaagagaaacatttcaccttataccttttacatattttttaattacctattctgaaaataactgtttaaaattctgagctataggttttttcttytttttttctttctatcagttatttaatgaacttgttcaagagcaaggtcccaacctagataggacatctgcccatgtcagtggcattaaagaactggcacgtcgctttgcccttacatttggattggaccagattaagacacgagaagcagttgccacacttcacaagtgagtgagataaacactttgttatgcagaatctgatttacttgaattttaatgaaataactcttatatgacccatttttaaagtgacgatagaattttaagttataagaactttggagattagtttagagattctaaactgggaggatgtttttaatttgaaaaaacttaaaccacccatttgttcatcttacaaagtatggaaagcaaaatttaataacatattattgtctggtctgtcagtaagaaaacagtgggtttgagagactatacaggctgggtgtggtggttcacgcctgtaatcccagtgctttgggagcccaaagcaggaggatcatttggggccaggagttcgagactagcctgggcaatgcagtaagaccctgtctcctgcaaaaaataaaaatgagccaggcatagtggcatgtgcctgcagtcctagctacttgggaagctgagccaggaggatcacttaagactgggagtttgaggttatagtgagctatgattgtaccactgccctccagcctggaaaacagagtgagaacctgactctgaaaaaataattattatagaattttttgttaagactatacaaaactgatttgggtttcattattgtgaaaacagaagtaacagaaaatctttagtaaactcacacagcttggtaccattaccagctctaagaagcaaatattctggcaatgtattaataattctctgtccagggtatcttcttacctctaaaaactacacatagtgggccaggcacgggtagctcatgcctgtaatcccagcactttgggaggccaaaggaggccaattgcttgagcccaggagtttgagaccagcctgggcaatatggcgaaaccccatctctacaaaaaatgcaaaaattacccaggtgtggtggcacacacgtgtagtcccagctactcgggaggctgaggtgggagaatcacctaagcccaggaagtcaaggcagtgagccatgatagcaccactgcactccaacctgggcgacacagtgagaccttgtctcaaaaaaaaaaaaaaaaatacgaatttagctttgttgctctgtagctattttttgtatattttccccaacttacagtttcatactataaatatacacaaatatgtcctatatattcacattagtttattatttgaatttatcagattttactaccttttgtgataattttactaccttcacaaatatttgtgtaatgttagctaattgagagaattacactatctggaaaaataagttgatattttcttttacttcagggatggcatagagtttgcatttaaataccaaaatcagaaaggacaagagtatccacctcctaatctggcttttcttgaagtactaagtgaattttcttctaaacttcttcgacaggacaaaaagacagtgtaagttgcacattacaagagaagtggtttttataataatactgttgtaaatgtttattttttgaaaaatttttaatcatttggatatctttactcttgataatttaggctctgatagtttgttttaaggaattatagttttccttcaagcatttatgtagtagttatttcactgcttatcttttagtaccctagaatctgcaacatgaaattaagcaggtggaaatgatttcttattatgcagttcaaagatgtataaacactggtttagccattgtgtaactcttccttctttccttttatattaatttcattttagttttatattctatttgacttgtttcaaaagattgatttttttcatatttgctttttttgattattgataacagtttaaagaaatatatatgtaatttcaaaagaaaatcttgattgggtaagttttatttaaaaccaaaccagaaaacttctaggctgggcatggtggctcacacctgtaatctcagcactttgggaggccgagacgggcggatcacaaggtcagaagatcaagaccatcctggctaacacggtgaaaccccgtctctactaaaaatacaaaaaaattagccgggcgtggtggcgggtgcctgtagtcccagctactcaggagggtgaggcaggaggatggcgtgaacctgggaggcggagcttgcagtgagccgagatcgcaccactgcactccagcctgggtgacagagcgagactctgtctcaaaaaaaataaaataaaataaaaaatttaaaaaaaataaaaaaaaattagctaggcatggtggtgcatgcctgtagtcccagctgctcaggaggctgatgcacaagaatcgcttgaacccaagtggcagaggttgcagtaagctgcgatcatgccactccactccagcctgggtgacagagcgagactccgtctcaataaaaaaataaaataaaataaaaacttttttagaggataatactataatgaatcctaaattttataaactgttaagacagagagtcctttataatattctagctgggtgcagtgattcacgcctgtaaggaggctgaagcaggaggattgcttgagtccaggagttcaagaccagtcctggcaacgtagcaagaccccatctctataaaaaaattttaaaattagccaggtgtggtggtgtgtacctgtagtcccagctacttgggaggctgaggtcggagaatcrcttgagcccaggagtttgaggctgcacttagctatgattatgccactgcattccagcctgggtgacagcctggggagcctgtgtcaatcagtcgattttttaaatataacaggattctaaataaatagaattttggagagacagttaatacttatatgactataagtgatagttctaagtaaagatgttgatgtcatgttgatcagaaaatattcattaagcccctagtatggtcagctactgttgtaaagcttatgctctaatgccagggggcacagcataaacaggcagatggccaggctcagtggttccgacctggaatcccagctattccggaggctgaggtgggaggattgtttgagggcaagagtctgagagcagcctgggcaagacagtgagactgtctctaaaaaaaaaaaaaaaaacaggcagacaaacgagagtttcaggcactgaaatggggtaatatgatagagacaggtgttgaatattagtgggagtggtttgaaaactttttcaatacaggcatttacagctatacattttcctctaaacattaccttagctgcatcttgtaagttttggtatgttgcatttctgtttttattcatctcaaagtattttctcatttcacttatttcttctttaacctattggttattcaggagtattttgtttaatttttatgtatttctgaatttccagattttccttctcttactgatttcttcatttcattgtggtcagagatcatgcattgtattattttaatccttttaaatttattgaggcttgttttatggaccaacatacggtcttagagactgttccatgtatcagttgacaaaatgtgttaccattctggttttggttggagtttttgttctgtagatgtgtgttctgtctagttagcttatagttttgtttatagtgcttttcaggtcttcagtgttcttgttaatcttttgcttagttgtcctattcattattgaaagtgggatattgaagtctccaaatattactattgaattgtctatttgtcccttcagttctgtcagtttttgcttcatacattttggggctctcttgttaggtgtatatacttttttttttttttttttttttttttttaagatggagtctcactctgatacccaggctggagtgcagtgacacaatcttggctcactgcaatctctgcttcccgggttccagcgattctcctgcctcagccttctgggtagctgggactataggcgcgtgccaccacacctggctaattttgtatttttattagagatggggtttcaccatgttggccaggctggtcttgaactcttgatctcaagtaatctgcccacctcggcctcccaaagtgctgggattacaggtgtgagccaccacgcctggcctgtacatacatttttaattgttacatcttcctgaccagttgagtcttattctaaagtgtcattctctaagacatttttgtgtcatactactataatcactccagctttattttgactactgttttgcatggtacacctttttttccatcctttcactttctgcctttgtatctttgaatctaaagtgtgtttcatgtagacagcaaattggatcatgtgtttttaaattcaacctgacattctctattattatactttttgttttttatatgtctcctggagattttgtttttgttttttggttttttttttttttggttctttctcctttactgccttcttttatattaaatgtatgttttctagtgtagcatactaattcctttaattaatctttaattgtatttttttagttattttcctagkggccttaccaggccttacagtatacatcttatcaaaatttactggccgagtgcagtggctcacacctgtaatcccagcactttgggaggctgaggtgggcagatcacttgaggtcaagagttcaagaccagcctggccaacatggtgaaaccccatctctaataacaatacaaaaattagccgggcatggtggcacatgcctgtaatccaagctacttggaaggcgaaggtgggagaattgcttgaaccccaggggccccaggggcagaggtcgcagtaagccaatatcgtgccactgcactccaccctggacgatagagtgcgattccgcctcaacaaaacaaaatttacctaaggtctatcctgatttattctaaggaaatacagaaactttaattctatataaatccatttccttcctccttttttggctattcttgttatacctagtccatctatatatattagaaacccaataataaattgttataattatacttgagataatcttttatagaaactgagaaaagaaaggaaagccagtatgtatttatagagtttgttatattaatcttcctatttaccatttttctggttctcttcatttcttcctgtggattcgaattgccatctggtatcattcctatattcaaatacagcttctctttcactcacttttttgtgtttattgtcaaatatattacatttctatgttattgacccaacaatacagtaacatacatattgttttatatatttgctttttaaatcagttaagagagaagggataagtaaatatgtaattatacttttgtaactacctacaaattacctttactggcactctttgttttttcatgtaaattcaaattaccctgtggtgacatttgctttcaacttgactaacttcctttagtaggcaggtctgatagcaacagattctctcaggggtggcttatgcctgtaaacccagcattttgggaggctgaagcaggaagattgcttgagcccagcagtttgaggttacagtgagcgatgtaagattctcgtttgatagttttttactttcaacactttgaccatgtgatcccactaccttctggcctccattgtgagccaggtgataagaattaatcattaattttattggattttctttgtatgtagtgaattacttttctcttactactttcatgattttgtttttatccttggctttcagcatttttcctatgatgaatccatgtgtgcatctctttgcatttatcctgtttgaagttcattgaactttgtggatgtgtaaattatgtttttcatcaaattgggcaagtttttagccattatttctcctaaatttttctgctttttcgtctgctaccttggttactcccattacacatatgtcagtatatttaatggtatcccatacttctctcatgctctgttcatttttctttattcttttttctctctcttcttcagatggcataacttcttgatatatcgtcaaatgtggtgtttcttgcttttgtcagctcaaatctactgtcaagccactatagtaaatttttaattttgattatactttcaactgcagaatttccacttggttctgttttaaaattgatactctttatttcatgagagatattgtcatcatacccacttttaattagatatgattttctttagttctttgaacatacaggtgctcctggatttaagatggggttacatctaataaacccatcataagtttaaaatattgtaagtcaaaaatgcatttaatacacctaatctaccaaacatcacagaataatatagcctacctttaacacgcagaatacttacattagcctatagtttgataatatcatgtaacacaaagcctattttataatgaaatgtcaaatatactatgaaatttgtttaatactatactgaaagtacaaaacagaatgattgtataggtactcaccattaaagtacacagctaaaagcactatcataaagtaaaaaaaaatcataagtcaaagcattgtaagttggggactttgtatttataatcattgctttgaaatctttgtgggccaaggtgctgttgcttgctcttttatcaatgtatccatcacattttcctgtttctttgtacgtctcataattttttcttaaaaactggacatttggccaggcgctgtggctcacacctataatcccagcactttgggaggccaaggcggaccgatcacttgagctcacgagttcaagaccagcctgggcaacatggcaaaccctgtctctacacaaatacaaaaattagctgggcatggtgatgcatgcctgtagtcccagctactcgggaggctgaggtgggaagatggcttgagcctgagaggcagaggttgcagtgagccaagattgtgccactgcactccaacctcggtgacagagtgagaccttatctcaaaaaaataaataaataaaaagaacaaatattgcaaaaatgatatcttttgaaataataatatagctactctttactaattatctgccccctagaggttgatattattttctcgttggtcatttatttgtttagttacttggatgaacaaactccaaaatctgttttctctgccttgtgcagcctctgatgtctttgctcagatcttttttcctttgtttttatcatttgtcttggctgctgaggaggtcacccctgggttagcataagccacttactgatcaaaggttgcgcttaaaccccttagccagttaggtttaccctttactgttggatatgtgtatggcttgcaggctgctttcataattcagggtatttacttttttgacccacattttaggccagggactagcagcttggaagatacctctctgattattcctgagaaaggcagccttgggtgtgcagtcttcagacaaccagggaagcattactattttatttttaagcctggcttcctaggagttgctcctaggtgtaagaatagctgttagttcagccagtgtttggtgagaggttgtatttaaaccacttttgccagtgaagcttcctccctgtgttgatagatccgtatgtggcttggggaatgctttcaagtctgcctcattcccttccctttttttgcccatgagtgaatgcagcttaggatatgtgcatagctttcccaactcccagcacttttattttttattttattttttaaacctgttccaaatatgcttaatggataaacagataaactcacaaaatttgaaacctataaacaaaagaaacttttaagcatagcaattacttaagcagatcagtaactataaaatgttatccttctttcatataagaagaaatatgtgaaatgccaagttagctcagcaacctattaataaccaccaaagattggtgataaagcattcttccaatgctgtgatgaaaaaaaaaaaataagcacagtggaggatttggtaggctacgttcaaatgaatcaaagggagctagtgaaatgaagaatcacttgttttttagttaaaaacaaagggaaacaaatccttccttttaaaaaataatatatatttaaggtgtatatatatgatgtcttgatatacatatatgttgtaagatgatgacaacagtcagttaacaaatccaactcccaggattgactatgactccaggaaggttcttcttggctgtctctttctctggttttctctgttgaacttccggctgttttgcgctgtcatttgtygctgctagtgtcagagaactaccagcaccctctcattttcactccatcaggatctctgttgtcaacacccttaggaaaggaattttctacatttcattccaaataaacaaagtcatcaccaccaccttcctcctcactcctctctccagctgcagtttcttcttcatagtcagcctcagccaccagggagaactttaacttttatgccactgaaatggggaggagggcagaatttggatggcatggamcagcatccctcttctcccagaataacacctctggctctttgagcaggggagagagtaggtaacccctggttctcagcttgccccaggtttggaatctctcgacagggagtttgaggtggggcattcagggttccagtgttctcagcctgctgtgcccagggtagtgttttaccccaggagtggagrcttggtgggataaaaggagcttcatttttcctggttgctgttcagaatagaacttacacaacacagggctgggaggtgatgagaaatgcaaatggtatgcttctttctttcagggtagcctgggaactagagagagagggaacccccatcttcttggccacctgcctggactagatagagtttctaaaatatagagctgtagtggcagggagaaggaaacaagggaagggaacaggttgtggatcaaatgctacaaaacttttgctgttcttgctaaaatgtattagattttctttttttttttgaatggagtctccagactgtcacccaggctggagtgcagtggcacggtcttggcttactgcaacctccgcctcccgggttcaagcgattctcctgcctcagcctcctgagtagctgggattacaggtgcatgccaccacgcctggctaattttttttgtagggatagggttgtgccaggttgatctcaaactgctgtcctcaagtgatctgcccacctcggcctcccaaagtgctgggatttacaggcgtgagccacggtgcctggccagattttcttgaatraatwtttctccatttgctgtatgcccttaagagaattggcaaatactttaaattacggtattttataatttttactagttaaaatgttgttttgctggaaagagggcatgccagcctccttactccaccatcttagaaatcctgctttggcttgaacactttataagaaaactcaataatctttttgagctaaacttctgatttttttttaacattggtgtttaaaagcaaaggaagaaatataggaaagaccgtacatacatacacacccttaggtaatacactcacttgctttaaagtatcccaagaataagtgaaacaaaaccttaactcctcagtccctctctttccaaaggtgaccactgttaatagtttaatgtgtgtccttaggtattcttcagaacctgcagaaagagagcctcagattaagaaaaagtaagtgatgtatgaactgcttctctgaaaatcactgctgtttctattgtgtttctagtcattcatacctagagaaattccttaccgagcagatgatggaaaggagggaggatgtatggcttccactcatctcctatagaaattcattagtcactgggggtgaagatgatagaatgtctgtgaacagtggaagtagcagcagcaaaacctcatcagtaaggaataagaaaggacgacctccacttcataaaaaacgagtagaaggtaagtctgcctttacactataagaaacaatttgcctggttttaaagagataaagtagtaaataatcttttgaagcaagataatagtatcaggcacatgattttcttgtatattttattcacaatgagatgttaaggcaaaaaggttgaaacagatgaagtaagacagaaaagcatcaaggaaaaagaagttgaggaagcatggagcacaaaggaagacagnccaaaagaggaaaaaattagctaggtctataaaatcaatccccatactatatgcctctaatacattaaaatataaagtaagatagtcacaatgctattctattaaaattcttcctaatatagrtgagatacaggtaatttgagggtagatttctgcagcaaattgaatataccagaatagttgttttccagttctaccacttggttggaacagtaagacagtgatggcctccaggtgtggtggctcacatcygtaatcccagttactcaggagaccaaggaaggaggatcaggaaattaaggccagaaattygagaccagccygggaaacatagcaagactcccatctctaagaaaaaaaaaattttaaatgggtggcatgcacctgtagtcccagctacttgggaagccgaggygggagaatcacytgagcccagaagtytgaggttgcagtgagcyaygatcatgccacygcactccagcctgggcgacagaggaagactcccatcatttaattttttaaaaaggcagtaatggctaaatctgkttttataaccctcttggactatggggaatgggaagttaaattgtcatgaaaatctgatcaacagtaggtattcctatatgttaaaaaaaaaaaaaaacctaaaaattgctctattaaaacaaagcattcctgttaaaattactaagagaagcctcaaagtaaaaatgcttattttctcaaataatcttcatccttcttcatgcttctaataaattttctccaaaccaagaggaggtctgtgatctgagccttctctcttgttctttttataacttcttatctttcagcatcttacctgtgctgcctaaaaaaatgactaataaaggttttgctaaaatctgtggcaaaattaattagaatttaaatctaatgattcttttcattattggggaaacagtattgactgttgatgaggagtacaaattctaacatgagagttccagaattcagacctggccttctcattatcagctatgcaacctttgagcatattacttaacctctctaagtttaaatcattcatcaaatgaaggattagcagagtatttatcctgtcagttcccgtgaatattagatactacaaataaactacttagtatacacacagtactgagcacagtgcttggcacataggtagcattcaataaattatctgaacgttatcattgtatagtaatgcctcatatctatctagcatcagtcagtaaattaggcagcatctgtattccttttctttttttaaccttgcagctccagctcaaagcatctatatttcaaaaggaataaaagaattaatataaatgttactgttcaagtttaacaaaatctccacaaagtttaagatttcctttcaaattacagctttgggacttaaagtcttttttaaaagtccagagaaagaaaatataaaatcttgtctttgtactgtaggatcctggacttttctytaaagaatgactacaggcatttcctttttttttttttttttttttttgagacaggatctccctctgtcacccaggctggagtgcagtggtgtgatcttggttcactgcaacctcaacctcccaggttcaagcaattctcctgcctcagcctcccaagtagctgggattacaggtgcccaccgccacgcccagctaatttttgtatttttagtagarataggggttcaccatgtwggccaggctggtctcgaactcctgacctcaagtaggtccacccaccttggcttctcaaagtgctgggattatagacatgagccactgcacctggccttttgtttttcttttctttttttttttttttaatgagacagggtctcactctgtcgcccaggctggggtcttgtccagcctcaacctccctggctcaagcaatcctcccacctcagcccccaagtagctgggactacaggcatgtgccaccacacccagctaatttttgtatttttcgtaaagacagggtttcaccttgttgcccaggctggtcttgaactcctggactcaagcgatccacatgcctcagtgtcccaaagtgctaggattacaggcatgagccattgcgcctagccattcttcaatgtaatattcttattagccaacattcatcaaatttttgctaggtactaggaatatgttttaacatgcgttatatcatttaatcatttatttgacatatttataaagcacttaagtcagtctctggcacatagcgaatgacgtataagtgtataaatgtcttataagtcaacactgttatctaaatttttcacaaaagaaactaaagcttagagattttaactatccataatgttcattagtggtacagtcaatattattttcaagattaagagaagcttgtgtggaaccagataacctaatttgtttaaattaaaaaaagaaaacttttttgtcaatttgagatttacaaaatgactaagatgggttgcatgcacagaacccttaggctgcagagtttcatccttcagagatgaaaatgagaaagtattaaaagaaatattttcattgaggaatctttaaaggattagaagtatctatttctatttaagatgagagttctccctggagttatccattcattcagtgagtttctaccaagcgccttcctaagaactgtgctaagtactacagattaagtattaatatgctgtgagtgcagatagagaacagaaacaggctgtttgatttcaccatggtcaatgctctgatgtgccaaacacaggaggttgtgggaacatatagacagtgaccaaacttttaatgaatacaggaagattttctggaaaagatgacatgtagtagacagctgacagacgagtttaccaggttcagaacttaagtgataataatctttttatcataaaattttaagtgtggtagagaataaaagttttgaattaaatgttgaatgaaatgtgttatgaatagaagatgatgaaatgtgtctttgttaactaagaagagattgagtagtgagcttcagatcagaggaattactttaaccagacaatgggtaggtatttccaggcacagaaaagcccatctagaatgtacaggtctaaaaaaatatcagaaacctgagaaatacgaggagaaacaggatgctcgatggcaaaagaggaacctaacacacacatctctgagacttgagaggaaaagcaayaggattcatactatgtattgggattaaaattcttcagaaggaaaaccaaagcagtaatactttttaagaagccttatcatattagaataatttagaatttttataggtagaaacttggccgggcatagtagcttatgcctttaatttctgcactttgggagatgggtggatcgcttgagctcaggagtttgagatcagcctaggcaacatagcaaaaccccatctcaaaaaaaaaaammaaaaaaaaaacaactaggtaatattttatcaggacagtttgtaaataatgctttaatctgctcaaatctttataaaccatcttagctggtggcttacacctgtaatcccagcattctgggaggctgaggtgggctgctcacttgaggtcaggagttccatttcagcctggccaacatggtgaaacccatctctactaaaaatacaaaaattagctggacatgatggcagatgcctgtaatcccagctacttgggaggctgaggcaggagaatcacttgaacttaggaggcggaggttgaagtgagccaagatcgtgccactgtactacagcctgcgacagagtgagacgctgtctcaaaaaatatatatatatttataaaccattttcataagttctgaaagaaaaacagttcgtagcccctggaaaacttaagttttacagagataatttatatacatgacaaattacgtaacctgctaatgcagtatagtgtataattaagtcctaagtgagtatgaatgactgtatttcctctagaaattaaaagagaagcctgggcgtggtggctcatgcctataatctcagcactttgagaggccgaggtgggcggatcacctgaggtcaggagttcgagaccagactggccaacataatgataccccgtctctcctaaaaatataaaaatgagctgggcgtggtggcgggcacctgtaatcccagctactcgagacactgagtcaggagaatcgcttgaacctgggaggcggaggttgcagtgagccgagatcacgccactgcactccagcccgggcgacagagtgagactccgtcttgaaaaaaaagtttaaacaaagaatggtaagtggggggttgggtaggggtaatcagggaaggcttccctgaagtacagaggcatgaaaatggtgaacctttcaacccatctccacatgtataacctggcaagaagttactgaccagtgtctagttgtgcaaggggatttgcttatttctccacaaaagccagtcagactttaattgctactgcctgggacccctacgaggcccaggaaataggccctttattgcttgaacaaagaaaagaggagaggtctctggctggctgcaatcttccccttctaggatgaatgaatctttagagatggagggacttaaagagatgatgatgtgatgatagctaacattcagtggttacatacattacctcatttagtccctacaacttcgtgaggttaggtaatgcatccccattgtatgtatgagaaaactcaactttggaagtttaatgacttacacaaagtcatgtaagtaagtggtggaactgagatttaaagtgggcagtctgactgcagagccacactcttcacaagtctatgctatgactgctaccagagttcactccacccacgacattgtgtgaccttaactggaattttacagatgagagtctggataacacatggctaaacaggactgacaccatgattcagactcctggccccctgccagcaccacaactcacatccactgtactgcgggagaacagtcggcccatgggagaccasattcaagaacctgagtctgaacatggttctgaaccagactttttacacaagtaagtagcaaaaatttgtctttttcacaaaaagcctttaaagaaagtaaaactatttaagaaaaactttatttgttcatcagaacatattgctggtcagttcatgataagccacaaacggagggtaaacacttcatgtgagaagagctayaaaaagtctgtaaacattgttgaagataccagttcctggaagtttacagacctttaaatgtacggtgtctcaccaggtgctaatttcagttggcatgtgcattttcattgggcaggtctgtttcttctcagggacttaccaagaaatgcaggttacttcctaggcaagaaaacctgtaagagcctatattaagttgtcagtagtctggacaccaaataaatagactgtatttagctttatcatccatttaattaatattttgtcttgttacattttaaactcaaacttctcatggattaagaatttttaagatcttacttgataaattctgagaatagttgccctcaaagagaaaatcaaggtcttacctttcctccatgctagtaattaaaatgttttctagtacacagacctctgaaaattgtagagaaggcagagggtgatggcgtgttttgcttataaaaatcttattgttgttttccatccaactttgaaattctttgagctcctcacttgtgtttctgtgtatagttgggtaatgctgtgaattactctgatggataagagggagaactctcatttgaactcaacaaatttagttaggttgaaaatagagacagtgttagaagtatcaaatcctgggttttcatgatccctttgctctaagggatcagccttcaaacccaagaggatactcactgtcacccatggtataactgggcattcttgtgctgccaagtatcctagaaggtggtttgccttatggcaagcatccgaagatgggtgacctaaccaatatccccacccctcttcctacagggtgggtttctccttgttttagcagcctgccttgcccctctgaccctaccatttgtcattccctgtggccatggtctgccttcttttccctgctccaggtttataggtttaatcaaggtggtggccccacatgatataaagacagctacttagagacaacttcatgtgacagtttgtattggctaaaaaaccmctaaagtttacatcctataaatgtatgggtatggtggcacacgcctgtgatcccaactattcaggaggctaaggaatgagaattgcttgaactcgggaggcagaggttgcagtgagccaaaatcgcgccactgcactccagcctgggtgacacagactctgtctcaacaccaccaccacaaaattagccaggtgtggtggcgcatgcctgtgatcccagctactcggaaggctgaggtgagagcagcactggagcctgggaggcagaggttgtagtgagctgagatcatgccactgcactccagcctgggtgacaagagtgagaacctgtcttaaaaaaaaaaaattcctggctgggcgcggtggctcatgcctgtaatcccagcactttgggaggccgaggcaagtggatcacaaggtcaggagatcgagaccatcctaactaacatggtgaaaccccatgtctactaaaaatacaaaaaattagctgggtgtggtggtgcacgcctgtagtcccagctactcgggaggctgagacagmagaatcccttgaaccagggaggcggaggttgcagtgagccaagattgtgccactgcactccagcctggrtgacagagcaagactccatctcaaaaaaaaaaaaaaattccttagaggcatgtttacacacacttccatgtgccaataagtttagagtacaagtgcagatttgactccataaagactgaggaaaagatgctatattcttccttgttgaattctggagaactttcagctgccaagccaacataatttctgttagttggggatctgctgtccagctaggtacacctgtgagtgcggcaccagcccaaaacagaggtctgagaacccttgtttggcagagatttggttgatagtttaagcatctaacaattagcctcagccagcttctcttggagacttacagatatctttgggcaacttattgccttttttataaaaaggcaccagaataaatccagctaattcctccaacatgggattaagtaaacctaccttggctttcttagcttggggctcattagctaaattcatcatctgctgctacaaaattaataatagtaccctctcttagtcctcagatgcagatctcttggttaggccagccgaagttagaagacttaaatcggaaggacagaacaggaatgaactacatgaaagtgagaactggagtgaggcatgctgtgtaagtgttacatggagtatcacaagaacataacaactatgtgatgcccatcattttgtgaaatgacttgggtttctttgatgtttggtcttaggagttaaaattataattcgtgatatgctatgcagcataggaaaggagggygtgagttcttaacactttcagcatttaaatcctagctctgccacttggcagctgcatggccttggacaagctctaaaacatctgtgctggctaggcgcggtggctccgcctgtaatcccagcactttgggaggccgaggcgggcggatcacttgaggtcaggagttcaagaccagcctggccaacatcgtgaaaccccgtctctactaaaaatacaaaaaattagccgggcatggtggtgggcgcctataatcccagctactcaggagggtgaggcaggagaatcgcttaaatccaggaggcggaggttgtagtgagtcaagatcacgccactgcactccagcctgagcgacagagcaagacgccgtctcaaaaaaatctgtgcttcaggttcctcatttgtaaaattgggataatactaccaataagatttttagggtaattgacacataaataaatgttaacaaccgttattattgaattgtacttccttttgatatgtgagatgaaatcttgaatgaaccaaaggaatgattcttaattgtcttggaattcagtctaatttgtgtagtctgtaggtcatgattagaaggtatacttcasttggttagaataactttaatctgagaaacagccaggactccaaatggtggagtctgatgagctttctgacaatacytttttcttaccagtcggggtctaatggaggaagatgctgagcccatctttgaagatgtgatgatgtcatcccgaagccagttagaagatatgaatgaagaatttgaggacaccatggttattgatctggtagagaaattcactatatttttcttttgttaaaatatgtgggggcattggtgtaagatgatcctcttaggccgggcatggtggctcacacctgtaatcccagcactttgggaggctgaggtgggtggatcacctgaggtcgggagttcgaaaccagcctgaccaatatggagaaaccccgtctctactaaaaatacaaaattagccaggcgtggtggcacgtgcccgtaatcccagctacttgggaggctgaggttgtagtgagccaagatcgtgccattgcaatctagcctggacaacaagagcgaaactccatctcagaaaaacaaaaaaaaattatcctcttattctcagaattctgggaggaagggtgaggtgaggaggaggtgacactgatcaacaacagtgggcatttggatgagcttgggtgttcttcaagcctcctttcaaagcagtcatattttaaattctgataataacagaaactggttctttctttttaccttctttgaagagagctcataccagatctttcagcgtcactgtgtatctggcctcttgtgctttaaatttgagcctgacaaaaatccacggtgcttcagcataacaaaatgccgaatatgggacttctttgttcagtatgagaagacatgtttgagatatggacttaaccataggtgatactaagaacttatttcttcaggaatagtaatgcatggtgtttatgtttttttcaaaagttctcatcagttatagacaacacattgtagtagttataggcagaattacatagggaaggaaaaacagtgagactcagtggaacaagactggccaaatgtttgacaatttttgaaactgggtgatgggtacatagaaattaatcatgctgctttttctgtgtattttctaaggctgccataataaataccacagactgagtgggtaaacaaatttttatttatttatttagagatggagtctcgctctgttgccaggctgtagtgcaatgctgcaatctcggctcactgcaacctctgcctcccaggttcaagcgattctcctgcctcagcctcccaaatagctggcactataggcacatgccaccatacccagttaatttttatatttttagtagagacggggtttcaccatgttggccaggatggtcttgatctcttgacctcgtgatccgcccacctgggattacaggtgtgagcgaccatgcctggcccagaaatttattttttttatcacatttctggaagctagaagtcctgagatgaaggtgatttcttttgaggcttctctccttggcttgtagatggctgccttcttcctttgtctttagatggtctttcctatatgtgtctctcctcttcttatcagggccccaactatattcaattagggcccacccatatgacctcattttaccttaattacctctttaaaggccctgtcgccaaatactggcatgttctgaggtactggattaggacttcagcatcatgcacattttgaagggacataattcagcccgtaacattttgctttgtatgttgtgaattttccataatgaaaagtttttgtaagttttgtaaatataaatgagatcatattactccaatctataatctccctgcccccaccttccaataactttccatctacctgctttggggaattcacagaggtttatcacctagtagttaatgaattctgtaatttttctgtgactttaaagggaagatatggcctgggcatgtaggcccaaagttatttatatgtattaacatgttgtttattcatgatagtttgaaagttttgtgccttgtttttgccaacataattaaaagccaaaagtactgtttgtttttaaaaaatctatttcatataaaagccagattctcttcttcctttcaaaattgactcttagcagttccatatatttatgatactgtcagaaatattagctgattatcacaattcattgtcttaatgatctcagaaaaaaattaagaaaccgatttctctttccagcctccatcaagaaatcggcgagagagagctgagctaaggccagacttctttgactctgcagctatcatagaagatgattcagtaaatgtcaaattattactgctttttatttatggttcctgggtcctgtttatgcatgaaattaataattatgtttctcatcatttttctagggatttggaatgcctatgttctgaagtctgaagaaaatttacaaatctggaactctattatttagagctagaggcctatatactgtgatagcttgtatggggaaaaacacttttgatgtgatctgatttgttttttaatcaaatgattaaggtcaatccctttttgcagtgacagaagaggagcatgtaaattacccaagggaatgttggtgaatgtcaactcagaaagactgacctgaaaatcatttgtgtcctactrttggacttatcccaatacagatgtgtgtgtttttctggagggaggaagaaattttaaatttttaaaacagctgtcaagataaacactgttatacacctgttttatgaaaactcaacattgagtaaaaaaaaacatatttttaactttattttcctgttgtacaatttaaaaaccgttttaacattttgcctttttatgttttaaaagctaaccatttttattaaacctatgagtaagcagctcatcctaattgcgaagagtgttttggagttcactggatttggttgacctttgtggaacacaaataatgaaggagcagaacattgacaagctaagatgaaattctgacatagtacatctctgccaaaaaccacacaccctctgtggatatggatatgaattcccagattttatatactcttgaataaaaggtttatttttatttataagtgggcataaaataagaaatgtccatgcagccatttttccaacagatgctgtacaccgttcattttatatagactagggagattcaaatacagtgcattttctattggtatttgttctgtgcatttttagcaacttctaccagcaaataaagtattctcagtaaaacgaaaatgattctcaagttatcagtttgctgtttttaccacttatttcatgccctgccaaattcaagttacacagacttccattttcttaagataatcaatcatgaagaaatcctttatcaatcattcaaaagtaattttaagtgtaacataactgtgtttacttcccatgcacttaatacccttatgcgctaattttgtgaattaagtttactgattatagaagtatgtgctgcatagaagtctgtgcttagagggtgaagttcctaagcttaccttgaattacagctacatttcagtgttaaatgtgcatattaagaataattcttttggggaaagaaattatgaatcttcaggacagtctacaatggtttagagttacattctgcctagacttttatgacttgctgctattgttttaaaaaccccacttagtctctctcttcctttctgatttctaaagtaagcctcagaatttccaaaccaattcatccacagctgtttctgggctggtttttaaagtagctgcaacagaatcatgaggctttccctttttatcaaatacgaaaaacattttttaaaattctgcacacccagtgatcatcttttgtgcgggaaagcaagatgatgatggatgattttattcatccttttagtaaagacacaaaacatttttctcaacatttgtacagttctgaaaaaaacctggtcaccaaaaatatcttctctgctaattcagcaattcttgggctccagttaggggagctggggcctcactttctcccagrattgtgggcttcactggaagtgaaggtgcaggaatgactggactgtccaccccagccctgcctgcctgtggttttggccagggagcaagccatgaggtgccctggcacatgcacaaattgatccttygcgtgacagtcttgtatggaaaacagatgctgacagaattgtagactaccatgccacacaaaaaggctaaatatctactccaatgggtttccagttcagtttgaagtcaatcaaatttttgtattttcggtgtctccttgattggttttgctagtaattctgtaaattgtacatttgcaatatgaggttttttttccttttgtacaatttgaaactgatgcttcacctttcctttaataaactattcaaaatcaggcttgtggtagtcatcctattgtttctaccaggtatggctttaaagagatgattttctgtcctgtggctcttgagagagtttgcaatttctgataatctgttaaatggcagcaagttaaccttattagtgagttggtggttttgttgttttggctttttaattttttttaagaaagcagaatttaggaatagctcactttctttcattccttagatttctctggagtgtgtgtaggccaagtcatctgtggtttaagagggagtctcttgcaaactgagttttgcatgaggcattcagggaacacccatccactggcctgtagcatgggtcctcacggcttgagactctgggcttacatgcataattgcaccctggcagtgcccttttgaagaccacatagagtcaatgcagctacagaaatgaagttttcagccaggcatggtggctcacgcctgtaatcccagcactttggaaggccaaggtgagtggatcacttgagctcaagagttcgagaccagcctgggtagcatggtaaaactcctctacaaaaaatacaaaaattagctgcgtatgatggcgcacaccagctactcgtgaggctaaggtaggaggatggcttgagcccacaaggtggaggttgttgcagtgagccaagattgcaccactactgcactccaatctaggtaacagagccagactgtcttaaaaagtttctcttggcattagacctcctcactctttctttaagaagtcataccctacacacttcatgggtctggcaatagggggtgagttccttaaatggcctaatatgcctatgcaaaaaaggcaaaggtgtgggagacaaatcagcaagcaagctttccagacagccaaggaaggaaggtcatttaaggatggtctgtaacagctcatctwgatggttacaagagtatgagactagatgagcactttcaggcttgggtcaggcttgcaaatctcccatttgtggcttgactgtaactccctgtttgcccctgttcccaggtaacagtccatcaagcagggactagtatattcatgggaaacaaaggtttgatgccactcaggcttgccttttttttttcggggggggggggggggcggtaagtgaagacagggtctcggtctgtcacccaggctggagtacaatggtgtgatctcagctcacagcaacctccgcctctggggttcaagagattctcctgcctcaggctctcaagtagctggaattacaggcacccaccaccacgcccagctaagttttgtatttttagtagagacaggctttcaccatgttgcccaggccggtcatgaactgagctcaagcaatccacctgccttggcctcccaaagtgctgggattacagggcatgggccatcgcacccagccttaggcttttcatactagaccaagctcaggtaagattctatccctgcccttctgagtgtcttgttctgtggagatctccatcaggcaccactttttgaagagcatctttctgctcccaaggacacataaagggagtattttcaccacccaggacagtagggacatggtcaaaacttaactaactattgaggctgccacattggctggaatatgccagctggattccacagaggccccagactgaggcactgcctatcaagtggctgcaactcctgcttggaattgtagaaatcccatgctgacatcagaggtgcacagagtatgaggaccaatacttctaaaagggtaaagtcatagctctccagaaatcctttggaaccagaaagacaaaacagtcacatctgttgaataggtgaagagggctgattcatcaactccacatgtgggtgagtatccttcacagacttctttggctgagcagaccacatcttaagcaccagcaccaggacaaagtatcagtgcaaccagaggcagaaagttgggctggggagaccaagacagggtcaaaaaaagaagctagaagaactttgcaacaaaagcactttctaacaagcattagaagggtgtattgtggatgtgctccccattactctagcaactcaaaaagatgactggccatctgttggtactgctttgcaagagaatcatgcgggagataggaaagctgtctaaatgtagtagctttctgggttaagacaagcccaggggaacagaccaccaacctccctcacccctactcttaggccaacccttagaagtccatctcaccttcctcatcagctgagtggtagtactttgaaatgatcagaacacaggcttggctggggtcaaacccatctgagttcaaatcccagcttcaccacttgtcagctgtgtagctcaggaggaactggattaacacaaggcggggcaggaccagcaagaccctagcagtgcttcctacaccacagctcaccatattatctgctctcagtttaaagacagacacttgtcagctatcagctcagtggacccaagtatttcccatttacaaaattcagtgtattttctttttccctttaaggtgagggcaccagctggggaaggcattcccacacaagagaacactcaactgtcattactctcaaggtattccgtggtccatggaggctggtccacttgacaaagcttccaaggtcttgtggctttgagtttctttgaccagctgagtttctgtacgggagtttccccaccatccaaggcttccgtaaagctgctagcccagctgctctcctgagctggttcctctaccatcttacagcccctctaccatctcggtgtccagactgcacaacctggtgaaacacttcttggactcttacctccaaaaagaaaaaaaagagcttgtatgtactcttttatggaccatagcagagatcacgaaaacaagaactgtgggctcagaaaactcactaggcaagcaagggagggacagactgtccaggaccacctacgtgggctaaggactctggagaacagggagctctggaagtggcgctggagcagaggaatgcaacaaaatctggatctggagttagtatggtagctgagaacaggacttccagctcagtgggaggccacagagatcagtgaagagactgctgcaaaagtcctcagagcccaactaggattggtgactgaaggagagtggaaagatgctttaagaaaaaaaaaaaaaaaaaaaaaaaaagaatgactcttaagggctactgggaatggggggtaggggaaaatatttttgaaatgggaaaagtggagaataaacagtcacacattaagttgaccttgaaataatgattcactgtccaagcagtgcttacagatctctggagccaagggaaagccatcagtagtgggagggccctggggtttcaccagagaggatgcctgaggtgggggggcatcttggatcagcactccatggttggtacttctgctcaaacttaatctccagttcggtaaaactattaatgttttaacttagtaaaatcaagtcaacagtgtaggaggaaaggctttaaagtggtttacaaacaaaaaggactaattcatattgataaccactcagttactaattgaggtagcttaaccatgtatcttcagtttaaagacaaaatgaactacaaagaagtcgtgaactttagaaggtttattgttgatagagctgtagtgattctgaaacttgtatttatggtagcactgagcaaatgagtgaaatatattgagaataatgggagccagggttattactgctgtggtaagagagacaatacagaatgggggaaggcaaagaagcacccatggtgttggattaaaagtttcagtatgaactcatgatttaaaagtatgataaatatgtattcatatatacatgtgtcccacatatatatacacacacttatttgcataaattttcctagttctgtctgctgaaatgcctcaaagcaatgatatccagtatcagtgtgaatacctagtgccaattttagcttctaaatgacatacctactaaaagaaactaagaaactactatatactactactacatacctattaaagaaactccttggagaaactgctgattcctgggctgggcaaggaaaatacaagataagcctagagcattatcttgtcagaaaataacgaaatactaaaaaaatcagtgggatatattaaaagcactttgggaggctgaggcgggcagatcacgaaatcaagagatcgagaccatcctggccaatatggtgaaaccccgtctctactaaaaatacaaaaattagctgggcatggtggcacacacctgtagtcccagctactcgggaggctgaggcaggagaattgcttgaacctgggaggcagaggttgcagtgagtcgagattgcgccaccgcactccagcctggcgacagagcgagactccttctcaaaaaataaataaataaaataaaataaatcaagtccaaaatgatactaagaaaacaaaaacaggagaaaagaaagctcccttccttacctagagttccaactaataaatatgagagagttagaaactcaacattttataatcaatgcagaatcattgattgaggcaaaaatcatcaatgaatactaaaattattgggtgaaagtttatttatttaattttctgagacagaatctagctttgtcacccaggctggagcacagtggtgtgatctcggctcactgcaacctccgcctcccaggttcaagcgattctcctgcctcagcctcctgagtagctgggcatgtgcctccacatccggctaatttttgtatttttagtagagatggggtttcaccatgttggccaggatggtctcaaactcctgacctaaggtgatctgcccactttggcctcccaaagtgctgggattacaggcatgagccactgcgcctggcccaggtgaaagtttattgacagacaagattaaataataccccacaaattagttatcagttacaaagagaaaatggtaactaccatggaaaaacctttgcagccacgaccttaaccatgtgatcagaatcagttaccaacaggaggaaaaactgacataatgtgcttactaatgtgacgcactgaaaggaatatgtgttagtcttatctgaatctaaacctcaggaaacagacatcccaaactgaaggacactctaccaaataaccagcaagtaagctctcctcaaaaatgtcaacgtcatgaacgacagactatgtaagacaaaggaccttgttcctaggagatacaagtttctaggaacacagggtcacgaatctgcaactgactttcaaaggggtcaattaaataattatattgtatatgttatacaattatataattatataatgtataaatacataatataaatatataaatatatataatcatgttagatataattatacattaattatattaataatataattagatatatcttatatgcatattatatattattagatatatctacgtatggaagaaataaagcaaatggagaaaatgttaccaactggagaatctaggtgaagtggatacaatacacttcttgcaacatttctatcggcttgaaaattttcgcaattaaaaagtttttttttaattttaagaacacatttctggaaataacctgagtcaacatagggtgctatgccttattgagcatctgtactgctaaacacatataccacaattgcaaacatcacatttaatcctcaattcatggaggaattaggagatagatagggcatattaccctatttttaaaataaggaaacttaagcctaagaaatactttgccttaaaaacttactatatatctcacctatggataaaaaaactaactcgagaggaaaaagaacaatacccagaggtgtgaaataaaaatcagctctagatgataacactgtgtactatttttctttctagttgtattgatttttcagatttccacctaaaaaaatcgaatttatgctcaaaaaatacaacttaaaatgtttaaaaaagtaaataattttacagtaaggcacaaaagagatctttctagaatttaataaacttagttattctaagttatccaactatttggattcccaggtttcatgattgcaaaaggcaggaatgggatgtgaatgggcagacagtaattcagttcttggtttcttttcctttgatttgtttacaatggaatatttgcatgttttctccaaggacgttgtaccttcttgctggccaagacatccaggtcacagcagattcgggcacgtgtggaagaaggttggatgatgtcatccacaaaccctggtgaagcacagaaaagggagtggatcatctgcatcccgagatgatgccacccctcaaccttctgctcagcctgggcaccatccctggggccagcagtataagcagtgcccaacctgatacagagatggtaggccctgtgaattcccccttgtatcccaggagctggcctgttctgacagctccccaacttctggcctaggagcacttggcaagaaaaggaaaatcggacaccctccctataccctgcttgctccaatgcctccatcctgccacaatgaattcaataggaaataaagaaaatacatctaggttttcaaaaatggctataacaattcatccttgtacacaagtcctgcaatgtgactttaccacttctctcttcaagaggtggatttgtattccttcgcttaaccttgttgagttttcttggcctataaaatgtggcaaaaatgacactgtgcaacttccaaatctaggcctcagtttccctttgcccccttgctactctcgggacaccatgtaaggaagcctggactagcctcctcaagggtgagaggccacgtggggagtgagtctagctaacagcaactaccaagtaagtgacgccattttggactgtcaagccccggtcaagccacagaatgactatacctgtgtgggtgatcccaggcaagaccagcacaagaaccactcagctgggcccagaccaaattgtgga

SEQ ID NO: 96178 - DNA, 38753 bp, Homo sapiens
  misc_feature (1)...(38753): n = A,T,C or G
tgcagtctcaaactcctaggctcaagcagtcttcctgttttagcctcccaaatagctgtgtgccaccatggcccagctaattttttattttattttttgtagagatggggtctcattatgttgcccatactggtctcgaactcctgcctcccaaaatgttagtattacaggtgtgggccactgtgcatggcctgccccttactttttatatggattcctatttttaatcttgaaaagatttttttctttctccaaagatgagggggtagaaaactgttgtaatttttaaagttgtaaactaggaaactttttgtagccctgtcctttctagatagattacctgtagcttgccatgggtatggtgtttctgtgattgagagtgccctcttatggtgacacaaaaattattcaggaagtgctagagtctctggaagttttttaagagggtgtgtgcgacctcaaacctaggtctggcccatttgtagtttaagtgttcccatggtatttgccatccacagctttaggagagttgaaagatgccatttccccaaacgaaagtaatctgttaaattttttatgtaccctaggtggaacggccgccttctccattctccatggccccacaagcttcccttcccccggtgccaccacgacttgaccttctgccgcagcgagtatgtgttccctcaagtgcttctgctcttggaactgcttctaaggtaaagcattttccattactgcagtttttggattctttgctgtgtactagtgggtttttactgatttgctttcaccctgcttccacaggctgcttctggctcccttcataaagacaaaccattgccagtacctcccacacttcgagatcttccaccaccaccgcctccagaccggccatattctgttggagcagaatcccgacctcaaagacgccccttgccttgtacaccaggcgactgtccctccagagacaaactgccccctgtcccctctagccgccttggagactcatggctgccccggccaatccccaaagtaccagtatctgccccaagttccagtgatccctggacaggaagagaattaaccaaccggcactcacttccattttcattgccctcacaaatggagcccagaccagatgtgcctaggctcggaagcacgttcagtctggatacctccatggtgagtcttaattttgaaactatctaacctgttaagaaatatgtgtgggccaggcacagtggctcatgtctgtaatcccagcaatttgggaggccaaggtgggtggatcgcttgagccgaggatttcgagaccagcctgggggacgtagtgaaaccctgtctctacaaaaattacaaaaattagctgggcgtggtggcacttgcctgtaattccagctactcgggaggctgaggtgggaatattgcttgggcccaggaggccaagctttcagtgagccatgatggcgccactgcactccagcctaggcaatagagtaagaccctgtcttgaaaaaaaagaagaaagaaaaagaaatatgtgtggatagaagtttatgggttgaaattttgtgataagttttatatggaattcagagatgctataacataattcctaccctcaagaaatatggctgggcgtggtggctcacacctgcaatcacagcactttaggaggccgaggcgggtggatcacctgaggtcaggagtttgagaccaccctggctaacatgatgaaaccccgtctctactaaaaatacaaaaaattaactgggcctggtggtgggtgtctgtaattccagctactcaggaggctgaggcaggagattcatttgaacctggaggcagaggttgcagtgagctgagatcaggtgattgcactccagcctgggcaacaagagtgaaactttgtctcaaaaaaaaaatgtgtatattcacagaccagatgaggcagtttgtaaatattgcagtaaatgtcctttcataaatgccatttgtaatctaactagaaaacacttaagttttagagaaataagaggttattcccagatagggcaatcatgagaactttatagaaggagtggcatctgagatctgaagtatttctttggaaagtggatacggttttcagattgataacagccacaatgacagaaatgcctaaggtgtattgtggaatgatgattaggttattttaagtagagcagaaattttgtcagtaggagaaagaactggaaaggaacatcacactagattagagagagttgaataccctctcccaaaagaattttaatttgtatggtaggaaatgaagagcatttgaagggggtaggttattggtcctttgtctaaatatgcaagaaagggtccagaactgagaggtgggagaggaatatttgatgttttgttcatttatgcacttaacaaaaagtcttgccctcacaaagtttatattctaatgggaggaagatggaatataaacatgttaattgaataacatagtatgttcacagtcacaagtgctatggagaaaaatagcccaaagaagggtatagagaaagctggcataggagtgggaggtatgtgaagttatagagtacaattctgagcagaaacctgtagcagtaggaggatgtgccatgctgatcccaggggagattattccaggatgaaggaaaaagcaagtgagtttgggagagactgaagaataacaaaggggtttaatatagccagtactaaatgagcaagagagagaatcattgtttatgagcagagtgggcagccagatgattaggtcgaagcctttcgagagcatgaaataaagacttgttaaggcttgaaaagcagtcagtgggtggaaaaaaaggtaagtaccacacgtgcactgcatgcgcgtaaaaacgaaacttttacctggctgactgttgcatttgaaatgagcagttgatggaagcatcagcaagtaggcagtcagaaatccaaggaggcagaatgggaagagtgaagttgagaagtgttgtggcactaagtgaatggcatctcttggttgcagagaaagggtaatgctcaagtggtacctgtggggtggatagcctaattagtgagtgtggattaggtttgactttctggcagcatcagtatagaatgaccattttgcgtttggatatagattatttaagatactaatggtatttgtgtagatagccaatttactcaaatctttttagaattaaaccaaaaagttcatttccctggctctttctagatctccacctctctaaactttacatttgaaggttcttcggagccttaaggcccctaagcgtttggtcagatgtgataacccctgggcatggcattgagagttaggtttgtatctgttattgttattttgaaaaggttcaataagagcagaggctcagctgtggtaagaaagttgtttttcaacacttttctttactttccagagtatgaatagcagcccattagtaggtccagagtgtgaccaccccaaaatcaaaccttcctcatctgccaatgccatttattctctggctgccaggtaagtctgctaaagctatattttgtacagtggagttgttacttgtaaaaagcttacttgcagaaaattgagaaaacccagaaaagtgtaaaaaagaaaataaaaatctctgcaccatgtagaaatgattatattttatgttttagagtatttccttcttttcctttttctgcatatgtgtacctagatctgttttgctggggcctgtcaattttattaatattttcaaggaagtaattttggatatctgccatctgtttcattgctctgcgctctttattcttccagctttctttaagtttaatttgctgttttcctagcttcatgaaatggacgctgtgttgatctgctcaggctgccatgacaaaataccacatattgggtggtttaaatagcagaaatttattttccctgagttctggaggctggaagtctgagatcagggtgcctgcatggtggctttccggtgagggctctcttcctgcatctcactatgtccttacatggccatcctcagtgtttgcacagacagagagagagagagagagcacgcacaagctctctggggtctcttcctataaggacaccaatgctactgggtcctcctattcttatgacttcattcaaccttaattacatccttagaggccccatctccaaatacagccacccctcagtatatatgcatgcaggggattagttccaagaccccagcatataccagaacgcacatggtcgggtcccacccttggccctgtggaaccacatatatgaaaagttggccctccctgtatgtgggctctaatgaatactgtatttttgagccaaacttggttgcagtcagggaacccaaggatacagaagcctgactgtgtttattgatgaaaatctatgcgcacactgagaataagggcttcaacagatgattttagggggaacacaaacagatgttttacggtattccacccattttgatatgtcatattttcattaagttcaaaatacatactttttctatgtgtaatttcttctttaatttatgagttactcatatgttgcctgattttcatacatttgaaaattttctagttatccttctgttactgctggctttattccaatgtggtcagaaaccatactgtcagctagtttatggtaaaatttggtaatttgtatcaccctcagttcctaagaatgtgtattttgcagtttttgggttgtagcattctatataagttaatgaggtcaagtttgttaattgtgttaaatcttgtatctccctagaatcttttttaaaatttctctgctattggataactgagaggagaatgttaaattctccacctatgactgtggtttttttcttttccttttagttatatttatttgtgttatctgtatatttagcctatgtaattggggtacatagaaatttagaatttttgatactaagtaagtttttattataaccaaatacctcttttactctgtagttctatttcttgcctgccttaagtctgctttgccatatatgaaagtggctacatcacctgtcttttagtatttgcataacctctgtattataccatttcactcctctatttttttttttttttgtaatatggaacgcttgatgaatttgtgtgtcatccttgcatagaggccatgataatcatggtaatcatctctgtatcgttccagttgtagtgtatgagctgctgaagtgagcacaactccttctattctttaatagttatcaagagattccatcatgcactcttgacttactagagtttgtttcatttatttatttaaagatagggtcttgatctgttgcccaggttggagtgcaaaggctcaatcatagctcactgcagcctcaacatactgggctcaagagatcctcccgcctcagtctcctgagtaactggggctccaggcattcgccaccatgcctggctaggtttttaattttttatttttaatagagacaaggtctagctgtgttgaccaggctggtcttgaactactggtgtcaagagatcctcctgtctcagcttcctgaaatgctgggaaatacagatgttagccatcacacccagcctacagagtattttaaatcagcatctctgtttgttgcccaggctggagtgcagtggcgcagtcttggctcactgcagcctaaacttcccaggctcaagtgatcctcctgcctcagcctcccgagtagctgggaccacagatgcgaactaccacactcagctaatttttgcattttttgtggagatggggttttgccatgttgcccaggctggtctcgaacttctgggctcaagaggtttgcccgccttggcctcccagagtgcagggattataggcgaaagccactgtgcccagcccacttttaattttttaaaaagatacttggctgggcgcagtggctcacacctgtaatcccagcactttgggaggccaaggcgggtggatcacatcaggagattgagaccatcctggctaatgcggtgaaaccccatctctactaaaaatacaaaaaaattagccaggcatggtggtgggcacctgtagtcccagctactcaggaggcggaggttgcagtgagccgagatcttgccactgcactccagcctgggcgacagagcgagactctgtctcaaaaaaaaaaagagatactttcactgaatacagcatctatttttgttttgttttgtttagtatgttttgttttgagacagagtcttgctctgtcacccaggctggagtccagtggcacgatcttggctcactgcaacctccgcctcctgggttcaagcgaatctcctgactcagcctcccaagtaattacaggcacacaccaccatgcccagctaattttttatttttttattttttagtagtaacagggtttcaccatgttggccaggctggtctcgaactcctgacttcaagtgacctgcctgcctcagcctcccaaggtgctgggatttataggtgtgagccactgcgcctggcccagtgtagcatctgaactgaagttgttttctttcagcagtttaaaaatatcattccactctcttttggcttccattgtttctgttgagaaattagccgtcagccttaatgttactcctttaaaggtaatgtttcttggctgtgagtggtggctcacgcctgtaatcccaacactttgggaagccaaggcaggaggatcacttgagtctgggagtttgagaccagtctgggcaacatagtaatactcccatctttacaaaaaatatcagccaaccatggtggcacacgcctatagtcccagctactggggaggctaaggtttgctggagcccaggacgttgaggctgctgtgagctgtgatggcactacttcagtccagcttgggttacagagcacgaccctgtctcaaaaaaataaaattgaaaaataaataggccagataaataggccaggtgtagtgcctcatgcctgtaatctcagcattttgggaggccgaggcaagcggattgcctgaactccgggtttgagatcagtttgagtaacatggcgaaaccctatctctatgaaaaagatacagaaatgtagctgggcatggtggtgcacacctgtggtcctagctgctcaggaggctgaagtgggcggatcacctaagcccagaaggtcgaggctgtagtgcgccatgattgtgccactgcactccagcgtgggcaacacagtgagaccgtgtctcaaaaaataaaaatatatatttttaaaaaaatgataatgcttattttcctagctgcctacaaaacgttttcccctgctctgggtcccagcagttttactgtatcttcctttgtggttttgtttatatttatcttttaatccttcataagttttcatactttttttttcgagacagagtctcactctgtcacccaggctggaatgcaatgctgtgatctcagctcattgcaacctttgcctcccaggttcaagcagttctcccacctcagccaagtagctgggattttaggcatgtgccaccatgcctggctaatttttgtatttttagtagagatggggtttcaccattttggccaggctggtctcgaactgctaatgtcaaatgatccacctgcctcagcctctcaaagtgctaggattacaggcatgagccactgcaccctggcctccttttctttttcagacactaactagaaccaaacctccgtaagtttggtaaagtttatttagtttgtgatatgtttaatcagttttaggacattgtcagccacttttcctgaaaacagactgaatattgcagtccctctttgtcctcctcttctgggactaccttttccggaatgttagaccttttcactatgtctccgagagctcttatgctgatgtcttttttttttttyccattatttttttcttggcatactttattttctttttttcttttctttttttgaggtggagtcttgctctgtcacccaggctggagtgcagtggcgcagtcttggctcactgcaagctccgcctcccgggttcatgccattctcctgcctcagcctcccgagtagctgggactacaggcgcccgccaccaagcccagctaattttttgtatttttttagtagagacggggtttcaccacgttagccagggtggtctcaatctcctgaccgtgatctgcccgccttggcctcccaaagtgctgggattacaggcgtgagccactgcgcccggcctattttctttgatttttaaatttattcagcctccctagtaactgagactatagatgtgtgccaccacacctagctaatttttgtattttgtgtagatacggggttttgctgtgttgcccagttttatttttcgatacagttgctyctcaacttaagatggggttatgtcccagtaaacccattgtaaattgaaagtgcattttgacttacagtattttcgactgggtttttccaaatattactccattgtaagtagagaagtgtatttgatgtttattacttttgcaccmttgtaaagttgaaaaattgtaagttggggatgtctgtgttgtatttttaagttctagtatttccatgtgatttttaaaaatgtatcgattccatccttttttttttcttttttgagacagagtctcactctgtcgcccaggttggagtgcagtggtgcagtctcggctctctgcaacctctgtctcccaggttcaagcgattctcctgcctcagcctcctgagtagctaggattacaagcatgtgccaccaccacgtctggctaattttkgtatatttagtagagacagggtttcaccgtgttggccaggctggtcttgaactcctgacctcaagtgatccacccacctttgcctcccaaagggctgggattacagacgtgagccatcgtgcccatcccatcttcttttttttattgaacacataaattattattttaatggccatacgtaactccaactctgtccagcttggcaagacagccaaaatatctatttagcttttcarttgctgctttctgcttgttttctcaaaatctagccccaagcgtaaacagtttagggatttgtaatagctctagggaaaattgctggcatttcaggtatacttctctgctgttccctcctctgtattttttggtcccttataccttggctgtcattataccccaaaattcctgtctcttcttagtctgttttctgttgtcataacagaatacctgagattaagtaatctataaagaaaagaagtttatttagcccacgcttttggaagctggaatgttgaaaagcatggcgctggcatggtgagggccttcctgctgccttgtaaccaggcatcagcatatgaaggtggtaactaagtttccaacatgtgaaactgggggacatatttaaatcgtagcattctcaccagcccattgagactactttaaacgcctagttcaaaacccctaatayagggcttactctaatgtattctttcttgaatcttagcctgttaagtcgtggctgcctggttgctctccagtgtcttctttcttttaaagcatatattgccaacatgctttgtgagaaggaggttcaattatgtattttatggactttattaacagagaattataattaaaatttttaaaagttaggcacggtggctcacgcctgtaatcccagcactttgggaggccaaggtgggtggaccacttgaggtccggatatcgagaccagcctgggcaacatggtgaaaccctgtgtctactaaaaacacaaaaattagctgggtgtggtggcgggtgcctgtactcccagctacttgggaggctggggcaggagaaatgcttgaatctgggaagtggaggttgcagtgagccaagatcacgccattgcactccagcctggacgactgagtctccgtctccaaaaaaaaaaaaaattattgcctttttaatggccctttttacaaaaataatacatgttaactaaaatttagaaaatataggtaagcaggctgggtgcggtggctcacgcctgtaatcccagcactttgggaggccagggctggcagatcatgaggtcaagatcgagaccatcctggccaatatggtgaaaccccgtctctactaaaaatacaaaaattagctgggtgtggtggcatgtgcttgtggtcccagctgctcggtaggctgaggcaggagaatcgcttgaacctggaaggcagaggttgcagtgagcctagatcacgccgctgcactccagcctggtgccacagtgagactccgtctcaaaaaggaaaaaaaaaaaaggaaaaggaaatataggtaagcaacactgaagaaataaatgttacctgtahtactacctagaatcagacaatagttagcaatttgatacatgttcattgccattcttccttgtatgaaatcatatkgtcattgctggttttcactaaaaatatcttgaacatctttgcatgttattacatattctgttgcaatgattttcaaattatttcacgattatacatcagtgtaactaaagtggaatctcagtttgtaaaatagataagaacagatctattgtagtagaagcagcagtaggcttccgtggctccggcttggaacctctaaggcacttggggacacagttgtgtggttcagtatttattcagtacattattatttggtattgaagttattgcctaattttccagcattataaataatgctgcagtgaatgttcttgatggtttccttagggaaaattctcagaaatggaatttctgagaccaagagtatgcatgtttggtaaatacttttgttgaattacacaacagaaacgtatcaattccttatttctacagctctgtaacmaagtacccattcatttccctacaccttcactgacaccgtgtggccaaataccacattaagaacmaactagggatgggtggggtgactcaggcctgtaatcctagcattttgggaggctggggcgggaggatcacttgaacccaagagtttaagaccagcctgggcaacatagtgagactctgtctctacmaaaaaaaaaawtttttttaattagcctggtattgtggcacatgtctagtcccacctactgaggaggctgagttgggaggatcacttgagcccgggagatcaaggctgcagtgggttgtcatcatgccactgtgctccagcgaaaaatctaggtgtttctttctgaatatggactgtcctcccgccatctcattttattgtgaaaagttacaaagatagtaaaggtgaaagaattttacagtgaacacccatatactgatcacctggattctacttttagcattttattatacttgktttatcagactatatgtctgtcttttgatgttttcaaagtaaattgtagataccaatacacttctgcctcagaacttcagcatgcrttgcacaaatcttaagtggatatttcccattaacggcaaaaaacacaattacttttgcaccaacctaataaaagtaatatgtagatataagaaaaaacctcaagtgagattaaaggggacttctatgttctgtgttaagtttctatagcacttatgtgtgtattataaatgtgttgcttttataattaggaaaactaagcatcaagcagacaaacgaaagagatgctccttgtagcatctttaggatatgcaaaaataataggaagggaggagaaacacaaattcacactccaagaagtaggtttttgtgtgtctttttttcccccctacaatttagtggggtgtttttgtatttcttgggagttttttcatttcatttcatgcggtggcagaagtcttgtttccaaagtttctgggtgaaagttacatgtggatataacagccagatccttgatgtgggagtcagtagatctgggatctagcctcagaatttacgctaactgcggtcgctttatctctctctattttaaatttttcttatataaaacaaggagtttgagaaagcttttgacaagctatgcattccttgaaaccataggtagagtttagaattggaatttagtttacagttctaacattgtcagaaaaaatcttgccgtttctctaactctagggcctgggactctataatgaaacttctgtgggggattaggactaaccagtatctcaggtgattagcccagtatatcacctctgaagcataaaagctgcacctttggtcagttgaaagtgacatttttagttagtgtacttttgctaattacttgtcttggtcagcagaaataatagttccctaggtgacatgtattttgctctgttcaatttgagttatgtctgtttttaagccatttattttatacttcaaagtttactggtttgttacttctttttctattttttattcttcatcttccagacctcttcctgtgccaaaactgccacctggggagcaatgtgagggtgaagaggacacagagtacatgactccctcttccaggcctctacggcctttggatacatcccagagttcacggtaggttcacaacaaccctttttgggccctatacctttatgtgggtaattgacacccttcacctgcttggcttgctacctgcacatactgttatccagtcagattaaagcagaaagataaagataaatctagcccttaatggtttaagccttttgtagctgtaggtaattacacttatgttttctcagcaacatgagaacctcaaaaacacatacacctataacttgccacaagagtcaactttaacatttattagtgatattggcaaaacgagaagatgaatcttcataagtttatagataacagttctatttccaaagatcattatggcactttccttctggttcagagcatgtgattgcgaccagcagattgatagctgtacgtatgaagcaatgtataatattcagtcccaggcgccatctatcaccgagagcagcacctttggtaagttgccattctgctactttaaaaatcattgatatgtcataggaatsaacatgtaatatttggcaattgagatagcttgatctaagctcaaaattcttctgtagctgggactacaggtacgtrccaccatgcccggctaatttttgtatttttagtagagacggggtttcactatrttggccaggctggccttgaactcctgacctcaggtgatccacccctcccaaagtgctgagattacaggcgtgagccaccacgcccagacaaagctgaaaattattttcagtaatctttggcaaaatatctttgacatgggcagtaaagtatccccaatcctttatttcctactcacactgctggttccttttgtgcttttctttgtccttccagggcctagagacatttgtgttctatactctggacctgtaagctccttttttttctcattgcattgatgaaattcttttatgtgggggtggtgaacactcaattcccatgttaactagcctaccagattgaaagttcaagaagcctgctctcacaggatcctttgctgatcttccaaggtggaatgtggatagaaatgtttattgaatgatctgagatgacactggagtcattggcatcggtggctattaaccttgtcaagaataacctttggcatgttcaaaaatgaaagctgcagtgttggtgcagattttattttctatttttatctctgyttacatggtgtttggcccacagtagacaatcagtaactgttgaatgagataaatgattgcatacatgtaaaaatgaatggctgccccgtattgaaatgtattagaagatgaagtgcgtcagaagaagataacatcactcatttttctccaggtgaagggaatttggccgcagcccatgccaacactggtcccgaggagtcagaaaatgaggatgatgggtatgatgtcccaaagccacctgtgcyggccgtgctggcccgccgaactctctcagatatctctaatgccagctcctcctttggctggttgtctctggatggtgatcctacaacaagtgagtctccagactactttgggtttgtcctgaatggcagtgtggcctgtatgtttatattgaaagggagatgaccttctctggtgacagtaagtcagtatgtaggctaaacattatgtctaaatgggaggaaagtcccaagttaggaagttagactgtagtcagactctttaggatttttgcagacttagaaaagaggtcattccttaaactctggctcttcttatgttaggggtaggtaggatttatagtttctctgagtatgccttatgacactggtaattaggcttgatggctcagagcacacattcctttttcctgggctctgttccattggaaagaaggcatgctagctctggaacacacactgaatgggcctggagccagcccatgttgggccttgactactggaggctgctcttcttgcacctgtggctgcctggtagggcagcagccagagttgctgtcactttggaattgaagacagccttcaggacagacagctggtgaaaaagaatacagccttcgcttgcccagacgagcaatgtcccccactcagccttggctaatgcttcttcattgcaacttatatctgtctttttccttatttgtagaaggcgaagtttagtatctttggtcccctcagaattaaaacagacaattacatgtgcacaaacatgttgcttagtgtaaagcatgatgcagatgtttatgattgcagtggttattgttcataggacaggtgcatggtatatttagaaggttgtttttattgtgatgaggaggctatatcttaaaacccttgaacctgtaaaacccagccttgtgactgaagagcacatgtacccagtttacaggaagtcagtaatatcttgatattagyacatttttattgctgttgttaaatgaggatttccccagatttgcaaatattttctttcctatttcttctagatgtcactgaaggttcccaagttcccgagaggcctccaaaaccattcccgcggagaatcaactctgaacggaaagctggcagctgtcagcaaggtagtggtcctgccgcctcwgctgccaccgcctcacctcagctctccagtgagatcgagaacctyatgagtcaggggtactcctaccaggacatccagaaagctttggtcattgcccagaacaacatcgagatggccaaaaacatcctccgggaatttgtttccatttcttctcctgcccatrtagctacctagcacaccatctccctgctgcaggtttagaggaccagtgagttgggagttattactcaagtggcacctagaagggcaggagttcctttggtgacttcacagtgaagtcttgccctctctgtgggatatcacatcagtggttccaagatttcaaagtggtgaaatgaaaatggagcagctagtatgttttattattttatgggtcttgagtgcatttgaaggtgtccttcagttcccacgtagagagagtgtggattatattacatgataacctacctggggaacagtccagaaagctatagaacaagtattttgctggaaatcctaattgaggacttaagacttcctgggttaaggatgtggccgtgtgtgtgtgtgtctgcctgtggttgtatgtgtccttgtgattataagattaacctgctgtgtgtgttaattccaggcagggaattagcacaaaaggtttaggaaggaatctttttttaaagacttccatctactgtggtattatacccaagcctagtgtgtattacaacttcaacactcccctttggcttatattaccatgtgcatagctaaagtcttctatttttagaacaccttctgtctgttctttccccatcaactccttcctcatccttcttggtgttctgtcatgggccatgggcttgctatggccagccttactgaggccaagcagcttatgggatgttctttattgtgtgtgatggtattggtttgtttggtagataagtgggaggaaaagtactgttgctacactattataggcatgtttgatactagcagctaacactggtcactccaaagcactgtttctataggaacattgaagctattaagatgttttgattatcctaattacataatgaccgatttgagatagaggcctttaaatacattccatgccctccccagaaaatagtctgtgggagtcagttgccttggtgccaggtatgtgttctgatgtaggtcatgagtctttctacttaatgggaagggaagaacatttgtttccaggatgactttctggccagaataccggaaagcttttaggaagcttcgttcacatgctatttaaatgcacaaaatagacagtaaggatttatctgttcagtttttcttcccagtgaattaatttcagcttatatgggtgtcttcatttgaacatgaggaatattaggttatattttcagcagtggttttttcctttgccctttaaggagtggggataatgtccacggtggcccagcctcttgctgatggcaccttccctgcattgctgcctcccgatgatgtggttcttttcttgtgcctgtggctttgggaatgtaacatctctttcctcctttccttcccttttcctcttcacctgaggtcctaaatactctctgtaattactgtgttcttcacggtaattagacatcattcagtgaataaattactgtagtcaaagacagtatgggctggcagtttgtgtaattgcaagttcataaagagaattgagggtccagttgggagaactattagtcagttcttttatatgctgataaatgatccctcgagttcagttagtattctgtccagagtgtttagctcactttcttagcagtgtgtaagctttctccatgtcagaagcaagcctgctctttgataaatctgtcttcctgaaaatctaaatcatgcttttgtctttagatctacacagaaatgaccctccttggatcagttttctttccagtctaatcatctttggaactaaaacttgttctaactcgtctcttggcattcagctactcctagatcttttggttttatcccctggcctcagagccatttatattcccagagkaggcagtacaggatctcgtgttgatttgctgtggttacccagtgtctyctctacatggcataaagcggcaaagcccaccattaggtgaggcggtcccgagttgaggtagagtggggcagaggaagatggcagtgaatatcaaacagtagaccgccatcaacttctaacagccagtacrcacactgtttcattttgaggtaacgttcagttttgcattttgtttaaatattgaaggcctagacaaagaactagaaaaaaaaaagcagtttccaggcccatccatattgtaatttttctttatctgcagatattgcctgtagtctaaagatctctttggaagacaaagcatkggctatatatcttttgccttttccatgcatctaaatcttctctggagattatctccctactgtgtaggttaagggcagtctcgacttttccttttttgagtcctgtgtggctctttgaatcagcgtgaaactgaggctccagctccctgtgttgtgtgtgtgtgccatccatgggcttgggtgtcagtttgtcacaggtatctgccagcattcaaggttttggatcatttcatgaggatctttcctttgactgggtgctgtgaggacacacctgggtctgtgcctgagattgccaggcaagattaaggaaagttttcatgtggcttttgttttgaggttattctcaaaaccttaatttcttatattttctgttgactaaggcaccagtaacccattcttcaccctccatttgtatggcaatttaaaagtctttggctttgctctgaatttaattaaaactgccttttatgaacagacttcgagttttgccattttgggcaagcccttccgcttgtcccttcctagtggctaataaagtaaaaaaacccacactactttgttctctttttctcatattcattgggctgttgtattcagccagtctcatgctttccctgggtcttcacggattgctttccaagctgccttgttgcggggttgctgcagagcagcaactggacctttccagctgtcgccatgttccttccactaaagtagagggttcttaaaatggaaaaacctgtgggctcttcatatacctccctttagttaagtaatagaccaggcagcttctcatctcagcatttacctgttaatatttttgtgaatagtgctctctacctgtgggtggccgttctcttccacttgctcgtctccccccagccccattctgcataatctaccattcttctcctctctttctcttcttatacagaccctcattactggggcccaagatgtgggatactactgttagtattatttaactattttgtagatttaaaagatttctggttaagggaggtgggggtcactgttcatcactcttaaaatatgtgttttctctatagaaaagtaaaatgtgtttatggtcccaaacagtcaactcacaaatttttataacaaaatttccttgtaaaaactagggaccatctatatattccctttaagatctagttctttttgtaggtgttcagcaatggtgataaagcagaatattctcctacctcacgtcattaaagtcagaagattatagaccttctcaaactataagtccctcttcttgccgttggcctttctgactctggaatgaccactgttcattgaaaaatagttttctgactattggtctggctctaacagtttgtttgttcatccagcaaatgtttatgagtgatgaccatgtgccagaaatgtcaggtatgtgtccttcccttggcgccacatagtagtttactaatgtttgggggattgtacttggactgtcatagcctctgcgtttgaccttaaaatagctcttcccagtaagattgtgcaatttttattcacagctcttccatgtagacttacctttcctcatagagctatcctggttaataacaggccaagattctcccattatcccctgttgtctcctgtagctttgataatgcctgggagattccttggtgtaagtgtcatggataccgactgtttttatgttggaatttgttccaacataattagaatctgtttggtgagttgaaaggtaagttggctcagagttgcacagtagggcattaaatgtttaagcaaagcatctgcccacactcccctttccaatctagtgccttccttgaactttttcctgagctgctacgtccctaatcccccttgttgggaggattttcgtatcacccttatgggacctgtcaccatgtcctgtactatttggaattggttttccagtctttcaacaaccgttgtggctaactatgttttagaagggctggaggtgtgggccctgtcttcgggtctcaggacccaaagatcctttagtcagttgttgggtcttccaagagccagacattaatacagattgaactccatcagtcccctaattgtcagcctttacctccctcccagagcaaggagtttagggattctaaagcttagtgtccacacatcattctaccagaccttagagctttagaagctcaatctaaaatactgtaactcagcataaactattactatcactcctttgaactcagtctccatgagcagtgttttgttggaaatacatagaacggcttaatgcctagagggtggtggatagtgaaggacggtcaaggttatatttttgactgcttagggattctttggatmcaagaaacagaaatgttcaagcggaataaaggagggagtggagttgtggtaaggatgcagggtatttcgcagaacccaggacgggaagtgcctttggttcttgggtggagctggaactgcagagctttgcacctagtcctttctcccgcttcacagtctgcttatggtatatgtggcccccaaataggcactctagtcctcaagtctacaccaccttccaactctggggatcaccatgaacaaattctcaatttcccatacttaattttttttttttttgagatggagtctcgctgtgtcgcccaggctggagtgcagtggtgcagtctcaactcaccacaacctcygcctcccaggttcaagcagttctctgcctcaacctcccgagtagctgggattacaggcgcctgccaccatgcccagctaatgttcatatttttagtagagacagggtttcaccgtcttggctaggctggtcttgaactcctgaccctcatgatccacccacctcggcctcccaaagtgctaagattacaggcgtgagccaccgcgcccggcccatacttygtattcttaaaaaaaactacactcagcccagcacattgatcaagtatctatctctgagcagttggccttgccagggagagcagagatgtggcaggctccttcagctggagacagggagcttctcagagaagtgagcagagactccacagacaccctaaaaaggcttctactcaagaagtaaagccactactcctgcctttttgcttagtggacaggaaggcacaggagtttgtctgggacatcatagaaattcttaggtttaacttaattctggtcattgtcttctttatttcctgtttttcttccctttgtcagtcttcgcatccaagatttcttccctccctcttgtgggccagcctgtcctgttccagagctagcctgttcctgggtagccttccttagcctccattcagcctcaggtcttttgccttcttccgtgtttatttagagagcagaatctaataacgggttccactgtagccactatccatggacttctgggtcctcttcaggtttgagtgcttgaaaatgttcattctctgggcttgtggcctgtctcctccactctcctcctcaccctctcgctccttcctgtgtgagggccgctctgcagtaatgttctcaggcaagccttcctaggcacctcagaaactactttgccagagccagtaagaatatataatattggagcagttgccaggatagaaattaaatatagattccagtttaggatagagtttttaccgagagctcttyagacagtatacctgtgtcttctctggcaattgctttcattttagtcctatataaaagctttccttttctgtttttttttaaaactatgcttttgcttgccyaaatcttttgatcttatatttctctcatctcagagcctgtcctgagttgtaaggtatttcatactgccttacttaaaagttttttaaactactagagtcatttgatacacacagaagttacctaataatccaaagatgtccatcaagggaggaagggtgggtcatcagactttgcctttgatgttgtagactaggctcctgagttaagcagcagagggacagcagtgccatgtgccttcactgtgtcccaggaaatctgggttggttccagtgggaaataccagtatttcttggttctggaaagtagcaaaagagtaggagatggggaaatagggatggggagagcaagccccgcatgtccatggcgagtcaggtggggagcacgggtggaagggccggctgttgacagacagactaagctgtgtggtgctcttgccgccccttcctgggtacagagcttgagaaaaatgcagccgaccactccctgtgtttgtacagagcaaagcccaaaagccaacctcagatctcctgatttggcagctgaagaaatcagcagagtcctgattgcctgattcagtcccaaaaatgaatgtcaggccccgccccctccccaccaacattgcctctcctacattctccttctgcccctaaatcagacaggaggccagagaggagtattgctcaatgcgtgctatgtgcaactcctcaggccttgtgccacctccatgctgagccctgaagcagggtgtcctgggtgcctgtgtgtcagctccctcctctctacctacctctgaccttcttgtgggtgagggtggccatgcttatggccatcttaaaactggagaggcagagaactacttatgagtctgtagaccacgtgttgtcttccatggcctgtttctcctgctgtctgggtgagtgagcctgcaacgcaatgcccatgagagtaaatgcctcctgacctaccctgstcagcactgttctagtgtcttggccttgaaagaaaagcctgacttcctgctgacacatgtggtaggggcatggcagctatgaggcacctcctacgtctgttttctggctgtggtgacttgggatttttaaccttatatatctttttcctttactcaaaacaaaacaatttttagcacactgaaaaaaaaaaaaagccaaatgttttgtgcctttctaaggcagcactgtatcccaggctgcattttaggacttaatatggaaataccagagtctgagctcctctaccttgagtttcattagtccttagtgtctaggagacaggaaagaatgctctctgtgactggagaggtgacatgcaggtgcagtgtgtctggagtccctttcccctgctgtgagacttcagtggaggagagaagcattgtaccctgggatcatttggttggttccaatcacaagcttagttatcaggttgcatgccttgtctcctgcaaaagacagaatgtttcacaattcccaggtaaactctggaccattccaagtgtcctagccttctgatgacattaattacctagttgtgtsgaggagtataggatggactctcctgagaaggggaggttggtggctttgtcttttctttttgctggatcctgaactggtctagacctcctgcccccaccccccagcccccatcagatgtggctggcctttcatttgaaggcttcagacttaaagcattaagcagctagtgccctctgcagggcctggtttccccagggaagggcagcaaggaacatgggaccagaagcctgtcctcagtaatgtgactatagtgagctttagcaaaagtttttctatataatgacatcttacttatcttttaccctttcctcagttttcccctgcctttaactaataaagaattgggagacagaaattttaaagtcctccttattcaagattttgaaattcttagcctgggagtgctggagagaacctgrtgctttctccagaatgaagagtcccaatttgtatatcagtgttaagaagaaaacaaaacaaacacataggtgagattttcgtggactattttaaaaatgtgtcattaatataaaaaatttatattagcagtatttaatcattctcacctgtaaagaataagaaaaacagarggtaaatattcttacagagaatagcagagctttaagattcattttcattttaagtccattttattttgccagtgtattaatgtttagaagtctgttttactaatgttatttattaattttttttcatttccatacacagttagttaactaaagagctttttcaagcacccatgtctgtaaaaaaatatttttaaataaagtttcttttgttgtagcagacttgagttcttgctcattcagggggttgggaggcaatactcgagttgccgtaggaccaaatgccaaggcccccttcctcatggcggtgagcctgagctgctgtctggagggcagttccaagtggcaggaaagcataggaaggggacayagctcctgctaacagcctgccaggcccttcgtgctgcgtcatcagggcagttttgctgctgaaaagtagggtgactgtctgctctggtagaacttgagccatytgctcagaagcagaggtaacccctgatctctgctgccaactggaaacggttttgtgtgccttttggttgtagtttcacaggcccccaggttcctgtggtacccatgatgaataaaaagcaatgtatgatttctgggacaattaagctttatttttcatatatatatatattttcatatatatatatacatacatatataaaggaaacaatttgcaaatttacacacctgacaaaaccatatatacacacatatgtatgcatacacacagacagacacacacacccgaagctctagccaggcccgttttccatccctaagtaccattctctcatttgggcccttctagggttggggccctgagcttggtttgtagaagtttggtgctaatataaccatagctttaatccccatgaaggacagtgtagacctcatctttgtmtgctccccgctgcctttcagttttacgtgatccatcaagagggctatgggagccaagtgaacacggsggattgaggctaattcacctgaactcraaaacagygcccagcttcctcacygcaggcacgyrtcttttctttttttttcctcgagacggagtctcgctgtgttgcccaggctggagtgcagtggcacggtctcggctcactgcaagctccacctcctggattcataccattctcctgcttcagccttccgagtagctgggactataggtgccaaccactacgcctagctaatttttttttgtatttttagtagagacagggtttcaccgtgttagccaggatggtctcgtcctgactttgtgatccgcccgcctcggcctcccaaagtgctgggattacaggcgtgagccaccacacctggccccggcacgtatcttttaaggaatgacaccagttcctggcttctgaccaaagaaaaaatgtcacaggagactttgaagaggcagacaggagggtggtggcagcaacactgcagctgcttctggatgctgctggggtgctctccggagcgggtgtgaacagcgcacttcaacatgagcaggcgcctggctccggtgtgtcctcacttcagtggtgcacctggatggtggaagccagcctttggggcaggaaaccagctcagagaggctacccagctcagctgctggcaggagccaggtatttacagccataatgtgtgtaaagaaaaaacacgttctrcaagaaactctcctacccgctcgggagactggggctccttgcttgggatgagcttcactcaacgtggagatggtggtggactggtccctgaaaagcgggccttgcaggscmaagtgaggtcctcaggtcctaacccagtggccctctgaaagggggtgtgcaggcgaggggagcaggaggcttctctctagtccctttggaggctttggctgagagaagagtgagcagggagctgggaatggtccaggcagggaagggagctgaagtgattcggggctaatgcctcagatcgatgtatttctctccctaaaagtgggtagaggagaagaggggaacacggagacggtgctgagttgaaggtgtgagcaccgagaggaaggagagatggaagcagaagccgatgaatttggtgggcagcgttggggaggaagctaggatgggcatggcaggccagggaaggagggcggcccccgtctgactgcactggtgaaatggccacacccagagccacgggcattggtcaggaaaaggtgatgggacagggtctttctcagtcttcctccaagctccctcagccacttgcttggccctgccatctgtgagtagtgttaagaaggcaagatggggcctgctccctatctctgacaaagagggatgaaggatagagagaaccgttagtccctactgcccccggtccctgaggatgtggcaggctctggccacaggaaccgcctcctacctggtctcccggagccctcttgtcacygctgctgccctgcaggaggcccatctcttctgggagcttatctgacttaacttcaactacaagttcgctcttacgagacgggggyagcgtgctgggaggagggagggaggtgagaggttggtatctcagggccacaggaagagaagggcccgctgtgaaggatgtggaatggatgagggctccttgctccagggccagcccagggcagggaagcaggtcatgagaccatgtggctgatggaagctgggcagtgggtagtggagcaggcagcacmctgacccasggccccactcctgctgtcaaggggcaggcgggcgctgggcaggcagcaggctgggtggcaaaacgggcggggkcggaggggccggtgttgggcttacatctcctgcttccctgagcgcctgcacggcagcttgcccttcttatagaggaaatagaggacagcgcccagcacygccaggaccaggatgcacacaatcacagccacgatgaccacgccccggctctccggctccggcagctttctctctgcgccacaaagacactcctcgtcactccctgccccaggccacttcgtcaccatcgttgscccagccagtccagggccgacaagatggggctgctactcacctttctggacagggctctctggggagggacagggcagaaaggatgccctggcacagccctgttctcttgccaggcctggcttacctgtggaggtgctgttggctctggtatgaggactggcagtggaagtgctgaggccagtggttgtgttggagtctggtgtgagggtggttaaattgactaggaggcagagggaggggtgttaggagaagcgcaagttactgcccgtgcctgggcctgcccctgccatcccctgcagggatgcagccctcacccagctccaggaagaggatgctggtgtttttgcccaggtcgttggaggccgtgcattcaacacctgtctccaacagctccggggtcacgaggacattcagggtgctcaggactcgctgtggatcttggtcttgttcacttgcctgcgaggaaaggaaggaggcagctcaggggatggggaggatctctggtcctggccacaaagcgcaggcagggattaggagagtgtggcagatgagacacccgctcaccgtgccgttgacgttccaggagatggtgggccgggggtgccctgacgcttcacaagacagattcaacaccatattctctttcacccacaccttcctctccttgaatgccatccaaggggggccttggggaggtagggagaggtgaggtggcaagcccagctagcctgcctccccctccgcaccagagctccccagggcagcaggtggctttttgtcaaagagcttaaaaaccaccccacttggggtgacctggtctctacccagagggagggcctcaccaaaaatggccacgttgaccagctgtgtgcggttcaggccgggtatgctgggcacagacgccacgcagcgatagccgcctcctgcctcccgtttcaggtcatgcaactgaagcacaggccccctttccagcacctggcctgtctgggatgagagatgggtcagagggtctgggaaagagcacattcttgtcaccgccagccccacccaccccatcagccccttgccccagacccgcctgggtacctcttctctcagccactggaactcgaggtcctggctactctctgcctcacaggtcagggtgaggctgctgccttcctgtctctcaggggctgcgggactcactcggacgtcagacacatctgggggtacagcaatcatgtcacccagggcagggtggggccagttccctattgccccagcctggtccccctgtcctgggtccccagcccctcacagttcaccagtagttcctgtggttcactcagcagcgatatcatggtgtccaagtccaggccctgacattcatagcgcccactgtgttccttycgggcaggctccagcaccaggaccccgttgtcgttggttgtctcttcctctgcctccctggtgctggggttctagggaggattggggaggtgagcagagtgcacctcccgccactccacctgggtctctgcttgcatccccrcctgcacccagcacaaagcccccacacctgcttgctgatgctgaagtgtggtggagggttgccatcagccaaacacctgatttccacgcggtccccttccttcagcattcccacgggctccacttccagccacactttttctgtcgggtctgcataggcaaagggggtagctcttggcccatgagtcaaccctgggctggataagggggagccagcaggagtttccagcagccccagccccagtaagcagagagtcaggttagtactcacagaaaacagggacggtgacttccctggactccttcatgtggttcccactgggcagccggtagttgagctcacagtaaaactgggcatctttgtcttctttaaccagctgtgccttcagaatactctgcaaggtgtacaaaccactcgactccacagtctgggacgactgaatgtggacccctgggcagggaggaaggggaggaagactcagcctcagccccacctccagccccaccctagggttgtccactggggttggcaggggaccatctaaatagccccctgtcccctgtagaaggccaggtacaaatgcaagctggaaacccttcaacccagcacttttactgctcagtgtcaaccctagaaaaacattttcatgtctgctcatatccaaggatgtgtgcaaagaatgctgcaatgataaaaacgagcagccgtctagatgtccactaaatggggaatggtgaactcgactacctgctatgcgtagtatggaaaacttggcagtaagcaaaacgatcagttgatctaaatagactgacccagaaacattgtataaaagaaattgtctaacaatgtataccatacaccaccacttagaccagggtttctcagcactactgataattttttttttttttttttcagacagagtttcactcttgttgcccaggctggagtgcagtggtacaatctcggctcaccgcaacctccacctccctcccggcttcaagtgattctcctgcctcagcctcctgagtagctgggattacagacatgcgccaccacgcccggctacttttgtattttcagtagagatggggtttctccgtgttggacaggctggtcttgaactcccgacctcaggtgatccgcccaccttggcctccaaaagtgctgggattacaggcgtgagcccagccagcactactgatgttttaggccacgttgattctttattgtgggggctgtcctgtgccctataggatgttagcaacatccttggtctctctacctactagatggcagtagcaccccctctatgtgtgacaaccaaaaatatctccagacattgccaagtatctcctaggaggagggggtacaaaatcacccctggttaagaatgactgatttagataataaaacacagaagcctatatcattctagaaatatttctatatatgagcaaatacatagaaataggcttgaaagaacacaccctgatagcagagattatttctgggagggggggtctcaggcaagaagaaacttctagattttttgtcagtttaaattctcatgaaaatattttcaagtaccatttgtataatttttttaagttaaaagcttaatgaaaatataaggcagttcctgtgtagtaccatagggacagctctttttaagagatggggtctcgctctgtcacccaggccggagtgtggtggtgcaatcctagctcactgcagccttcatttcctgggctcatatgatcctcctgcctcagcctcccaagtatctgggaccacaggcacacaccaccatgcctggctaatttttttattttctgtagagacagggtcaccctatgttgtccaaggtggtcctgaactcctcacctccagagatcctcctgccttggcctcccaaagcacygagattacaggtgtgagctaccacacctggcccaagggtggcttttgggagaaagggctactcacggttcttctcctccttcagaggccggccattcttgtaccagatgacttgaggaatggggtacccgttcctccctacacaggtagcgacctaaagagcacagggtgtgagtctccctgcctccgagcccccttcaagccccatctcagcrgctgcgcaccagctgcccagcccacctgccacacatctcacctcctcaggctccttactgttcacagggatgcccagggggttgacctggatgtttggctcctccggagcttctacaagaaaatagaaatgagggggacatctggccacgtcccaccaccctcactaccctgctggcagacacagggtcacgcactgtagacgcggagctggatgcggtactcctgggaccgagggcgcttgccctggcacaagaagatgcgctcgtcttggggggtgacttgagtcagggccagagtagcccctctgtcctggaggctgagccgctgcycgtactccccaggttcgctctggccctggccctggcgcacacggaagatgagcgtccgcttctccttgtgracctaatgggaggagacacagaggaggagaagggtcctgggctacaagaggggcagagtctccctccccgggctgctcttgcaggagcccaagcactcacagaaaaccagtcgacatggctgaggttgccttgggactgggagaggccgcacttcagaagggctgtgctgcccacttccacctccaccagctcaggcgcaggctgctcagcctctccgggcacacctgggggagggaggcggggcccccgcagctgtgtcagctccggctgctgtccgcccctcccctcgcagcgctgctgcagctgtttttcctgccactcagagggtctgcagagggccctgtcctctgaacgctctacccccaccccgacccgcgccccacctgggccagccctctccccgtccaggagatcccaggtccttggagccaagcagagattgagcagagactgagcaccgaacagctccagctgaggctggtagaggggcagaaaggggcaacctaggctcggggccaagaggaaggcccctttccttccaggccccctcctctccgggtgagctcagagtgtgggaatgcaaagcatgtgccaggctggggcacacaggcccttttgtgtcaccaccgccaggggaagacaccactgctctaycctctgccctccaaaatccctgccctcactccccagcgggctaactctggcggaagttccggtctcatgctccctcagcagcacctccatgaacactccgcacacacccgcggaccccaccctaggtagctggtaaggatggagaggtcagagtctcccccaggggtcagggcaagggccaggcagtgggcaggagtgacgtcagtggtgccagcgtgctgccagccctgtgaggaggtgatgtcactcgacaccatctgcctgggctctgggatgcctgggttgttaccttggctctcggacaaggagggcaggtggaaggtggggtctccaacccagagcctcagacccctgactcctcccagagctagaagagcagggcagggtggagctggaccggctgcaactgtggagcccgatttagccctttccccagaaataaagtcagcctgggaggcagtagcctggaataccccagggacatggttggcactgggcatgaggccagcgagctgggtattgcctagccctccccttccccagccggacagcggctgggacggcggaatgggagccaagagaaacacgcgacaccgctgcgggccatacaagggcagcgtggacccgagagcgccctgctaccaggcggatccggagaaacgctccgaggtgcccgggcgcacttcccacctgaatgtggtccccaaaataagccagcgggcgcttccagtatgggaatcctccatccctcatctctgtcccctatgatcccatcactcggggaggcgcgaggcgacccacaccgccccgcaacccctgccaacgcccagctcgggcgggagccgccgaacctcccgctctcgctcacctccagcctggcgtgatgcccaggcagaagggggaaggggtgggtcggcgcaccccctccagcgaaggaagctgccttttccagcaacaggcgggcgcggaattcaggctttgaggatgcgccccagctgcgcctcctgcccggcttcaattgcgggcccccagagtgagcacctcagggaccacccaccccccagcaccccgaaaggctgagctccaccccttctcgttcccagaagcagcctcctccccgccttccgagtgctgctcccgggatactctagaatcccggctgcaaactggctgcaaagaagagttgctcgcgcgcaaggcgcccggggatcggggacccagggaggaggctcgtcctcccagacgcaacgccccgaccccgccgcgccgctggctctgctccctggcacgctccaccgcagacccctagccggggcgcggcccccctgcgagcgaactcacccgcgacgcgaggacagcagcagcaggcggcgagcaagaaggcgcagaccagcctgggaagccccatgcttcccggccggagggcgagagccaagtgagcagctcgaggctgccgggggctgacgtcaggggggcgnnnnnnnnnnnnnnnnnnnnccaggctcctggcttgggaaggctgagggggtagtgacaggtgtctcggggtctgactggccgaggtggcagcgaggagaagctgtcccggatgcccggagtcgccccgggtcgaagccagccaggctcaccgctgctcagcccctgccagccaatgtagcccctaggggacctcctgggggaggagcagtagcggacctggtcctcggtgtccccaaggggcctcccacttgggctcccctcccttgccacagagaattcaggccggcctctatcgcttcccagaacgattgcaccactgccgctgccgccggcctgacactgcctcagcctcagtgctggcagctttgggagaagaaccctgcgccagtcccacagacccagaagtacctgtatggggagtgcagacgatgccttctgggctgtcccttcaaacgcaagctcctgcaagtctagcctttgaccagagaaaggaaggagggggctgaattcgcaggcccaaggtgttcacacttgtccagacctgggccttgagaatcatgtttcttccctcttcactctggagcctaccctggaactcagtttcccctcacctaagagaaagaaacagggagaagaaagagttaatgggcgagggtccccagcctgaccctgcaaacctgttgctgttcctgatgattgaaaggatcccggcagcgctgatcttcccccaccccatgtcttccccagccctattgattgtgggtccatagctgagggaagaatcaaatcagacctgcttgggtggggagctctgcagctccccttctcccaaaacgccggcttctccctgggtcttctggcctcttgaactaaggctctagggagggggaggtgctcttgcctcactctgaccccagcagcctggcctcagaaaaggggtccacatctgctggcgcgcctccaccagggagtgccaaataggggcctggatttgggtagaggtctgttgcccagcggggccacccctttgctcgctgggggaggtggagggtgagccagcaaaccctggagatggccaggtgacttgagagcatgctccggggtggcgttttgatgacgcagagatgactggaaaaccacaccaggcttgtctttcagagccttctcgacccctcctccaatgccattagtctccagccagaggctgtgcagagcccaggcccaccgggccaggggcctggagcctggagcctgcagggagaacaagaggaggacgctggctcgccctccagagtgaatgtatggactggccccaggcccagagctgactagatgagaatgttttgtctgctgggctggagtgggaatggctgaaggatgccgtttgccctggcaggcccggctgggcatggagctggcttccctgcccaacccccttccttcacttaacaccattaactaatcattcgcctctctggcctgaaaacaaagccagctaaccaccaaggacagtcagttctgaattcttcttccgctggaggagagtgaagccaggtgggggtggaggattcgtctctgcggtgaaagggaaatgaggtcagagcctagagcccagggtgacgtcccttcgcattgccccaccaaacaagcacagaagactgtcctttaaggaagccagtagcctggggctgtctaggctgctcggaagtgggtcatagcctcaggggacagatagctttgggatggtttcatgaggtgggcactttgggattccaaactaaagacgggtcaggacctcggaaaggacgcaggagtggaggcagggagcagggtggagggagcggaaggtgaaggggatcagccctcagctcttcttagaggccagaggctagtgctccggcagccccaggggagagaaggtggctgcgggacttccagcaggacaggagtgacagccagcagaagggagttggaggaggaggccacggccgtctaccctgcagggacccagcacctggactgggttggaagagcctggctcagatgtaggccagggccagaagaggccctgggggcagagtcctaattcttcttttttccctcgttgggttgcaggcaagaaggctgctttcctccagccccatggtggacctgggcccctcacacatgaggggaccctcctgcgcataatgccctctgcgtgtctctggtataggtctgaccacaggtggagaaactgaggccaggtggggtgggggtcctggttgggctcctcagccacagtctcctggatgggtggagctttcagctcattgtaaggagaagtggaaccctggggagttggaggtaaaaagacaaggatggacctgtccccagaggccatgaaggggcaagactggaacccaagtgtcctctctcagctccagcaaagggaacttagcgacttctgacccacccttctggatccaggggccttgaccaggatgtgaggatatgagaagggtgggtcagaagtagctcgaggaaggaagctgataaagaggtgtttgcagctgctgtgaggacatggggtgggagtcccaacaatcttggcagttaccgagactggggaaccccctggccaggccagataataggatccggcctgggtctttggagggggtgcggaagttggagaatttttccagaatgtgggtgtgagtaggagaagattatactgaaggagtgaaaacagggtggaaaagggtagggggcaggaaaccggatactgtactggggggtggatggaagatgtgggggaagagattgaatcgggggaagcagccctgctcccgccggatgctgtctcacccatgtccttcgcacctgacccagggcaggaggaaggaggcacagccgggatggaggtgcaccccacaccaccatgggagagagggagggtggcttatgcgggatgggaggggctatttttaaacttggaaaaaccgtgagttnnnnnnnnnnnnnnnnnnnnnnnnnnnnnnnnnnnnnnnnnnnnnnnnnnnnnnnnnnnnnnnnnnnnnnnnnnnnnnnnnnnnnnnnnnnnnnnnnnnnnnnnnnnnnnnnnnnnnnnnnnnnnnnnnnnnnnnnnnnnnnnnnnnnnnnnnnnnnnnnnnnnnnnnnnnnnnnnnnnnnnnnnnnnnnnnnnnnnnnnnnnnnnnnnnnnnnnnnnnnnnnnnnnnnnnnnnnnnnnnnnnnnnnnnnnnnnnnnnnnnnnnnnnnnnnnnnnnnnnnnnnnnnnnnnnnnnnnnnnnnnnnnnnnnnnnnnnnnnnnnnnnnnnnnnnnnnnnnnnnnnnnnnnnnnnnnnnnnnnnnnnnnnnnnnnnnnnnnnnnnnnnnnnnnnnnnnnnnnnnnnnnnnnnnnnnnnnnnnnnnnnnnnnnnnnnnnnnnnnnnnnnnnnnnnnnnnnnnnnnnnnnnnnnnnnnnnnnnnnnnnnnnnnnnnnnnnnnnnnnnnnnnnnnnnnnnnnnnnnnnnnnnnnnnnnnnnnnnnnnnnnnnnnnnnnnnnnnnnnnnnnnnnnnnnnnnnnnnnnnnnnnnnnnnnnnnnnnnnnnnnnnnnnnnnnnnnnnnnnnnnnnnnnnnnnnnnnnnnnnnnnnnnnnnnnnnnnnnnnnnnnnnnnnnnnnnnnnnnnnnnnnnnnnnnnnnnnnnnnnnnnnnnnnnnnnnnnnnnnnnnnnnnnnnnnnnnnnnnnnnnnnnnnnnnnnnnnnnnnnnnnnnnnnnnnnnnnnnnnnnnnnnnnnnnnnnnnnnnnnnnnnnnnnnnnnnnnnnnnnnnnnnnnnnnnnnnnnnnnnnnnnnnnnnnnnnnnnnnnnnnnnnnnnnnnnnnnnnnnnnnnnnnnggctgacggtgggattcccacagcctggctttcccagggaccgcagggtctgttcccaggctcccagcattccgacgactcccctgagagctgctggcctcttccctcagccccttccctgccagggggtggggggagagaaggagaaagaggatgtggatgcatcgggactcctcctggggatgatggactcttaagccagaggcgggggttgggtgggcagcagtgggtggttagggtaggttgagcgggatcggagtccccaaccccgcggacccctcctccgaccgactgggactgtccctctcgtaccccccggtcttaggagcctccgcacgggggccagcccacctgccggacctcaggcctccggcacccagggcctccacccaggggacccggccgcggcgggaaggcgccggcgctaagctccccaggagccggcctcgaggtcccgcccggcggaggcagggggcggggatccggccgctcgccccaacccaaacattaccataaatgctcaggcggctgcgggtggatgggcgcgcggggagcctggggctctccggaagccccagatccagtctccaggcccgacccagcgcgagcccgcgcagtgattcggtctgaccagccgtcccctttacaaagcggtgcagccggggatggcagagctggggtgggcgcggggacagggtggagaaaacccaggccgcagggggcgtctcggggctgcctcctgggtaggcaatgaggctgtgacctctggttaaagaaagagtggggccctctagctagatggcagcgtcggcgccgcggggaggcggctctgtctccctgcagctctgcgggccccgctgctgtcagcggtgacaccctgggtctcggttccccggccccagcacctaatccccttccctctcctctgcccccagcctgcacctggggaatgaagggtgatgggggcggagggtggtagcaggatgctgggagtttacacctctccccttcagggaagttcacatccgctccccagaataccaccatccagggagaggaatgtccccagagagctcttcaaatctgactttgagtcgtcactgaggggaaggccggctggtctacaggagggggcctgtgggaaacctgggggcgccatgttgaggtcttctggcccctctcctccctgaaggacgctcctgcagttcctcttccctgccacacggggctgccagcatcccaggggtagccctggagaaggggagccttgttccatcccatcccggcgatgcctgggaccctcactgctgctgccagggctgatcttggagccgggagtagagaggggaggaaagaggctgggcgcggtggtttatgcctgtaatcccagcactctgggaggccgaggcgggcggatcacgaggtcaagaaatcgagaccatcctggccaacatggtgaaaccccatctctactaaaaatacaaaaattagctgggcgtggtcgcgcgcgcctgtagtcccagctactcgggaggctgaggcaggagaattgcttgaacccaggaggtggcggttggagtgacccgagatcacgccactgcactccagcctgggcgacagagtgagactccgtcttaaaaaacaaacaaacaaaaaacaactgtgttaacagctggcacggtggtgtgtacctgtggtcccagctactcgagaggctgaggtaggaggattgcttgagcccagtagttcaaggccagcctgcgcaacatatggagaccctcatctccaaaaataaacaaataaataattgtgaaatgcacataacagaatactaaccagtttaaacgtcagcgttccgtggcattcagcacattcacaatgttgtgcaattatcaccataatcaagttccagaattttgtcatcactccaaggaaccaaaatttgaaccaagttttacctaacgaactccaaaacctgcgcagtctatgtgtaataatcacagctgaattaagagctcagttgtgtggtaaagacaggaagtgcaactgggattcagcaaagggagtgttgatgtggac

SEQ ID NO: 96179 - DNA, 131789 bp, Homo sapiens
caccaccatgcctggctaattttgtatttttagtagagacgggtttttaccatgttggtcaggctggtcttgaactccttacctcaggtggtccacccaccttggccttgccaagtgctgggattataggcatgagccaccgtgccctccccttgaaatatcttctaatttatcctttgatttttttcttcggcccaatggttatttaaaagtgtgatgtttaatttccacatatttgtgaattttccagttttccttttgtttttgatttctagtttcatttcattgtggtcagaaaagatatttggtatgatttcaatcttaaatttgttgagacttattttatagcctaacatgtgatcacatgtgaatttgacactgttctgcatgcacttgagaagaatgtattttgctgctattgagtggaatgttatgtatatgtcttttaggtccatttggtctatactgttgttcaagtctgctgtttcctttttgattttctgtctgaatgttctatcaattatcaaaagtagggtatgaagtcccctattttattgtgttgctctctacttttccttcaagcctgtcaatgtttgctttatatattttggtgctctaatgttgggagcatatattttttttttattatactttaagttttagggtacatgtgcacaacgtgcaggttacttacatatgtatacatctgccatgttggtgtgctgcacccagtaactcgtcatttaacattaggtatatctccaaatgctatccctccactctctccccaccccacaacaggccccagtgtgtgatgttccctttcctgtgtccatgtgttctcattgttcaattcccacctatgagtgagaacatgcggtgtttggtttttttgtccttgcgatagtttgctgagaatgatggtttccagcttcatccatgtccctacaaaagacaagaactcatcattttttatggccacatagtattccatggtgtatatgtgccacattttttaattgttacgtcttcttgatgatttatccctttcatcattaaataatggggacctcctatgccagtttctgacttaaattctattttatttgatatgattatagttatccttgatctcttttggttatcatttgcatggaatatcttttttcatctctttacttttagcctatgtgtatctttgattctaaagaatgcctcctgctcacaacatataattattttttttaatccattcagctattctacgtacttttattggagcatttaatccgtttacatttacattatcgataggtaaggatttactattgatattttgtcattttctgttttgtagttcttttgtctctcttttcctctgttgctgtcttcctttgtgttttgctgatttttttgtagtgatatgctttgattcccttattttttcttttgtatgtatgtatttatttctttttctttatctattgtatgtattttctttatggtttccatgtttctttgtctctctcttctccttctggacacccataatcaatatatttgttcacttggtggtgtctgataattcccttagactctcttcactctttttgattttcttttctttttgcttctctgactggataatctcaaatgacctgtcttggagttgactaattcttctgtttgatcaaatctgctgttaaacgcttatgatgaatttcttatttcagttattgcattctttcacctcagaatttccatttggttcttctttatcttttctatttcttcataatattctcatttatttaatgtgttatttccctcattttgtttagttgtctatctgggttctcttgtaacttgttgagctactttaagatgatcattttgaattctttgtcagacaattcatagatctccatttttttagggccagttgttgtatatttattttgttcttttgattgcgttttattttcctgtttcttcatgttacttgtagctttgcattgatgtctttacatgtgacatccatgtcttaatgacatgttctccactcttaatgaactggctttgatagggaaagacagcccagatagagtttctgggtcttgttcctaggtcctgatccaggtgttcagtctttttcttttcttttcttttttcttttcctttcttttcttttcagcactagcaatctcttgctccctctggttcccatgtcagtctcatctgtgctccatatgagatgagatagaaactagctcttcagggagctcactgaaaggctcaggacattagagtcatgatccactcctccttctttcctgaaggagaggccttagttctatgccttctacagatctctcagagccttgccagccatgggaaggtgcccattctcctagctttcccaggcatctggactatgccatgtctttaagcactctgtaagaggcacaacagaagccagccccttgaggggtgtactgaaaggccagaaatgttggatgctcaccctactctctatcccctgccctccctacaccaggaaaggattgtagtctctctggtgctgagttgtactcgcaggtaaagtgaaatagcttttcttatctgtttcagtgtggctgattgtgattttttgtttgtctggggtactgaaatttcttaacttaatcctgaacttcttatgaagctaatttgttacttatatcactgttaaatctgtgtttctgttaggaaatgagggctggaacttcctattctgctatcttgctgacatcactctatccttgatgttcttgaggttatttatgtctgttgtatctgtatgggggagatgtatgtattagtggtggttctggctcagagtctctaatgtggctgtggtaaacctcagatgtcagagatggagccctcttgaggctcaggtggggctgagatctgcccctgcccacccacatggttgttgacagacctcagttcttaactgaatgctagaccgaggatgtcagtttctctcaggctgtttgccagatgcctcagttccttgctatataagcctctccacaatatggcagacaacttccccaagacaagcgatggagtgatgggggactgggggaaggaaaggagggagagagagagggagagggggaggagagagcgcacacacaagcatgagagagcaattaagatgggagctgcagtctttttaataacctaattttggaagatcatctcattacttttgctgtgttatgttcatgagaaaaccactaaatcctgcctacactcagatggaagaaattaagtttcatcacttgcaaaggaggagtataaagaattgtcccatcacaacactatatgatgtcatgctactgcatatctcttcctaacactgtattcagtgatacaacattggtagtttgaaatcagccatggtgggaatatttaaaccatggaaattagcaaacattctaagtcagacttttccccccagacagctgacatttaccagcacacatcaggatgaatatagagctatgtgttcacaaaatttttatgaagtagacgaattttaggaagggctttgaaagaaggaaataaaatattattgataaagaaaaagatagtttcttaatttaaagataatagaggtgaagcaagaagtggagggagacctagggagtttaaatatgctcttatggatgcctataatgacatgaagaaaaagcagctctttctctttttgtttcttgtgtgtgcatgtgtgcacatgatttgaaatggagattgcatactaaatttaactatgtgtacacacattaaagacttggcatacaagatttttctttaatccagcaatcaggatgggtatataatcttttacataattgcctatgaagccacaaacaagtaatccatacgccagtaaagttgatacagctgacctatacctaaaatagctcagaaattcaaagaccaaattttagttcatttgaactgatgccttggtgtatgtagtacgaccaataatatgtgaggagtgccaccatttatcaaatgagcaggaattcacttcaaaaagaaaatttccagaatcatagcattttaggtctgaaagagacagtgggaaacctacagtacattatttctcaaaatgtctttgtcaatcaaacatcaacatcagaaatgactggtcttctttttaaaacctagaagcttgttaatacctgaaacccaccccagacctgatgaattcataggggcttaagaatctgcacattctataaactctctacatgattctgttgcaagcaaacgttagagagtgaaaaatccaaaccttttattttatagattagggaaacaaacaactaagctgtaaaagagaaccccctgcccaacaagtgagaccacatagtaggcatgattttacacattacaatttttttttctccaaaataaaattttttaaatccagcaatcagggtggatatataatcttttgtataattgcctatgaagccacaaacaagtaatacatgtgccagtaaagttggtacagctgacctacacctaaaaatagcccagaaattcaaagaccaagttttcattccaaaattttttattttggagaaaatagaacgcatatcctttgttcaaagagacagctaaggaacaacacaggacttcaatgaaaaatatgttgtttatgtgtgtagttactagtcagtatgccccacctagccacaaattagtgtggttactctaaattgctaacatgaaaatcttaacctcctacttctgaagttatttggttttagctactcaatttttttttctaggcttccaaggttgctgttttgggcatggttttagaaatataattataagtttgatttcaaacttctggaccatgtaatcaagcacagactggtcatagtggaaaatatacaatttttagctctgcctacattgacaaaaaaaaaatggctggatccacatcaattcaacttgagtgccatgtgtttacagtgacagtttctccccgaaaacgcaaaaaaaaaaaaaaaaaaaaaaagaagatccatgctgctgtagtatatgtacataggggtgtttaaagccagcccctccagcagcaccttaccaaccatgtctgtgcttttatttattgatccaataagatgacttaaatatctaactccttttccacgtaaaagtttttattatgtgcaatgcattgttaaacaggtgaagaatgaacaagtttagaaaaacaaagaagcttaacatggaaaattacccgcatggtgtccacttttcctgctcggttgcaatacccaatggattatttattaatttagatttgtgctgtccctgaatccaaacagcagcctctttagagtaacatctgctccagacattgctccaggaatataaatcccgactaaggggtggatatttaaagctgtaaatgattttttatttttacaatagctttgcaaaaggaacggaggtgtcatgtcatcatcagagttttcttaacaggatttaatcttaatgccaaactaaatcctttgtctaaagcatcagcagagttgtacttattttccccatagtattaaagaggagggctggtgcaggcacagccatatgacattgccttatctattttgtctgtttgttttctggaagaatctaggaatgtgcataaatacaattaaggacagtatctacaaattggaagaaagcatttctattctcttaaacctctaaatcaaagcacttaatgttctgatttccagcaagaccttctaataaatgaaaacccaacccttgggtttgtgttttgactcttgatacaattatgaaagacgcatcaggagatggcaagtggctgccagtacttccttttttctggaatattctctaattcttggtgtatcaagatggaaactggtaggcttggaatagatgtccctttaaaaggctccactaacaatacaagaatattttttccatacgcagtgacgtgggtgggtcatgggtgtctcaatgacagtaacgttcccgaaccccggaccttagctgtcatttcacctgcgtcgtcccggacgccatttggctgttgacgtggttccgagccagcaaataacgccagcagccctcccagatccacgccggcccgtctctccgccggccccctcctcgcagtggtttctcctgcagctcccctgggctccgcggccagtagtgcagcccgtggagccgcggctttgcccgtctcctctgggtggccccagtgcgcgggctgacactcattcagccggggaaggtgaggcgagtagaggctggtgcggaacttgccgcccccagcagcgccggcgggctaagcccagggccgggcagacaaaagaggccgcccgcgtaggaaggcacggccggcggcggcggagcgcagcgatggccgggcgagggggcagcgcgctgctggctctgtgcggggcactggctgcctgcgggtggctcctgggcgccgaagcccaggagcccggggcgcccgcggcgggcatgaggcggcgccggcggctgcagcaagaggacggcatctccttcgagtaccaccgctaccccgagctgcgcgaggcgctcgtgtccgtgtggctgcagtgcaccgccatcagcaggatttacacggtggggcgcagcttcgagggccgggagctcctggtcatcgagctgtccgacaaccctggcgtccatgagcctggtaagggcgctgccccctgacagccctgggggcatcccggaggggggcggcagagggtgggactggtggcggtgggggaaggagggagggatgggcccaggggtgcctcttggtaaaaggtatctaaggtggaaggtgggaagtggagggagggatggaaatggggaagaacccgacttagagcgccagtggcccaatttctgctttcccgtcccatccccccagcaccaatcccatctccccagaccttaggccaccctctagtaagtataggcttgggaggctggggtggcgggggatgggggggatagcaatacagaaaaaacaaatcctgacgcacgcaaccccagcggtcgctctcactttgctgtgtgaaaaacccaaaggaatgattgcgagtcccccgcaaggggggttgktcttccttgctgacaagagtagaaagataaggtgcagaaggcagtgattgagaggaaaggagaacgagggagaaagagtcatttatcatgttttctctaatttccagaggaccagtttattggctctgtgtacccatctctacctgtgtgtgtatacgtattaggtacactcgctgctgtggatgcttggggaatcttagggatattgccaatctggggtggtggtgtataaagatacgttggtgcccctcctcctaccagggtgaaaagtggtttctgacttttgaaaccagattttgaaactgcacaaggcctttccaaggaaaaaggagtattccattttctctgctataaccatttgagatgaatagtttgtgatggggtctttattccaactgatgttcccaaataaccatctgtattcgtctttcctaggagtatattaaagcaccttttggtttatgttaattgtgatgcatttagtattaataaagaggtatttaaaaatgttcttgggacttttttcgttatgtttctgcttaggaaataatttgggcctggtcttctgataatcaaggtacagctaaagtaatctgtgctaataatatcagcatgggatggatgcttaatttttgtttaatgacaaagcaagcaagaaaagtaggctaaaaattctcartgcagggccagtatagttttataatgatacgtaagaaccaaactgagaagagattaaaatargtgatcaatagacattttgatcttcaaatatatagtaggtgggttgatcaagaataaatcttcaggaaatatttcttaccttcaaataatataagaaaaaaaggttcatgtaagtttgctgtcaaaattctaagatcagatcctagaaaacatttaatattaactactcttatctaccaggattcagcatgtaggattggacattttgaaacttagtttcatactgttatctgaagacagggaaaaatttaaaatgtgataactgattttcagctaaatccaataaccaaagccaagatatcctaggcacagttaaagctaatgtaagtatttgtgagtctcctgctgcttacttaatgagaaccctttgktactctattttgtagattgatcccagagttttttgcgttgttacttcaagagattatatgaaagctaatgtttaactttttgttgtttcaaatttggaaataaaattttaaagtgatattacagttagaatgtgatatgctttagaaaatgaaaacaatgatttctttgcttaagtatctggaatatatagttcatcaaggtttgcaaatccttcttttagattgcaagctgtatgaagtggggaccctgattccagcacccagctcatgtttggcacacagcgggcttgaatatacattatgaaataatctacattatggaaaaatactgaatatgcagtgtggaaaaaatgaatccatcaatagctgcataacacagtgtattaaaataaaatgttttattcttcatacattcaaaatacgttgattgaattcctcttacagagacaaactcggaagtgttgtacaatatgtactttacaattcctttttaaatgaaggagactctaagtctatggtattactaatagaatacaaaatgtctgtgtcccttatatttttaaaagtagaaataaactattataaaccaacactaacaaaagtacaaggtgatatccccctccatcaccttttatgagcgtcaaggaggttagagatcttcaggaaactagtaaatatagagatctgatcagtatacaagtttgatggtgcttgtgtgaattaactttaaggaagtttggaaaaaggaaaatgttcaccattcttaaatggcctttcagtttcttttaggttaaactattttaagaagtaaaaaggaatacttattctgaggtacaagtgggctcattcagtgttttttttgagcacctgtatactcaaggtggaccaggcgtctgtgagttgtgcctctgcacaaccsatagaagataacacagaagatagtcgcttgccctgagggcaatagagaattgggagcttgaagaacagcataaagggatgtgaggctgcaagatcggctttgggaggactggagaaaaagacagtaaggtcagcaggtcagggagactggattattgaagaattgatgacaaaagacagtaggtcagcaggtcagggagactggattattgaagaattgatgacaaaagacagtaggtcagcaggtcagggagactggattattgaagaattgatgacaaaagacaggaaatgtacagtttgttgacatttacaaattccaaaatagctggtatagatatctgtcttcactaggacccctgcttttgaaaaagggccaattgtctttactattttcaccttttaagtaccttattttttggtttgaaataacctttctgattcagctttaggaaataatattgaacttaagaaatgtgtttacttgactgaaattttgaggtgaaattgctcacttttgttttattttccagcaagagaggtgtcagatttgttgattagttttcttaatctagattcttttcctgaacattaaaaaaacagtggatttctaaggatttagttgtcgtaacagaagaactccaagaaaatacaacaacatacccacaaaaagccctttcttgtggtagaataagcaagctagaggtttactttgttagactagcagtttttggacagagatgtttgttgatacaattagctctcttcctgagcagaaagaagtgatctttatacatgcttggtacaggacatggggtgtagttgaggttatctcctgaaaatgactttctttgcaagatgttcaacttttgaattcatcaaaaggcaaagcaaattccattttgaattggtcattgaggaatagccaaacctattctgtgatgacatcttaggaatcagcttgattgttgaccagctgaatgttgggtctcagtcatcattttgtatcacttctgaggtctgcaaaaatctattgaaagagagttgcgagtagcagccaatttcaataagcagaatcacaaatggtcctgtcattggtctcatcttttcagacattgttaagtctggaccccagatgggtttcctctacactgggagttagtgtttgtggcccatttggaactgggatgaagaatgggcttagactaggctaggggctgattctaagtgctcaaatatgtccccattagatatcatacctgctaggcatgatcatttttcccgtttttctttccttttacttagattttatacttttttcttatttccatgcttaaggactcacgtattcaaacccaaacatatgccttcctaggcatgtatatccatcatcgaaatacagtactcataaaagaaacctttattaacttatgtctaagtaatggattctgtgttcccagaccactcgacccggagttaaatatgagttaagattaatttgcttaaaacactatttcttttacacgtagttcaagatagcttttgggaagtaaatctgatttatagctaaaacgctatctcaaaaacattctttagagcaggatttttctttctcaaaggctggaatgattattttggacgtattcctctctgaatctgttaaaatataaagtgtataaatgccagtatgaatttgccaaatattgtgatggaacatttaatgctggcaaagtttccacacaacttgaaaaaaataagtggggatttttattatttgtatggcgtctttttatagcagattagtatgtgttagtggcaaatggttacaactaagtaacaacttaaaattcgtgaagatagatgttagatcctagagaagaatctagacctaccacacatggtcaagagttatttttagacctgaatgagtcaacacagcttttgccagaagtgatgttcttgattgacttgtaattggttaatggaagagaaggcaagttgggcttgcccctacatgatagcctttgctcagacaaaagaggcagctttctgtgacaactgatttcagaggtggcagacgactcatttgctagtaactcccttaccgtcttaccacggggcgaaatcctatttctaaatattattaagaaatacaaaatagctcttgtaacgggtgacacattaacccagcttttctcaaaatatattccatagaacatatattcagcatggtttgataggcattatgtaaacaaagataaacaggtttgtatattgaaagacctaacagagctcttaataggctaatgtatgtttcaaatctccaagttagattcgtactgtataagatttcccaggcttttaccatgggatttcctcctctcccgctggctggtggctcacacctggttgaggcaggaggagtgcttaaggctaggagtttgagatctgcctaggcaacatcatgagatcctgtctctacaaaaaaataaaattagctgggcatggtagcatttgcctgtagtcccagctacttggggggcttaggagggcgcttgagcccaggaatttgaggctacagtgagccatgattgtaccactgcactccagcctgggcgacagagcgagaccctatctcagaaacaaaataacaacaacaacaataaaaaagggagcttatcttggaagtagtgttacacttccattagcccattatcattctttatcatagtattaaagattcatttgtcacatgagactggatgtagaacaaagaaaaaaatgattcagttggcaattctccagcagagggcctcatacagggagctcttcaggggtagggaacatatgttttccattttttccctccataaacagctagtgtagtggtttatgtagagtaggcttttaagttttgcttagaatcagagcatgattctgaggcaatgaggcagaggagaaataattttgtttgtttgcttttttctctctcttacagagctgaaaaggacacataattttgatgaaaatgattaaagttagacaaatgcaccacaattcttcttttattgttaaatagcttcatgctttttacttttgttcacctcttttccttgtgtatgacaagggaatacgttaagaacacagaactcacaggatcgctgtgaggccaaagtagtgtagtatatagaaacacatttaatgaagttgcttacatctggttattaaaaagaaatgctaatttgtaaatattctttttttactttcagttggtctggaaactgtgctccatggcctttacactcatttagagtaggcactcttggctgcatcgtcacgtgagatctgcctccaccaatcctgccaaatgctttcctcttaggatgctgttgcacaggcttagttgatagccctgaaggactttttccctcttcttactgttttatttttgttcacaaatgtttgcttttttttttttttttttgagatggggtcttgctgtgtcacccaggctggagtgaagtggcacgatcatggctcattgcagccttgaactctagggctcaaggtgtctccctcctcagcctcttgaatagctggactacagatgtgagccaccacaccctgcctgtttgccttttatcaattttaaaatgtgggacattcttgcttttcttcagtttgacatgatgatgaacaataatcatcaagcaagcttgaatcaagcaagcgtcactcaataggacactcaataggaacaaagtgtgcatcagtatttgagaatgtctttatggttgtttctttaggtagccaaataaatctacggcaatatcaacattttcattggcaatctgacttattttcctaaagaatttatgatgaaactgctccagtcctgactaacttagtcttttacagtctcagcagaagcaaaagctctttgaaacctcctttctccccgctccctaactttcttacccctgctggggctctttctttatgcttccatatttctttggagagctgtaaagaattacagtgtggactttgatgtcaggggacttgagctcaaatcctgaggcttcttatttttagctgagtgtccctgggcaagtcaattaacttctctctayctcccaaattcatcacctatgaaatgacaataatgtgatrattaaatgaggtggtaaatataaagttcttaattcaatatgtggcaacaattattattacctcattatggtatttcccactgttggtctacagataaatctatagacaaaatacaatcccggacaacaagaagctcctatagctcctgtagcttcttgtgctctaggattgtattttgtttatatatattttttaatcctgaatgtctagtattatgcttgggacatagtggccactcagtgaatatgtttgaataaatgaaatttctcaaataggcaaaaatgcatatcataaaacaaagccatgttggtcgatgttgacatcatgcatattagcatgccagtagtgtgataacaagaaaggatagagatggtacttttcttttgcatatgcttattttttgtgtgcactgaatccagttttgcataatggagaaatataccaatgtgaattacatgtcttttcaagtttcagtgctgaacttgctgtgtttgttgtctcatataactggactagtaaggggctgtcttccttttggaagagaagagtcttcagacatcttagaaagttaagctgctttttaagtgttaaataaacattttaaagataattggtaagcatttatttagtaaaattttgacctttaaaaactctgcatgagacctgagtgttgaaaactaagaactgtgtgcttgtttttaacacagaagatatgtatctccaggttttcattttcctttttctcatgaaatggtattcaaatcgtgcactttgaaatgccacagaggaggaggtttatccgagctacgtgatgggtcaaatgaacttaaatttgaaacatgwttaaatttgcccttttgtttccttctcattaattactggaattgccgtgagtccgttgctctgtgaacgtttctctttctttgaacattcaggatatggtgttttgtaagtgatctaacagccagctttttctaataaaacatggcctaagagaagagcctgtttgtgttactagtgtcttttatgattttcaaatgatttacccacttctttaactgtccctagatgagtaatctttgaagggtagggtggcacatgtggagtattaaagagatggctgttaagcaaagataaatgaattacttatgataatacrccgtggaacaactttccactactggtaaatattttgttttctacagaaatctctttactatcaaatcattgctaaacatcatagttctataataatcccctcatttgaagacatttcatttcaaacaaaggctcattattttaaaatggatgcaaattgtttattttctaaataagcctaaatataacttaaattcaggttgctaaaaaacctcttcctggccgggcgtggtgtctcacacctgtaatcctagcactttgggaggccaaggcgggtggatcacgaggtcgggagttcaagaccagcctgaccaacatggtgaaaccccgtctctactaaaaatacaaaaattagccagccgtggtggcacatgcctgtaatcccagctactcaggaggctgaggcaggagaatcgcttgaacctgggaggcggaggttgtggtgagcgagatcgcaccactgcactccagcctgggcgcagagtgagactctgttaaaacaaaaagacctccatgttggtcaggcttgtcttgaacttctgacctcaggggatctgcccgcctcggtctcccaaagtgctgggattacaggcatgagccactgtgcccagccccccaaaatttcttgctgtggttatgcatgtcaaggtaattagaaggaacaataattatcgcatttatttgctcaatgtaggcaactcctcatatgttcagatcccaaagtgatgctgactgattggacctatccaattyctcttcctatacaggcgaaagtatttaaaatcataaaatctttccttcactatgcagctgctagtcactgccattgtgtaatgttttctccaagaaatagcttatttctagaactctgctcaaaatttgcacaaatcataacctttagccatgagttcagggtagtgaaacttcaatataaagatcagattgtcaccttcctgacccaggtcttgaataccctttttccttttctttttttagccaagtggtaatttctaaaacaacctttcttcatagctattataaaatattactgtgtggcattccacactgaaattaactttccaagatgaaaatataggccttttttaaatagaactaataatttcaatgtaatttagggactatttaatgaacacctactatgtccatgccattttactttacctgttggtcaccctttgaggcaatgccattgcgttccttgaaatgtgttatttcatttttttgctttggattcactctttcacacacgttgagcttatattgcatactgtataaccrgtggatacattacttgattctgcgtaatgcctgctgcatatgatgcaggggttgaaggcttctctatcttattcttaatgtagcaaacacaaagacaatatctgtaggggaaactactgaaaatgttaaagacatttgcaaaatgaaatactttttgtcctttttgtgttttagttgcagtgctggacatctgattttaaagtacaacagtcctattcaaacattttcatttgtctcagatcttgacattgttcagcacagattttttttctttaagtttactagaggaaaccagtcttattcattgtgggaactcagtaaatgttaagccagattttcaacataaycagcatcaggggaattaatttaatgcacttttggaaactgcattaactccacaaaatcaacaagacctttatagagctcacacaaagagaaatcagctgctacatgtattttctcaagagtcaaattcagttttgagaaaatgctaaagccataaaaatatagagatagataaatctcatgtgaatactattacatagatatataatgaatgatactatgtagctaaatagactgaaatacgatctagacatataggttttatttagggttcgatgatggcaagataattgtgaatgcagaagtcgtctttgttttaaatttcaaattagtttaactatttatatttatagatttcactcctatctataaaatagcccttgtttttcttgtttttacttctacttatagctattgtcaggaattgagagttttttctttaatctgagaggttggttcttgtaaaaaatatgatttctcaagaatgtttttttcaggaagttttcttgggctattattgttctctgggtttttaaacagttgggctaactttgcctttgctttcaacagaatgytaaccggataccttctgagataggttacaacttcatggcttaaagtattggttgtgctggagttgtcttcctccctggagaacagtccttgagaactaatttcatagccaaacatgctaaaactgttagaaggttgaggtgacttaacggccatttataaattaagctctgtaaaattatttggcaaataaatattattaaatgccmctagcataataaatgaacaagtccaaacatctagtgaaaattagaatttcaattagatttaggacatattttatattgtcagtgctttattttcacagttgccaaattataaagtgaaatgtcttctcatttcttaaggagwctttttcaaacttgtctgtcttctcctggaatcaagatagtgactgcacatttcagagtgaaccatctggtgcaggtctatagtaggttcttgatgtgttgttgaaagtggtgagtgagtgaacacttcagaatgaatgacacacatattagatctagttatacacactttgccaaaccattgacatgcatgcaagcacacctgcttctccagctgcaaggcaaatagttatatcaatccataattctgccttccttctagaatggtgaccttgaggagaggtggctatctttggcagattaattactgtatccacagtgcttggcatgtatattttgtcaccaactgggtcttatgttaatgttccaccctaggctggtcgtgtttcttgttctggtgttttctatattgagccctggttctgtgttgccttcagtctactcagtgagatgcaggtcctcattctgttcttgcatttaacattaatttctccatacaatgggtcagactcagtacttaaaatayggagacttcctcctctggaagaatttttgccgccatttcttgattccaaatgtatgagctgcagaaaactttagaggtgttgaacatgtgcaaaatacctgataaaaatgcttctatgtgttaatgcataggwagaattctataaactttcctcaaattagcctccttcaaattagaataacttttgggttgaatgttattaaatacttagaatkgtctccccattgtccataatgggttagtttcagtattccactggtcagtgtagcattgggattagtagcatttttatattttcatatgtatgagtaacacacatttttactctacttgtcaaacccatttcaatttctaatttcctctccactagttaactatggagtgaacatgagaaacttcattagaagagtatattcattttactcatgtgtctaaattgttaggttgtatgttgaggacaactctaggtttctctccagcagtgggaaacatgaactatgtgatatttttaatatttttgagatccttttctattgtttcgagacttctgagtatgctttttaatatagattcagattactggatagatgagagtgagggcaccttatgctattttaacaaacattttcccttctcctttgagtctatttcagtttgcacaaactgtatcttaaaaaattacacctaattttcagggacatcaattcagtgtgaggtatttttcctgaatagttttaaaactgttattcttgttgctgttattattttaacattgaagctgaactcattggatactataattttgtgacctctgcatacagggaaagtgaatcaatgagaatgcatttcttaaatgaatgtacagaagagtgagacttgttaatattttttcaaaaattcattggacaaagctaatgcattcatgggctccataaagacagtagtayarggaaaacattcatacctctgccaacatttccaaaaggccaagaaggctctcattcatggaacatatttcattttccataatattctcagccctcagaccaaggtagtaagaatactttattatcaaaaaggccctactaacaacttgcagtgtaaatcatcctaattggacagatcactgagaaaaaacaaagacattcattcaccaggcatttggaaattccaggtagaaatgctttcaaaccaggccacatttggaaatcaaactctgagtagtagagggctgtaaacgaaatactgcatctttcatttctgtataggttattatatttgtagcgcgaatgtacttatttaacaataataactaagtgcctcctatatgagtgacattctgcagattgaagaggtatttcaaaagggaacaagaaacaacagtattttaccaagtactttgtatgaaggtattgactctaattcttcagggagttataagagagtggtctrcagtggagggctttcagaaggaggtggagctttgagcaggacttaaaagatgcataaggtatggaaagtcaaagagaggactttattctaagctagtaaaaaatcattcacatttcttgtgtctttttcttcattgttctgaatgtgtgacatataagcattcaagatacattgtgccagataattatgttccattaacatgtgaaattttcatctacagaaaatttttgtttagagaatgcagttttgggggtgctgtgctttggggctgatttccctcatcaagacggtaaaactatttgggatggagcatatactaatagaaatataatatacttatatatatatagtatatgtatactagtatatatactaatatatagtgtatatataggtatataatatatatttatatatttacatataatagtatgtatctataatatatataatatatcatgtattgtaaatatatgatatatgtatatgtaatatgtaatatacatatatcatatatttacaatatatgtatatattatgcatacatattcggagctaatctttgggtattaatgagagtgggagtccagagcctagcatatatgtaatatgtaatatacatatatcatatatttacaatatatgatatattaaatatataatatatgtatatattatattaaatatatatttatatattataatggagcttatacttatatattatatttatattacattattccattactatagtataaatatactattataatgatattataaatataatgaaatgttatacatattttattatatttatatatcatatcataatggagcttatcgtagtataagctccatcccaaattgttttattgtcttggtgagggaaatcagcctcaaaggacaacaccccaaaactgcattctctaaaatgaacattttctctagatgaaaattttacatgttaatggaacataattatctggcacatatatagtctgttataatatatcacatatataaataatatatatataaatcaaacataatacagttatatagtatataattataagtagaattatattaagcatatactagattatattgtaattagcaacaattgattactaatrcttttcctccctaggtagctattattgagcactctctagtaagccatggaatataaagatgttatgtaattttgattttgttaggctaatttccagcagttaagtatagttcaattagtgttctgttttgactatgtaattcaaaaactatgttttgtaaaaactcacaaaaataagaacaagaacaaaaaaagcaatgtcatttgagttattgaaggagaattcagcccatagattttctccatgctttggcagctgttttagagcattcatccagctgcatttgtctaacacttgaataatgatcatgcagtttgtcagatgcttttgggagagaaattcactatgcagaaatatttagtatttaactaatttttccaattataggtttttgattagggtaaatttattttgaattactcctgatgttaaacccaatcttcattagtgttccatagaattgtgaaacattagaattatagttttttcctagctagaaggagcactctcattttatagatgattaagttgagcttcagagagacattaaacaacctgcccaaggttttgaagcccaggaggcttggaactcattttctgatacacagttggacactcttcttaaagtatttcccataacaatgtacacagttggagaaatgaacataactatttcttactggtcatggagggtcatgagctgtttatgtgaactgaagtctgtgagggcattactggaatgtaacttatcagttatgttttcaaatccttagagcagaacttcttgacctgtgtgctgtaaatggctatgggtgtgccggaggyggatagacagggcctagggtggcaaaaaaccaggaaagcattgaaataaatcactccagcacrctgtaagtacctacagaaaatgttatttttcttggcagtagaatccactctctaagaagaaacaagcttttgttggaagactgctctgataaactttttggagggctgggccttcaggaaggctgaggacctaaagtggataaaaaggagagggtatgtagagagtcagagggtatgtagagagtcagagagagagaagagaaagacttaagggctggtggctcaagagaaactttggggaaacagaaataatggatggggacatcagcagatctacagtgctccataatgatttgtggagtaaattactttgggagatgggatgaagtgctttaattttgctttgagttagggactggtaaaatccaagattgcccaaggaaggactgttccatataagttacaatacagttatgaaaacttattagcaaagatcagatacctactataccacagtgcttctgygaatagattcaagtaattttttgaatttaagcccggcatctcccacatgactgaccatttaggaatcctggtcctaagagaacatgaccattgggagtgggcctctgggaagggtgttgtggtgtgcaagggcaaccctcagttgtgtgcaccacgcagaatgaatcatgtgttgtgtcgctggaagtyaagggtgaataatataaataactaaaaatgggtgaggtttcctgttaaaaaaacatactcgtgttgatctgttcatgtgtctacattacatttcaatgtgattcagtagggaggatttcttgggcccagtagttcgagaccagcttgggcaaaatagcaagattctgcccctattaaaattttttttttatgtgaaaaatgttacttgtgctgaaggggatcacatatttgttgagaatgttttccaaaccaacaatcatcacacaatttctcaaaggactttatttccaggtttgtgaaagttttatgaaacatattaaaatgttataagaatcattgataatatattgcatgtttaatgaacagcctttattaaaaagaagaaatatataaaggaactatatctggaatgaagagcctccttaaatgattggacagaaaatagtggtatgaattactgtaggaatttaagaatatatgatatacgtgtgaatgatgtttttttgttttgatttttgtcctgtgacaaactctaccgaaatgattagttgatgaattctgttggtaatttatagtcaggatattagcaagcaaagtattccaaagtcttctggctgatgtttatgtgaaagggtgtgttctcatatgagcaggaaatgggctaataaggcaatgaaaagactggagataatttcacggttaatttggggtaaaatttatttttattataatattatttgtggtgaaagtattaagtctgaattattcagacaattgctttaattctccatttgacatttgacctgtgcatagagctaacctttgggtattaatgagagtgggagtccagagcctagtcaagtaagagattaggaagcagagatggaaagaaagttctacctatgccaagggtcaatgcacagtactggtaatgatttgattcggcagttttattagcagccatttctttgacagactaataaaaatgacttacagattcttttccaagttatcttatataaatggattatgatgaaaaatgtgtgaaccacatttcatcttctttcttgccttctgttaaatatgtgttcagcttagaaattaaatagcacaggatagaacttgaaatcataaattctgtgcatgatatgtagttcaaagggattacatgataattcacatgtagagaattgtacaggatagttgggaaatgtttctcaaccctcagagaatgctcactaggcacatgcataacatgtagatgcccaaagcatttcagaaatagaattacaaaaaacccccaaaacacttgtcatgaaaggtttgtgaacctaatctcgcctgtatagactgggctaattctgatagtaagaggagttctcccttctcttaagtaaacaaaaactattggctttcatccaatcggttattctaagaccactgcaacttttttctctcacaaaaaggagttgccctaaagaagtttcatttgctttgatcttttttttcctccctcctctaaaggaaaaaaggtatgtgtgtgttgaaatctaaaatatggcaaagtttccatttaaaaatactttttagataaccagatttgctcttcgcacaatgaggtctttggtccctgggagatattttatatcatattcctgaatttgttcctggagtcatctttaacggggctagggaacttattgggtgctgtaagaactgttggtatgacccaccatgctctctctgtctctctctgtaactcctacaacttgactttgagatagatctaaagaagtgagctatcaaatgttggaaatatcaggtaagaagttaagataggctggtcatggtggctcacacctgtaatcccagcactttaggaggccaaggcaggcaggtcacttgagaccaggagttcaagaccaggagtttgagaccagcctggccaacatggtgaaaccacatctctactaaaatacaaaaattagcagggtgtggtggcatatgcctgtaatcccagctactctggaggctgaggcaggagaattgcttgaacctgggaggtggaggttgcagtgagatgagattgtgccactgcactccagcctgggcaacagagccagattctgtctcaaaaaaaaaaaaagataagggagattattaaaaacaataagatagacggaaatataatatttaaggttagagaagaaggctgagtgtggtggctcactcctgtaatcccagcactttgggaggctgaggcaggacaatcacttgagctggggagtttgagaccactcagactcacttgagaccagcctgagcaacatggcraaaccctgtcgccacaaaaaaaaaaaaaaattacaaaatgttagccaggtgtggtggtatgctcctgtagtcccagctactcaggaggctgaggcgggaggatggcttgagcccaggaggttgaggctgcagtgagccatgatcacagcactgaactccagcctgggtgatagaatgagaccttgtctcaacaaataataaaaattaaaataaaaataagaaagtgaagccaactgaaaacaaaaagtattaaaacacagagaaagttagaaaataaagtttaaagatgaaatagaaaggccaaggaaaaatgtttaaatgttgtggagagaatatgaatgtactatatattattgctcacccttaaataatgcttggtatatgccaagtgatgtttaaaggcacgacttacccacatatcccttatgggtttggtactataattatccccattctataaattaggaaactgaggcccaaagagattaaatgatttatttaacatcacaggtttgtaagtggcaaaaccaagattagaatatacatgtatatatagctacattcttaaatacgcaattcggtatattagacacctatttattttgtcttcctgccttctgatattagctcctctcttcccttcttggggaaatgttccttcttaccatgtgacttgagtggaagatgttgccatgttcttagacactctctttccatgctttcaaagtaagcatcctttctaccatcttatcttgattatacaacgtatttccaaatattattttagattctctgcattttcatcagataaaacaggattatctcccttttataggacaaataatcatttccacttaaaaatggagctgtattaaaaacaagcttttggccaggcatagtggctcatgcttgaaatttcagcactttgggaggccaacgtgggaggattgcttgaggccagaagtttgagaccagtctgggtgacatagcaagaccgtgtctctaccagaaaaaaaaaaaagaaagaaaaattagccaggcattgtggtacatgcctatagtcctggctactccagaggctgaggtgggaggattgcttgagcccaggagttggaggctgcagtgggctatgattgcatcactgtacacagcttgagcgacagagcaagtcctcatttctaaaaaaaaaaaaaaaaaaaamaaaaccccactaaggttttaatgttatcttgtacattcatactaaataatttagaggctggtaacaaaaagaatattgttctggtctcaattaattaattattctaattaatacataaacttattttattaattgcttatttacatcagatataatattagtaaaagattgataagagcatgtaccagtgacaattttctgagacattaagatttttctttatgtttaggactattagcctacaactgctaatatatacacatatatacacacacatatacacatgcatacacatatacacatatatgtatataggtgtatgaatacatataggtacatatatacatataggtacatatatacaaatgtgcatgtgtatacatatgcatacacacacatttaaatggagtatgtttatctagaaatcaggaaagttagaaactgagagtaaataaacatttaaaaatggagaggcaartggcttttcaagatagccctgattttaggtcaatggaaaaaatctaagcagttattttaactaaagtatctggtgatcatagtttggaagatctggaattttaaggtgggtggctcacttgacttgaaaatccaatattttttctgaagtaggtgttgccatggtgacagaacggcttagcaactgaagacagatttcattggctggctgtctgcagacttgcttgttgagtggcattaatatgttgcctcctgctgttttttttctgaggagaccatctggcattagctgtatttaaaggtacagttctgttaaacaaagaataccaggtgatatacactgaggtgttaaaaatatgttttgcaggcattagttggtttaatcaatcaatgactaagaagttccacttcaaatcacaacctattataaccaattaattcactattctaggctttgacagtaggcattaaagggttttattgtggtacttacttatattataaaaatttaattgcctaaatgtactatactaaatgatcatattaatcttgatgtgcctaaaaattaatctacttgataaactgttctctcacattatatgttcataaaccagagatgtagttttaaaataatgtttactgaggatgtttaatatatcagagcataaacagctgtcagtttttcttttacttttgagggtgataaaaataatggattttcaagtaagatgtattaagatgtcaaatgcatctattctactaattataactgttgattctaaacaataaatacctgttgtacatctgtgaaaagacataccctcttttttattttttgagaaagagtctctgtcacccaggctggagtgcagtggcacgatctcggctcactgcaacctccacctcccaagttcaagcgattctcctgccctggcctcctgcctcctgagtagctgggactacaggcacacgctaacacacccagctaatttttgtatttttagtagagatggggtttcaccatgttggccaggctggttttgaactcttgacctcaggtgatccacatgccttggcctcccaaagtgctgggattacaggtgtgagccaccrtgcctggccacatatcctcttttaaaggagttccctatatactagggaggataagacacatgcatatgttatgataagatagaaaatgacaagtaccttaagagtaatacaaagcgaagtttgagattgaagaatggaggacacatttaataaggatactcaccgagacttctgattggcttaatcttgaccagtgtagaggagagaagagaattctaggagaaacagaagcaatcatcagtgttataatcccagcctctctaagagtgggttccaagataatgttcagaggataataacagagcactttgtgcttagaccttactgtacatgtagaggaagcaaaatctttacaagtaggtctttggccatatcatgaatatccttaaatgctagactgaggatttagacttcatttgtttgggagttaacagaaatagatcacttgtgcattgctaatttaagaaaaagatattgtatgcttttgacatatttagggaggtgttgtggacccaccacctggagagagatatatggccagcagtttgaaatgaaattcatttcatagcagaatttgaggacagaggaaaagatttaggaatcacttgcatgactggtgagggtgaaaatggtgattatggatgagatgactgagggagggagaataggcaaaggagagaaagtgtatcaggcagaaacttagaacacaccaacatttttaagattaaatgagcaagaagagagcagagagatgtagtcaaagaaagaggcagtaggtatgattcagagctgtagtctcaagataggactgggggcatatgacgatgcccagtgctgtggaagttaatgaagcagaggatacagtaaaggtcactcactcccagcactggttggaagtcgctggggacatttggggaagtagtttcagtagagtcaagaggaagaagtcaaacaaatggataaggagtaagtgaagggcagtttcacctctaacactcaccttttctctcacccattcatcaaaccaagcctttcttttttaaaggctagtcaagtgaagcagtgggagtaaagaaggaataaactaagttttttgaaagattacatactattttcaacacacattcattcctgaactcatatcattgtggcagtcactgcattactctcttcatatggttctcacaaagggccactactgacttcttaatagggtgaccttatgtctttgtttccaacatattcagtgttcctggggtatttgttaatagagccctctttcaccctcaaaactgtcctagtttggatgataaattatgagttatcccagctcttcatcaccagttctaatgagccgttttcaatctttatcttacttgaccttatttgattttttttttctttacacagctgactactcccctttagtgtgacttgaaaccccacttctttgatttgtactggataactcttctggttctcctgacaccttctcagtcttttctgcggccttctcttctgtacaccctgtaagtggtgccattgcttagagttctgttcttggtttcttctcttcgttacacgccttttccatagacaggctcactcataacaacaggtgcagttaactagaagccggtgaaggaaaaatataacccttgtttctccccagtgagctttggatttgcacatccacctgcctagtacacttttactataagtgatagtcaacatgtggataagaacttgagcattggagtgagacataaggctgccaggtctgccgtttaatagcttaatggccttaaagaagaaagtctttatgtggctcagcttccactctgtaaaatcatgaaacctgtcacgtaagatttatgtgcgggtaaaatgaaatagcacatgtaatgtgctgagcacagttaatggcacacaacatacacttaatgaataatagaaattattattatttcccaaactgtattctcctctcattatttcttgtcttgtggaacatctgccttcctgagtggaggagggtttatgtgtgggggaacatgaaatacttttggaaagattgagtgatgccacaatatatgaggccctggaagctggacagaggaatttagacacaatggtgggttacaggggcttctgcagtcttgtragcatagaatgattctgtggaaagtggtgttgtaataaaattagttattttaatattaagccagatgtgtttaaagtaggggtcgggaggctgggcaaaaggctgatagagtaatactggcataatttgatgaggacctggaaaggtgtggtgacaatggaatgaagaggaaaggataattagggaaaggtgataaatggacagattattttattttttatatcagttctttcttcagaaggttgtgagatatttccatcaaaaatatatatttaataaaaatgtaataaagcttctttatggatcaagaagccactactgttttgtacctatttatttgtgaaagagaaggaaaatgtgctaataataatagtggccaacattttcagcctgattctctcagagtttgcttagatgatcatttacctcttcagatctttgaaagaatttcataaatgactggtcccatttgtaacctttattattctcatagttacacagaattgttgagatgcatacttcagtattaaaggatgttggtgtttctagtgattctggccggttacatgacaccatgtgatacagtttggatatctgtccctgaccaaatctcatgctgaaatgtaatgcccagtgttggagacggagcctgttgggaggtgtttggatcacaggggcagattcttcttgaatgacttgacactatctcctggtgagttctcgcgagatctgattaagtgtatggtacctcccccaccttactccctttctctccatgtgacgtgcatgctcctgcttctaccatgagtgagagctccctgagccctccccagaagccgtgtagacgcaagcaccatgcttgtacagcctgcagaaccgtgagccaattaaacttcttttctttataaattactcagtctccggtatttctttatagtaattcaagaatggcctaatgcaccatgtaaattaaaatatacacttgcaaatatgtcacaaaaagacttactctcccccgaagaggagtcaatacaaaaacctgaagaatgtggcaagtggaaaaacagaaatgagaaaactacctttgtttataaaaaatatttttaagatattttttctttggaaatagattgttcttttgaaatctggaatgtaaaatgccagactcttcttctgtttttctggatttgaaacaatcgaacactgggaaatatctgatcctgaactaaaatgcaggcmcmccaaatttgaactcagattgaaaaagttaacactgggaatcaactagaaattaacggtgattatgaagaatattttgattgctatttgattctttcatagctctgtaaaacttatgtaagcaagctattaaaaaacaaaagctgaaggcgactgttttatgatgtgtgtatcataaaggaaaccatcaccacctgtcattgaaaccargaaaggctcatgtcaactaaatgtgaaaagaaaacagtgtaagaaattaaaaaraaaatcatattcttgaggccatgaaacacatgttccagaaaacagtttattagaattgcattaagtaaaaattaatgtctgcacactgatggggaagcagtgtggagtggtatggaaaatgttagagcagtctatttttgtaaaatctggaagttggaataaataatcattggggccccagctctaaaatcctactaccactattaatgtgacaatgatttaatttttgaatgaaatttaaattgtaacatatgccatggggaatgtgttttctggcttgctaacaacatgaaaagaggatgttgaaagcctcttgtaattcatgtttttaatttcattctttttttttttttttttacagagtttggtttttattgttatgtgtttgtctgggtgcagaattgccctcaccacccctggccaccctggcctcctgacaggaacaggcaaagagatggctccagatggctcttggctgccactctaggcctcagggcttatacaatgagcacagtgggttccaccttccaatagcgcaaactctaattcacagtcagatttcaccaggagggggagatgatcttggctgaaggcactttaatcagggagcaaacccaatgccggagtttgtcttccttctcgttactctgataaatctagatgccactctgttggagaaccagcactgccggcagctggggttagtgcactgactgagtgaggcatgaggcctgctcactgatgaaacttcttgttagggctgttagtgtggtcagctagcagctggcttggggtgaactcttttccataggcagcctcatacttcttgagccsgtccactatcttctgggcttcatacagatccacaaagcagaaaggccctccaagacaaggtgggaagctgagcccgaagacggctccaatgtctccctctgcaggtgtggccargatcccctcttgcgggcacgtgactgcctcattcacaaatcttgtcagcaggcrgaactggatgtcttcatctgaggagacttcagacttaggaggcatcttcagacttgctaaaataccgttcatgtcagaattcaaattcttattcttcacactctcctgatagatggaaaagcccttcccagactggcgacctaggaagcccttggacaccatctatgtcagtagttctgggtttccacctccaaactgctccccaaaggctttgcccagatctttggccacatgtttcgctacatccacgccaacttcatccaccagtgtggcrgcacccacaggaaggccaaggcttgtggtcagggaatccagcttctttgggtcaactccttcctggaggattcrgatgacttcagacatcatgggtgcaagacacctggtrgtatagaagccaggtccatccttaaccacaatgatgaccttcccctgcttgagaccgattgctacagttgaagcactggtgtctttggaagtcttcttggttgtgatcatctccagcagctgcatcttgtctgcgggagagaagtagtgcctgccaatcaccttctcaggtcttttgctgacagcagcgatttcactgactgggagaggagatgtgttactagcaaagacgtagtgatctggaatcactgcttctacttcctttagcactctgtgcttaaaactaaggaagttgtgatggatggacagcatccatcaccatgtctgtctttcaaaaccttggtaatcaagcttcccagtcaagttgctgaagatggaatccctttcaaatgacgttagagctttcttctttactttgtcattcaatcctttgaacacttgttgctgtcctcagcctaacccagtgagtgtggcatctttaagtatagtctttcgccccttatccacggagacttgggcaatgcctgctcccatcatccctgcaccaggaatagccagatgcttaacatccttctgtggagctccagatgtattcttcttgcacaggacctgaccatggtagagtcccatcaaggcctttgattctttggtcattgcaagctctccgaatttctgagattcagagagataaccagcatcgctcccttgctcaattccagtctttaccacatcaattattttcagaggtgtgggataaagggaaagccctttagtccgctttcacactttttcttccacttttttgtaaatctgttgcctgacaaatggaatagtcatggcatacgctgttaatttttccactaatcccttgtctctctttggagagatcttcttatcagctagtcctttgggaaagtaattgcaacttcttctargtatttgattgtccattcctctggaagttttagtcctggtcgcagagattccaccaattggtcaaccagtcccattttctttgccctgtctgcacggatgtttctrccagtcagcatcatgtcaaaagcmgcaggcacacccaccattttgggcagcctttgtgtgcctcctgctcctggtaagatccccagcaagacttcaggagcrccgaatactgtttttctgtcttttgttgctattttatattggcataaaatggcaggatccactgatggcagtcacaacaggctttatggacttttcaagtttctcaaatgttctctgtgcttcttgtggtatctgtgttacttcttgaggggtcttgcaagtggctaaaatgttgatatcagcacctacaataaagcagcctggctttggtgagataaggatggcacttctgatttgatcactagcccagatttcattcataacttccgtgaactctgaatgcagctgtttgtttattcagcgtatttatctttgaatggrgagagttaatttaaataactatcacatcccctttgactccatagttaatatgggttctggtcagcaaagcaaaggaccctgtaaaattgcggcgtatataaccttgggagcggaggatcctgaaggcagagaagtggctgaggctgccaatcgccsrgtagaccaccatgttgagctgaagagaacagcagtggagagcgcttctctttaatttcattcttatcttttgtattagctttttaaatgtattataaccaaggagaatacaaatgaactgacttcacagtttttcyctcagatttcagaattgtactgttcttaagctccctcctaaaacttgtctcttttattaaatattttaatatttaatggctgaaaatctttgtggtcattattactttgttgcagctttattgagatrgaattcacataccaaatagttcacacaattaaaagtaaaattcaatggtttatagtagatccacagtgttgtgcagccatcaccacaattttagaacatttatatcatcacctcaaaaagaaccccatacccattagcagttattcctcattttcccaattcctcccaatcctgctccaacaactctaggccaccagactaatcgactttttgtctctgtagatttgcttattctagacatttcatataaatcaaattgtgtgatatgtggtcttttgtggccgactcctttaacttagcataatgttttcaaggttcacccatgttgtagcatgtattagtactccattatgtggatttaccatattttgtttttccattcatcagttgatagacatctgggttgtttcaattttttgtctatcatgaacaaggctgctgctatggcacttatgtgcaagttttttttgtggatatgtgtgtttatttcttttaggtatgaacctagcagtggaattgctgggtcatattgcagttctttgtttaacattttcaggaactgccagactgttttccaaaatgactacaccatttacattcccatcggcagtgtacaaaggttccaatttctctatatcctcgccaacttgttttttgctgtagttttgattagagccattctactgggtgtgaagtgatattttgatgttgttttgatttgcatttccttgatggctaatgacattaagcatcttttcatgtgcttattgaccatatgtatatcttctttggagaaacttccattctttttttttttttgagatggggtccggctatgttgcccaggctggtttcaaattcctgggctcaagggattctcccacttcagcctcccaaataactcaagtggattgctgggattacaagcatcatgccgggcttcaattttttctttttttttttttgagatggagtctcactctgttgcccaggctggmgtgcagtggtgtgatcttggctcactgcaacctccacctccgaggttcaagcaattctcctgcctcagcctccagagtagctgggattacaggcatccaccaccacacctggctaattttttatttttttattttttagtagagacggggttttgccatgttggccaggctggtcttgaactcctgacctcaggtgatctgcctgcctcggcctcccaaaatgttgggattataggcatgagccaccgcgcccgacccaactttttttttttttttaaagagacggagttccgctgtgtctcaaactcctgggctctggggatcctctcacctcagcctcccaattagctgagacaacaggcatgtggcactgcacctggggctgtctattcattttaaaatgggcaatttatcttattattgttgagttgtaagagctccctacgtatcctggaaccaagccccttatcagatatacaatttgcaaaaatsttctcccattctgtgtgttgtctccttactttcttgatagtgtcctttcaagtacagaagttttacattttgatgtggtccaatttatgtattttttcttgtgtttcttgtcctctttgcgtcatatctaaaaaaccattgcstaatctaaggtcacaaagatttacacctacgttttcttctaagagtgttatagctttaactctcgcatttaaatcttgatccattttgagttaacttttttatcggataagtagagggtccactttccttcttttgcagatggatatcccattgtcccagcacaacttattgaaaagactgttattaaaaaaaattccatccctcagcatattttcacaagtcatgaatttcataagtgagtagaggcaactcaaagatagcaaacaacttgattaatatcattggctaataaagggcaccgtaggaatttaaaagccttagattatctgcttccaaaacccatacttattccaatataccagtggttctcaattttgagcctgcgtcagaatcacctggagggcttgttaaaacactggttgctggggtcccacccccagagtttgattcagtaggtctgaggtagggcctgaaattttgcttttctgtcaagttcccagggattctgatgccactggttcagaggccacactttgagagccattgtaatgcactgcgatggttcccctgtgtatcctgatgctcgaagagccttcagttggggtggagggagacacagagagaataatataaagacaatagtagtgacaaagggctaagtgtgcatggaggaagaaaacagtaattctgattagaatattgaaaaaagtttctgcaggacacattatggaatggattggtttatggataatctcaagcatttacctccacctggtgaaatcagacagcaactgtctcttcttacatttatttggccacaagtatgcttagagcagctaagctcttgagcacataagcaagtatatggcggagtgggtggtggttccggaatggttgacgtgggaaatgcagagagagcacttaagtgtcagattatgacactgaatacgggaaagtgatgggagtgaggctggttaaaatttttcacccacgcagtctccctgtgttgcccaggctggagtgcaatggtgtgatctcggctcactgcaacctctgcctccagggttcaagtgattcttgtgtctcagcctccccaatagctaggattacaggtgtgtgctaccatgcctggctaatctttgtatttttagtagagacagggtttcgccatgttggcctagctggtctcgaactcctggcctcaagtgatccgcccgcctcagactcccgaagtgctgggattataggctgagccgctgcacccattctccactcatgcttatatcccacagtcaggttcagtgaatcgatgccacttgtgtgagagactaaaataaataatggatttaatttgatgactttttttttgactctgaatctttcagtgtacaaatgaaatcttgataaagaaaatatcaataatagcagtatatcaatgctttcctaagaaactgtgaaatactgtggtgatcttatcctggaacaaactaggatgagccagtctttattagattattttgtactatatttatacttactttgtgatcattcaggaggacccttcatattgttgaatttggtaaaatttccttgcaggcctaggttaatggggtttacaggctctcaggattgtgtgccagttgtcctctttctaaggtagttttattcataaaccacacaggtttttttcaaaaacacaaaaaacacagacaaacaaacaaaaaaaacagaggccaggtgcagtggctcatgcctgtaatcccagcactttgggaggccgaggtgggtggatcacctgaggtcaggagttcgagaccagcctggccaacatggtgaaacccctttctttactaaaaatacaaaaattagctgggtgtggtggtgggcgcctgtagtcccagctacttgggaggctgaggcaggagaatcgattgaacctgggaggcagagtttgcagtgagccaagattaggccactgccctgtaacctgacagagggatactctgtaaaaaaaaaaaaaaaaaaatcagagattttaacaggtcaatcttgaactatgtgaacaacttcaatttataaaagagtaaaaaaatcgttgaattacagaactatgaactgactcctttttgatgcagcctgattattaatagtcttgttcacagctgtgcccaaagtagaacatcacaccggcactgggtaagtaaacaaaacaggccagtaactctgccaaagacctagctattaatggcaatttatttttattacatatttggaatcttgtcatcccagaaggtgctgaagtagaaatttagtaatacttgatttaagaggcagaagtcctgtaagtttgcagctattaaaaaatggaaagaaaagaaaggttacaaaggggaggggaccatatctgtgtttacatttgttcctttcctcaaatggaaggtagaataatgtattagaagatattttaaatattaatatctaactgaaacctgatattagagaatgagaaaattttgctgaaaattaattttattttcttttaatttatggtgttactataccttttagatttaggaaggcagaaagactgtgtgtgtgtgtgtgtgtgtttgtgtgtgtgcacttgcactttggggttccctttctatggatgtttcaggatctgwggataaaggatcacagtctagcagaaagctgggtttcaggggacgtcaaaggtaatttcatgactatattagtagataaatcsaagaccagagagcatgctgaatggaggacatttacatagtctttccaatgctaaaggaaatagggaagtgattatttcaaaattacctagaggatcttgagcatagtatgacttaagataaaaatctcattgtttctgagagttggcctctttctcctctccagatgaaatattttttcctttttttctcctccgtggaaagaaattattaattaaaacaaaaagacattgttggaragggaggttttttagtcgcctaagagaggtgctattagtacttgtttatttaaaaattgacttttggtcaaactaaactatacaactttttctttttcaatccttcttccctccatccctcttcctttctttcttcctcctactttttgcccttcctccttccctgatcccttgttttatttagtttatgtcattccacagagctcacagttaccacctggtaggtacccttgacattctacacagttggtaaatcagtgtcataccagttgctaaataattggccaggaatagcctttatcaatgaatgcttcttctccttttcactctccattgaataaagatggaaaccagctttgcctcctttttgagtatggcctgttgatttctaatttgtcatagctcacatggaaaccttgtgatgcgcttgagggggttttctcatggagacctcaatacctgtggaatgtagggcacatggcaaacagatctggtttatctgatcaagtgattaatgcaataaaaaattataaaaattcaaagtgaaaagtgtgctcttgttactgtgtgtggtaagtagtttagtggattctggttctacccattgaagcactatacctgtggctggtgatggaggcgaaaatcttttactggaaggaatgggaagaagggtagtgggggccagagagtctctacgttcctccaggaggaggaaaccatctctttaaaatgacagtgctttccttccacgaaagaaccataatttttctaatcattggtaactattttggtctttcaaatgtgtcaacaacttgtacactggaacagcctctgtctacaggcagagcaggattcagtgatttttagaaggcatttgggccccagccagcctgaaagttggggtttacaactgtgttaaacagaagagattttgtttgaaagggtaaagcacatcatggaaaagttgaggaagaaacaaaagagaaagttgcaaacttacctttatgtttataagaacagatatgttcttgagagattgtggatttttaaaaatatgatttttttggtggtgggaaaattgtagacattaaatatcttttttaagttatgttgacaccttacaattacgtaatcctttataattttcaaataaatactaacattagtaagcaagtactacataccaggaaaaattctagttgctggaaataagacaataaagaaaacagggattattttattaagtcctctcaataaagcctatgaatcagttactatttttatctcgattttacagattaggaaactgaggcacagaggagttgtgttacttgctcagagtttccatagtcaggaagtggggagtaaggtttgaaatccagactccaattccagatcctgtgctcttggcaccacgcagtcctgtctcaggcaggcagcattgccactgtgcactttatcctaaaaacaaccctctgagggaggtgagaaaggtatgtttcttcacatttaaaaaatacgaacatgtttaaaaagtaaacagtgatctatttacatttgtatgctgggaagaggttctagagtcatcatcttcacctcttcaatgcttcagtcattggcttcccagcctctaagcagccatgtactccatttctttttgcaccgttataaccagtgattttctcgaatccaaaatctgtaacgttcctctgcttaattccctgcaggtgctcactgttacacctagaatcaaacccagacttcttcgcatgcgcttgagattcttctggctgggtccctgcacacctctgcagtgtcacacttgcactctctgagccctagctctacagggcttttctcattttaacaaaacttgctctttcttgtctctcacatgttgtatatgccagttccctggcctcaacattcttttcttcccctcttccctcttactctacccttcttaagtggctattcttgtcccttcttttcatctctaccttgatgccatgtctctatagtgtgttgtaattgcatgtccaacgccacttttcctgagtccacgggcctggaaaccatgtgatgctgggtccaaagtgaagaattgggggatagagaacgggaatcttgttcacacagttctctccagtacccagcatggtgacccagaacatgtacatgtaaggcatttgtacatgtaatyaattagcaggcatgttttgaacaccagcttcattaggagtgatgccatatttgaggcagaaacatagtatgatggagaattcaagaggctttggactcatagctcttagytgaattctggctttatcaggtactacctttgaggctttaagcaagttacttaacttttctgagcttactttctcaaataaaaagcaaggataactaaaatgctttggaaactttcctgtgagaaattgatgygtaaatagataattaagggacatkctaggagttgtgttacaggcatgaacaggaacacagaggaggggacaaccaacacagctcaagaggtcacagaagatgtcatgtaagccttttctttttctcagagcctctggcatygacgtgcttggagatacctgaaaattgggcagctgtttatctttctggaaatgtttagtcaaaggtcttctgagcatagagatacaggaagtgatcttccattcatgcatatttatgattctattctaagttaaattattaatagcatttgacgagtattctattttgatatggacaagaaaaatcgttcactttgaaacatttattgagctcgcttatagcamactgggaaaaaaagtcttggttttgttatttttctcaaaagatttgtatgtattttcctgcaataataaaccaaaaataaaatccatgaaggatctagaacttttaaggctatgtaattcatattttaagcctttactgtttcataaattatttaaataatttgaggaattactattgaagagagtcttaatctgtcaaattgatcagattggatttatcttgaaaacagttctgcatctttggataaaaatctattttattccaaagaaagctttttttatggcaaataaaagcaaaggtatacatttttaataatcttatgataaataggatgatctgctttaaagaagagtaagtttatagagtcrgagtatacttgtacacacctcaaagtcaaacgtttgaaaaatgaagtttgttatgattctaagtgtagtttcgaatgtaagaaaaagttaaaagtgtgatgcagtcaggaagcttggaatattctcctgcataaattatatgtgttaacagccttagcagtattctcttgtaggccacttggctccatctttaaggtagtttgatgaatattgactggtctgcaaaatttgacttaagaaatgttgagccaragtatcctggataacgtagatatagagataaagtaatatatatatatacacacacacacacatacacacacacacatatttacatatatacacatatgtacttatttacagtgtatataaaaaataatttagargaatgcatccagaaaccaaattgagcttgaaaagtaccacctcacatgaccgcagggacagctggttattgtcttaggatatatttgcattttgaagtgaactttagtgacattacaaaatgccagattggaaaaacagccattatttaaaaaaaaaaacaaaatataattagcaccagatgaatgagttktctcataatcacctcattattacaaattaattccaaatgaatatgtttgaacarggcattggttttgaatctttaatttatctcctccttagccttgctgctgacaaatcataaatagatataattaatgaaaatgttaatagtgccggtctccagaatatctctagatcactgaccttctgattggtggaaaaacctttggagaatgatctttacaggattccatggcagtgagttaatctatttttctctacaygggggcagcagacgaggtgagtttcttcctctgtcatttgtaggatctactgttattctctggagagctattgtgtcagaacrgatttggattattttttaaaactactgctacctagagggtaattttattaaattcctttatcayttggattaaatacagcaaaatgaaaccarctcctcctgctcagaggagctgtcaccacaatctttaatattttcttagcattatttcctttaaagtatgctttgggacaattaataatgactaatacttaaattttcactatgagtaaaagctttttggtaaacatttattatatattccatgtcttccttttattctctaattatttcacctattcacctaattattttgtagctcaagtgtataatttaaatgatgtagaaatatagagatcaaaattaatacaaatacatttatatagtgatgtgttacatgttatatttgtcacaaatatagcatatatttgtttgtctagtacatatatagtatatacagtacatatatattayatacatacrtatagtacatatttgtgtagtacacaggtatagtgcatatatatatatatttgtcacatatatagaagtcctgtgtcttccttttaggtaacaygggadaatgtaagtttttgttttcggtccaagaatgacacagatttttttgtttgtttagttagttttctttaggatctagatcccccagaggtaaacactaaatataaaaccrggaattagaagctggccttgggttctgcagttctaggcatggcgttaacgtttttcttaaaacttaaggcccagactacacaaggaatcttcccgcctgcactcccctgccagctcagctacttccctactcctgcgccaactcaaccgtaacagtagctgagacgaaagcattgctctgaagtaaggtgtagggaagctttctggcttccttaataaagttacacacgatcttctaagcttggcgatggagggagaaggcacatgggagggtcttcaccgatcctctggccctgactctgcctacccttcattcattcacctgcmcctctgggggctctgggcggtgaccactgccactattgggctagctagtggtgggggcactgctccccttaatgctctggcccctaggggagacacaaaatattgttttaaatttccagtagtgtagctcatggcaggctgaggcacttacacaaaagggtgctggaggctttagggtaacacagtagaaatcatcaaagggagaatatgcggtagacaatttaggctcttcaacataacttgcttgatctccagaggccccaaactctgctcatgccaggctttgcacatgccgtttcctctgcttggactggtcttccccatcattgcctggctatyttcttctcaattactagatttcacagtaggggttccgccttcttgattcccccggcctgggttatataggtttgtcctagatagtgcggtggccccacatatgcctcctcatcaacctgttttacagttgtttatcctgttaggccataagctcagtggcaccagggaccttctctgtctctctcagcactgtattctcatcagcttggacagtgcctggcacacagtggggactcagaaaatattttcgaatgtgtcaatgagtccatgaatgaatggmatttggtaaaaaagagaattctgacctccagcttctctttatcytatgagakgctttcttcactgtaatcttgcaggactggagttaggttttatttagaaagctggcaggtttatttacaaaagatgcaaataaaccactgggcttaggggacagaaagaaagagccattttcttagactagaaaataatatggaatggattagggggcagaagaaggaatgggtgagtggggtggaggaatggcaacagataagatgttgatggttataaaaattgggaaactgtccaattctccttagtttagactttaaaaaaaatgagtaaatttcctagaagtcaagtgtagccatatgaaaatatttggactaagttaaatataattcccttggtattattgaattgcctttgacttggagacagagctattcattatagagcagtttctaagagcctgggcttcacagagattatctcttttcattcaacratgtaatgaagtaggaattatacttctattttacagatgaagaaatagactcagagagtttaattgactttaggattgtaaaactacaaacagtagaactggcagccattcattcattccacaaatatttattggcagtattttttttttttatcattagctttgtcttttttgatggtagaaaatgcatttcatttagaactatgattttagcccagagaaagtgatgtagaaaaaagcactaagttaactagatcatatcagtataaatgtgaagcctcaccattttactcatccaaaagtgtctagggccttaagttcasttccttttattacaactttaatattttgtctgtcttaaaaaaaaaaaaaagacattaaatctccagcccctggtatcgtgcttggaacatggtgggtacttaataaataatttgtagtgaatgggaaaattgagaaccattagtcattttctattcagtattaacaaagtctgacttacttttttgtttttgttctgtgtgggcacatttcactgagtgcaacttatgaaggacctcaagatcaaattcatgtcgtactcttggaattgaattctgacaggtggactgagagttttttgtcctctaagccttcattctaagacagatgacaccaatgtaggtagttattcagaataatrgactcaggaatttaataagggtgttgtttaaaacgcaaatatcaccaaccagtggtaaagcaaacacattctrtgtgaatgagtacagcccactgattgacattcaagayccattggaaaaatcaggagacacaagagtgggaagagtgcagattggagcagctatccaaaaatacagaaggccagaaggtggtgagaaaaatgtcagacaacagattgtggagaaaaataaacaagccaagaaaagtcctatttggccttaaaagaggcagatggtgacaggaagtgttcagtgaggagtgattgtgctgaaaatcacaaagtctataaaattatccatctgtagtttgaggtttttggggaaaattaaaactctttgctagcattacagggaagggtgatagcacacaaacagaatattaagtaagtgtgtatttgtgtcaggataatagaaatgagagatgcgttattccattagaatagaagttttgtttacttagagattgtgaccaaaattataaaacgtgttttgttttgcataaaagcagttgaacttgtattaaatctgttctttccacatttttgatgtaagwaagaattctcccaagaatgttaatagrttgctaaggtagcaatgataattttctaactgaaggaatgtactaaacatttttttccattagagagtttttttggaatgggatatagaaaatgacaaatcacaatgctaactttaaagcaaagaattttaatttgaaagttgagaaaatatagcagggaaaactaatcatttggaatagtatgagataatttgaaaaaaatattataaatattttaagatagatgtggttgaacatttagaattgggaatcattttttgatagtttgggacctagttttctgtgcttaaattttaattcagtactacttactccatggtcttctggtggtgtgcaacttgaggaatcaaataagccagggtttttacaactcttttctaggtcattaaagcatttctgctatgtgcctgaatatgtctttgatttcatgcataagaaatattagatgcttcattctccttctttagaagaaatactaactgaatatgttggattcttctctatttttattgtttctctcttagatttttaaccacagttgctcaagtctaagttttgtattttaagtttagacgtgtaaagtaaaaggctgggagctgagtgtgtggtgatgcttcctccttttcccttgagaactgaaggcaaaaaattaaatttattataaaaatttgttttacttttaaagatgtgattttccagacagagaaacaaactcatgtatcggtgtattttttaatgaattagaagcatgaaatctaggtactttatgtawgtcattttatttaatcctcaaaataatgttttaaaatagttattattttcattctcattttataattggggaaatgtaagatcatcaaaaccaagtttcagtttcctaaagtcacacacctaatagcagagtcaggatttgaactcaattccgtgtctttcaatggcagaaggggttttgcacattagattacataagccattgtccattgactccttgtcctttgcacttgtccaagastggtccccaggcacaaacatgcatgtgaagaaagctccagargagattctgattcaaatctccagttgggaactamtacatcaaacatttcaaaaatcaatcaaccaaccaatcaacccagcctttattgtatggtggtakttaaaaatctaaactctattttctgcaagttgctagccaattgaaccaaacttcttcactggataatatttttaaacatagatttagaatgcctttttttcaaatatgaaaataaaagatataatagcttatttctgtgatatatgcatacataattgcttcccacctaatttttttttcacttttgtagccttatatgtgtgactgtcttaatatctcaaagggctagtgctatcctcacccttattcttagattttatctctttaattattttctttgctttgttattcccaccagtttgtcttctagaaggtcttcrtatcatgttatcacttaataaacattctcttttttattctgagtgaaaatgcaccaaagtataaatctgagaaaaagtgaatgttttataacttttgtttctcagaaaattatagcagttatgttaatattggtgatatacttctcattgtagtcattcctatgctagcaatatttttattgctactgtggataaattatttcattatatttttaacttgttattgttggagtaaaacaactatttatttttcatataaatattttgtttttggcctttttgctgaactctgaattctaatggctgtccagtttgtttatttatttctttattttatcatctccattttacaggtgatgtctagtttattttttctgttttttttctgagtgtactatataaattgtatacagtgttggtactttatatttttaagtttatatatcgtaatttattcctatgcataattgaatagtagagaatttctagtatactgttacatagtatgtcttttccctgattttaatgggaatggcatttctgtgctcatatgcataktcaagcattcaaataaycattcttctgaagttgcagattaggtactttaagcatttggaataattagtttttattaaatgtcattttgatttaagataattttttatttataggatactaaaagtaaactttggagcagatttttaaaacacacatttctaytttctgacattttacttaggttttcatatgtatattcataaaggaaattggcccgtacttctctattttatataawttttatcacacttagaattagagttgtaatttattttcaggaaataatttcattatgatctacatatttgttaatgtcgtgagaaatagctcaatttgggcctgcattgtagtggaaaattatacttcttaaagctctgcctgattattagttacttccttttaactgcctaaggctgatccaatagcaagacacaaacctactgagtgtgcagtagtaaatttctcattttctrtagtaggatttggagtcttcgttgctgtgctctataggttaaaaacaacacatgtattgaaaggtatacttttaggacctacgtgcctggccatagcctggccatagctcctggtcctcctgtgggcagagaaggggccaaatcttagttggtatctcttctatgtttggtcagcaaataacctctgcctctattccacctgctggacttgacatttgtaacttttgtcttctgtgtcttgctgacagagatagggctcattcctagattggtgaattgcttgctctcctccaagttgtccaaaaaatcccgcatatttacctcacagccctgcatccttcttgttcttacagtaaggaccttgaagtttccttgccaccttcacatagtataccttttcacccaggaagggacaattggagttgtagttatagaattcttaaagtttgatttaggctaaacattgtgctcacattttcatccatcttataatgctacttaatatcatatcatgatttagaacacaaattacataaacagaaaggcatatctggatagcttgtgctcttatatgatgttcttccatttttaactaatgttaatggtgcatagcattccattttaatgcctttttctctgttgtttccattgtattgtttttaacctaattaattatttctgttttttaaaatagttttgtaagaagttagtctaggtcagcattctgcaagctgttctcagaatactaaaaaaagggcaaataagcttgggaaattgtactaaatactctccttgaggattcaaagtacatattaacataagaaaagatctgagaagttttaaaataacagggaaaacttttgaagtttattcaatgattaaaagaacttaaaaataaagaacttatttgtgtagaggaaggctttttcttggcacagttattaaaattctctggaatagattttaatttttttcttaacaccaatttaagaagtgctagtctatttcatcattatcattatcactttaaataaagagcttaggaaattacttactcaattcatcgttgttctttcatctcatttattattttttaaatatattttaattattttttatctatttaaggaatcttctctttacaataaaaaattgtttggttcctttatttttatatttaagcaggaaagcaggaaaagaattaaagttatggcattatctctgagtaaccctttgaacaatcctaaagctttttatatttagcaatctcattattgctattgcaaaccagagtatctgagataagtctcagtcaatttaggaagtttattttgccaaggttaaggatgtacctgtgacacagccttaggaggtcctgatgacatttgcacaaggtggtcagggcacagcttggttttatacattttaggaagaaatgagacgtcaatcaatatgtgtaagatgtacactggggccaggtgcggtggctcaggcctgtaatcccaacactttgggaggccgaggcgggtggatcacaaggtcaggagatagagaccatcctggccaatatggtgaaaccccgtctctattaaaaacacaaaaaattagccgggcgtggtggcgggcacctgtagtcccagctactcgggaggctgaggcaggagaatggcgtgaactcgggaggcggagcttgcagtgagccgagatggtgccactgccctccagcctgggcgacagaacgaaactctgtctcaaaaaaaaaaaaaaaaaaaaagatatacactgggttggtccagaatggagggacaactcgaagaagggaggggtgttccagataagagacaaacaaacattcttttgagtttctggtaagtctttccaaaggaagcaatcaaatatgcatttatctcagtgagcagagggatgactttgagttctgtttgtcctttgtcctcaagaaatgtccctgtggacaaattgtgagggaggtatgtagcttttttatcttagtagctatcgtttttaggaatagaatgggaggcaggtttgccctaagcagtttccaggttgacttttccttttagcttagtgattttggggtcctttcacactatttyataaataaactatttttaattttcttctttgatctcatttattttttaaaaaagttttatgcctcttttcaaagttttattaatttccagtttcatcatatggttattagagaatgtgatctatagtctttcttatttataaatttataaaatttacaaattttgtttctaaaatttatcaaaatttccctatgacaaattatgtaattagctattgtatttcatgtatatgccagaaggtgaattccctgttgctagattaccaagataaatatatgttgattcattttattttattttattttattttttattattatactttaagttttagggtacatgtgcacaatgtgcaggttagttacatatgtatacatgtgccatgctggtgcgctgcacccactaactcgtcatttagcattaggtatatctcccaatgctatccctcccccctccccccaccccacaacagtcctcagagtgtgatgttccccttcctgtgtccatatgttctcattgttcaattcccacctatgagtgagaatatgcggtgtttggttttttgttcttgcgatagtttactgagaatgatgatttccaatttcatccatgtccctacaaaggacatgaactcatcattttttaaaaaaatccctactgtccttattatgtccacttgacctgttgtaagcaggtggaggtgggttgctttcttctgtaattgtgtttgattattgcctacttagacttctaaaggtttttgccatatataacttcttgctgcatttttttttagttatttactcactagatattttgccttttcaaattatgaagtggtcctttcacctaaatactgcttaaaaaatattaaagtcaattttgcataattagcttaccttacttgttttttattttggggtttgtttgatatgcatgtacatactctgtttttttttttaagtctttccgtgtcattttatgtatatctatcagacgttgtagaattagttattttctcataatgtcttaggcttttttcttttgataggaaaatataaatgacttatattgattaccataattatcatgtttgattttattatttttatctttattttttattactgtttgctttctattctgtattttgcaataaagtccagtttttaaatttttatttatttgtatttgtatttatttatttttttgagatggagtctcgctctgtagcccaggctggagtgcagtggcaccatctcggctcactgcaagctccacctcctgggttcacgccattctcctgcctcagcctcccgagtacctgggattacaggcgcccgccaccacgcccggctaatttttttgtatttttagtagagacggggtttcaccgtgttagccaggatggtctcgatctcctgacctcgtgatccacctgcctcggcctcccaaagttctgggattacaggcgtgagccaccgcgcccggcccatgttttttactttgagtttctgtaatgatttaaaaagtagaaactttttttttttttgagacagagtctagctttgtcgcccaggctagcatgcagtgatgcgatcttggctcactgcaacctacacctccctggttcaaatgattctcccgcctcaggagagagtaatcccagagggattacagatgtgtgccaccatgcccagctaatttttgtatttttagtagagatggggtgtcatcatgttggtcagggtggtctggaactcctgacctcaagtgatctgcctgccttgacctcccaaagtgctgagattaccagtgtgagctactgtgccaggcggaaacttctttttaattccactgttgcttactataaagataatatagacttaaaacctctttattattatgaaagtgtaaatattattttaatatttgttggttttttgtatctagaagtttttactctgacttttaagctagaatatttttatcttgttaaaaaaaattactatttcttcttcactacatcttctagtttcttgaattaatttcttgagtctaatgaatttatagaactttgctcaagcaatattttggaccaatatttcctttatgtgcttacagttagacgacaaggtgaaaccagctttgcctccttcctgtttaggaaaacagaaaattctacctgcccagtttttagttggataaaaggagcaaggaataaaaaaaatattttggcaaatttactagatattgacaataaagtcaaatcatccaaagattgatgaaaatcaaatgtttaaaagcaaatatttcctcaaaaaaaaaaaaacacttaattccaatagagtcctagaagaagttttagaagtagttctcaaatgggtgagatcttgctacctaggggacatttggcttgtctggagacatttttggttgtcacaactctggggagagtagggatggaaaggcagggaggaggtgggtgctcctgacatctggtggaggccatagatgctgctaaatatcctacagtgcaccaggcagcctctcacaacaaagaatgatctggtcccaaatatcaattatgccatggttatacctgtgtagcttacatgctacctattgtgcctgaatgaattgcttacttaaagacttcagcaatacagttttctgtattgctctctctgttttggatttcagggctctcacaagctatgatcaagagtcttcagccaaattaaaataatggatcattttcccacactgaaaaatattctctaggggaatgtctttcaactctagaattttaagctctattcttagtggtttcatatctataaatactgttccttcaagaaggatawgaagcaagctttatttctgtatttctaaaaagtaaaattgaacgttagattattggaacaattatttttactgaattatagtttaaggttagcctttgttatatataatgatttattctgtttaaacaggaaaaatgttaagtccagcctccagctatggtgattaartcatctcagttgctgtgtgacatctacttcttgtttctttccttgctatttaatacttaaagtgtggtgccccacttgtttgccaggagcagtatcacatcagactctgctgttaacaaggtccccaggtgattcatatgcacattaaagttcattttgcacctcttttggcattgactttactttcagtggcctattttatgtaatgtaaaattgtgtaggctgcctccaattmttttagaagtaggaaaaggcaaatgtcttttgtgtctgtttgaagtaggctatttctggattaaagaaatacacatgcacactcaccggtttgagaaaattcagaaaagtacaaataatttgacacggttaaccctttgttacaatctcaccaatacactacaatgtagcagtctctcgtgaggtatcagccagagttttttgtctcacaaccaagaaaattaaggagcatggacacaaagggtgaggttggagcaaaagtttagtaagtgaaagaagaaagctcttcgaggcagagagcgggcctgaaagagagttgctgtttttatagttgaatgcaaaggcttttacaggaaaccagtgagggctgggagtctcatttgcataaggtgcaaatttctggtggctccaccccatcatactagtgcacatgcaggcccttagcttgagttactccatattgctttgttccctttactgtgcatgtgttagaggacggaattttccattgtgggcatatctgggaagtcagctgtgtaacctttcttatatgtgtggctgcaggcatgtcttaggcaagccccytgtgcaaaattatctgtgcctgcagcttgatttctcaggctgttcttttgattgaaagaattcaactgagaacccatcctaactggctgcctgatcagtttcttcctttctcttctctcactttrgcaattacctttttgtttttttttcctgtgcatatgtctttgtataaattataattttgtccaacctttttttaaacattttgtcataaacatttcctgaaccattttctataaacattttctcaaccattttctataggtatttgtaggtaatatcaatggttgtataatattccattttatggacatggcataatttattaaatcactttatagggtataatttctgaattaaaaagaaaattaatatgggcattgggtaagaacctacacatattttgcatttttttcctgaatattagatcctctaaaggagattgtcttccatagcaagtacagaactccctgtctatgatggtttatcccccaaggctctgacggaagtattccattgtatcactcacacaaaacaaaagtggatataatacttctcaatattttccattggatctcctctagcaatagggaagggtgatttagaatctctgtgaatctcaggctgtagtccaaagcacccatacattgcacatttgatatttaatttagatgtaatttcttcttgaaaaaaatgtgaatttgtattgcattctgtaatgtataaataatgttgtttattacttatgagtgaaatggacactatctttaagttctatttcagattatgcatttttatgctgtattttcatctctctctctctctctttctttcytcttttatttcttttttatagacaagcttttgctctgtcacccagtctgsagtggagttgtgagagcatagctcactgcagcctcaaactyctaggctcaagacatcctcctgccttagcctcctgagtagctgggactatatagrcacatgctgctatgcctgactaattttaattttttaaatgttaatttttaaacttttttcattttttgtaggggtctcactttgttgactcatctcaaactcctgggctcaagcaatcctcagcatcccaaagtgttgggattataggcatgagccattgtgcctggctgtcctgtattttcttaaactccttgtcaaggtttaagtactccaatatagaagcaaccaaataattgaattgttgctcaaagaaaaaagacttactgtaatgggagataattttccctttgacatcacagcataaagacaacttggtctcccatatacatgtattacccatggtattagtttcctgtggattctgtaacaaattaccacaaatttggttgtttaaaacaacggaaatttatcctttgcaattctagagaccggaagtttgaaattagtatcactggactgaaataaaggagttgtcagggctgctgttccatcagagtctctaagggagaattccttcctttccttttccagctcctggtgggtgccagcattccttgacttgtggctacatcactccaatttctgcctttgtggacacattgtattctctttttctgtgcttgtaatctccctcttacaaggataggtgtgattgcatttagagctcacccaggtaatccagaataacttccctattgcaagatcattcatttaatcacatctgcaaagattctattgtttctgccatataaggtaacattcacaggtttcagggattagggcatggatatctgttgagaggccattttttcagcctaccacactaatctttactctttctgttaatcaattgtgtcactctcctgtcctgtgttacttatctattgccacatatttaaccacccctgcaactcagtggcttaataacaatcatcatttgatttttttcataactctgttggtcagcaatttgggttgggctcagctggaaagttcttcagcaagtcttttctgaattcacttagaagctgcctggttcaagcaggagcttcacttacgtctgactgttggtactagttgtcagccaggccatgtggactcggagttatgattctttgggggcaattaggttaacaattttctgtgtctcctatttttaataattttggaaatccaagtttatacaaaaacattcccacttattggaaaaattctttgcttttttaaacatactttaaaaattattgctgggtgcggtggctcacacctgtaatcccagcactttgggaggccaacacgagtagattgcttgagcccaggagtttgagaccagcctgggcaacatggtgaaaccctgtctctacaaaaatacaagaattgggcaggcatggtggtgggcacctgtagtcccagcgactccagaggctgaagtgggagaattgcttgagcccaggaagtggaggatgcaatgaatcgagatcgtgcctctgcactccagcttgggtgacagagtgagaccctgtttaaaaaaaaaaaaagttactaagcttctgtcatgttacaaacacttcaagtttataggaaagatgaaatacacatacacataatgtaaaaacaataataagcaaccaagactgattataagaaattatgtcattgtttatgctgtgcttgtgctttttgggtttttaaaaatgctgtatagatgactaacaggtaagaaacatcttattcttaatacctaatccctaaggaaatcataacctcatttggcatgaggccagccctaatcatgttgggagaaattctgcaggtaattttcatgtacctagagaatttctgattatttgaaagctgaatggaaatatcaaaaaataaaaataaaaataatgcccttattattattgtgctctttaaaacgaattgattgtagtctttttgaaaatcagtttttagtagctgcagaaatcatacagcctagaggcagttttcattttttaaaaaatattgcttgtaagtaaccatatgtggccaaattgattgcatatgttgactcaatttttggaagaagtaatcttagtcatacgtactacaggacctccttgttctctgagaaaaatgtcactttgggaaatttgcacaaaaaattttcaaagtagtgcaaaacaacatatgacaaaataacataaaattttttgagttgagtttccaaatgtaagtgcttgtgtgggatttcagaatgatgtttatacatatattctgcaagatcccatttcactgacattttattggtaatagatgaaaagttttattaattaaaatttgagttttaccatatctgacatgaatcccaaaaagaagataataaggactttcaaaaatttataatataattgattgttaaaattgtgtggtggtaacatatagtttgcacttcatgttggaatttgaaaaaatataaatcaatatgaaagtaatttttattatacttaatatatgcctcataaaagaaatgcaaaaagaaaattatttaaggatatacatttcagacctactaaaagagagtgaaatttagggtgacaaagctgtacttcaggaaaagaaaaaaaatgagacaatgatttaagttaaatgtttgaatttagacaccaaggttgaagaatgctggcacagtccagaggaaatgaatgatggaatgggactctggacaaggcctctgccaccacctcagtattactgaccttacctttccaggagaagctctgacctcggtggttgctcatgaccagatttctgctcttgtcttttccaataaactcgtctcacctggatggagactttgtgatcatacctaagacagttcttcagcagcctgagccccattcctagrgactttccaatgtgtcctctgccttttgcctttcttatcatagatctcctgatactgacctataagctgcattttactaaggttcaggagctgtgtggtttgagttaccttcacacctatcactgcctgtgctggtaaggcttcctgtcttaatgtgatacctccgttttccactgtccacacgtacgtgatgccacctgggttagcctggcatttgtttttacatctgctttctcccactccagctataggttaggtgtgttagtacwacaaaattgatcttgcraaaaaggcgaaaggaccggcagaactgacgtccttttgtacatgagaggaaaggagaaagggagagagggcagaaattatgtttagggcacaaactatgtttagggcactaggccaggtagtttccatatagactctcactttatatagctctctaggaagcaggtgtgaatagctcccttaagtaaggacacatagttaataatagggggagattttctgaaaaagaccaggcattttccaccacaacttgctgcttcctgatgagtttggaacatccccagtggacagattctggttttttctgtatatattatataatcatggtaattgaaattaagtactgaagaacttttggaactttttggcagagatatctgaaagctgatttgattttygttgaagtatgaagacagtaaaatatggtaaagtgtgataaggagccacagagtaataaaaatagctaaatgtatgagaaaagatctgaagggaaggaagaatattaaaggctttacagaataaagcagacattcctatgtgtgttaatagagaacataggtaacaagacaagagagatgagtgtagtagatgggaaaacaaaaacatctctttcttttcctcttaccccaccctacaccccaattaaaaaaaaaacccaccaccaaatgaaacaatccatgtaagacaagcaatattaagactatcagtatgatgccagagaaaaagaaggtcggggaagacaaagacactcccaaaacatatttcaagtactcagaaaatgaaaagctgatgggtgaagcaagacctatttgcccttgtctctcttcataccatgttttgtgagcatagctacattcttgccattgtgccgggcactgatgacggatgtgctaggcaagaagacactgcacaaagagctgaaaagaattgcaggattttaaaatcatttttgtgtgtgtgtgtgagacagggtcttgctctgttgcccaggctggagtgcagtggcacaatctcagctcaccgtagcctccacctcycaggctcaaataatcctcccacctcagcctccccattagctgggactacaggtgtgtgccaccatgcctggctaagttttttaatttttttgtagagatggcgtttcactattgcccaggctggtttcgaactcctgggctcaagcaattctcctgccttggcctcccaaagtgctgggattatagacatgagccaccatgcctggtgaattaaataatttttaataaaacttttcaatagtcacaacaatttcagagagtagcgtaagaatgtgagtatcctccttttccctcagtaatttatatgtttcagacggattattcatattcatctcaaagttcagggcccattcctgatctgcccccactctctctgttcatctttgtttccatgtggcctaaacagcgcaacccgcccccagctgctcctaccagagacctgggagttattccaggtgcctccttatcccttcctccagccctcaccaagcactgtcaattccacgtcttcgttgttcttgaatctgttcactgctttccacgacctccaccgccaacctagtccaagccaacagcctcttttgcctggatttgtccaaagacaaaattacaacaaatttagtttaaagctctccattggctttattgcaattctagaatcaggtgacacttcatcccataaaatagaataagtgtttcaatgactctagcagaggaggttggctctagagacagaaaaagggctgaagaaagaacaaaagtggattggttatttcaaagttactttccttgttaggcagagacagggagacagaggaatagaaaggtaatggattggttaaggactaaaagtgaggaacttaattttcatacttactggcctgtttggaaaattggcttttatctctctcctgatttctcggaaggtcagatgacttagttttagtttggtgacatggaactcagaacaagtgactccattttgatttttagcctggtctctcggagctcaaggcaggaacttagtccaaaataatggcctcctatagtgattactgaacagactaccacaatatcctctgacttcttttccttattatcctctcagcccctccaattcattctccgcaccaggtgtgggcaaactttttctacaaagggccagaaaataaatattttcagccctgccggccatacggtctctgtctgtgtcaactactcaatgctgccatttataggagaaagcagccatagccagtgcataaagaaacaggcgtggcggcatgcaagtaaaaccttatttacacaacagaccgcagcaggatttggtgttctcatcactgtttgctgagagtccttggtctacactgaagctagggatccttcttaaatgcagaggatatcctgtcaggcccctgcctaatgttatttaattgacttgctgctgctcaaggacatgcattcacaatgtcttgcttcttaaccttgcttattttgagccccttccttcttgctcattttgtacctgttctttggctttctttcgttcagatccttgaaagctcctttctgagctaggacctttgcacgagctgttttacggttccctggaaatcttgactttcctaacccctgctcaaccttctgtctttagcttaaatgttaccttctcagggaaaccttccttgtctttccagactgatttagtttttttctactagatccatacttttttttcatttatctcaactttttaaaattaaataaaaatctttgtgtgactgtctagcatttagctccttgctaaactgtcaactcccagggtcagggaacatgtgggagttttcaactccgaattctcaacattttgtctagtgctttgtatagtgggcacttagcaaatatttgctaaaaaaaatacatttaaatctataattttcatctataatgtgaacattgatattggagaaatgggtgcaagttggcaagccaaggtgaaatagcgatgttatagtgttcacctatcagctatagagagcacacagattttgcaagaaaagcttttaggttgaaccacatgaaactacctatatctgactactcttgacctacagaaaaggtcatttcatgtgccttaatgtaatactaaatattatatactctttttcttttggcatcttactttcagcacctaaagaactcggtggaacgatgagcactaatatggcacctggcacattgagcactgtatttaataagcttttgatggatatgaggttctggaagtaagaaagagggaagctgccagtgtgaagggtatatgcaggaagaggagctaccacaatacctggtagttgagtgcgtgataacacaacatctgccatagcttggtttgtttgacccctccaaatctcatgttgaaatttgacccttagtgttggagatggggcctaatgggaggtrtttatgtcatgggggcagatccctggtgaatgtcttagtgccatccttactgtaatgagtgagttttgctcttagtcccctcaaaacctgttgttaaaaaaaagcctggcacctcccttcttttgctctggctttctctctcaccatatgatctctgcacatgctggctcccctcaccttctgccatgagtggaagcagcctgaagccctcaccagaagcagatgctggtggcatgcttcttgtrcagcctgcaaaaccatgagctgaataaacctcttgtctttatgaattacccagcctcragtattcctttatagcaacacaaatggactaagataacatctttgaagctagtttgccaaagttataggaaaaaagatggaaaagcaagagtctcaaataagttatacagcctcaatgaaatgataaaggaccatgactttgcatataatggctttctgagaaagttgaaatgctaatgcctttcaggctacagaaaaactgactttggaaaagaattcagagaagcaaaagaagaagagatgaaagcttgagtttgtgtttataagagcagatatgtaaccaatttattagtggaacatgttatgggttattatatcataggaaaataattataaatatgatgtaaaatattaattcctgaaagttttggaaagtaaaatagaattttttctgtgtaataagttagtataattcttagccaggatatgaggactatgacctcttatgtgcttttgtagttctgtgattccataaaagatgtagaagggaagtaaaaaataacattacacataaayttgaacatgttttgtttatcgtatataataatacgtgtgctgacatttatttactttatgtttcttgtacattttaaatatcaatccatgccattttatagcaaaatctttgattcttcacttcctgttgtgaatcagttccaagaaggctttaccctatcactccattaaagactataatcttcatcactgtttagatcaccagtggccaccttctggctaaatacagtagtaattggacacacagttgaccctacggaccatgctttccttcatagaacactttttaacctggttgccagggcttggtttcttggttctcttcctacctctgggctgattcttctttgccatctttgatagtttctcctcaacttcccaaactcaaatatttagaaaccctagcactctgttcttgaccttcctctcttctttgcatacatttattaggtttatgactttcaaacttattttgatccctacatataaaaaatatattttgcagcatttcccagcacacatacacacacacacacacacacacacgtgtgcacagaatccaagttctcttttctatatcattaaaaaatcctctttatacccactaaattgattttactacccacttagtgagtcatgacttgcagttggaaaaacatttttctaggtgatctcatataatctcatggctttagatgctgcatttattctgatggtacctaaatatataggcatgacagtgtgggatagtaaaaatgtgcattgcatagaaaccatacagcatgatctatgtaatcaatggggaaagttatgattgtttcctgatctttacaactagaaaaaatattaaaaactcatactattgtatggctgtgttccaataaaactttatttacaaaaaacaggtggccagcccatacactgcagtttgctgaaccatgatctagactattccaaaaactttttggaagaatcatttctggatcatcttagacagaaaaatctttttaattatttagagatgggctcttgctatattgcccaggtttgtcttaaactcctgggctcaagtgatcctcctgccccagcctcctgtgtagctgagactgcaggcatgtgccaatgtgcctaactgaagaaaaatagttttaaaataaatcttttctttaaggaaaaagcttttgtagagtcgaagaggaaaagcttctactttgccctctaaaggtttaccgaaaaccactgaacaaaaggcagattactaagaaaaaaaggcatgcaaaatttatttaatgtgcataagcacaggagacttggaggattacccagtgaagtctaggtgcttatatatccttcttcatagggaagtgtgaaagtgagatcctggggaactagtcatgaggactgctgttctctatgttgtctcctttctcagacaggtccttctctcagaagaataaattcccacaaaagtccttaattgagtgttattggtctggctggggtcacatgctcatatctgaaacagttgctgaggtcagagatgaagaatagtgattctaagccctgggtcagatggactgagagtgaagaagaaaatcatgatgccgtgcctcaaygcaggagaaattaattctggtycagcaaaagcttcacatgtcccctctggacaccatttaagtaatattttcagcatattttttcagagcctgcrtcctgtattaaatcagctcygttctgtcattgtcccagatcctgtatctgcaactgagtttcttgttgtcaaagggaatggaagttgaaaggggattaaagtgaaaccctttgggtcaaacacttattaaacagcagctcaggcagtctgccagatcctgaagagataaagatgaagagggaaggcacagttgtggctcttgagatcattatatctaatgacctcaattagatataatgaaatgaggacatataaatatgcaaattcaggacaatataatatttgctatgatatcctcatgcattgggtatgatgggaggaaagacagtcagccaatctgggagcartctgggagcagagygtggggtgtggagagaattcagggaaggtgttctagaggagctaacatctgagctgaatcttgaagtwtgagtaagagtttctggatgtagaaggggaggcatctaggcagaaggaacagaatgaacgcacatatggagaggagacagagcatggtgtgtgacgagctgctgataatttaacattgcttcaggatgaggtgtgaatcagaaagtgtctggaggggtggaagagactagatgttggcactcaacataagttgcctagtgtttagattaagttcagatatgaatgaatttagactttatcctgtgagaattaaggagatcttgaaggcgcttacttaggggaaggatatctgtggatgaatattttagaaaaatcactctggcgattgtgtggaggaggcaagatcagttctggaggtgggaggacagacagtttaggagactattttaacagacccagtgggagatgatgagggtagtggatgggagaatgttcagaagggaatgagtatgagcaataytggcgaagtttgataaatggagttatgtgagggagttgttttgcagcacggggctttcctggatatgagtcctcaggttaggaaggccattttggtctagagaaagtgacaggtatatttggtagtacaaaaaagcctttgaggaaagagtaggggaaacaattggtcatctatccttctttatttgaggcacaatttccccctccaytggtgtattttatcaacatgtattcattgagaatctyctatatgattgtcactgtgctgagattctaactatgaacaaagcgatcataacccttgctcctgggtcctacagtttagtgggaaagacaaatggataatttgaatgggtcatttcaaacacgatgagtgttacaaagtcactaaaattaacatggttttaaaaagatgaaacagatctaatgcagtggaagagttcatcgtgacttccaggctagtgggtagtaaggattgtaaaggctaatgccagcttctttgactggggcaatactttatatggactgattttggatttcttggcactcatggactgtagagtttgtagtagagtttcaagagtgcttgcgcaaaggatgtgcacggatggcaaaaatcagaggtagagatgcatagttcacctctagttctaaggctggcccctttaatattgggcaggccagtagaaatgcagatttggtgcaaagcttcatatctgtcctggtgttttaaaagagtaagtgtttccaaaggtgtctgattttcagtcaggaagaagcttaaaccttcagagattctgtctcttataattctgacttagaaaaaagggaataatgagaaacacttcatttgccttgttcattgaagatgcttttggataaataatctagcatcatgtttgaaaaaccgaccaaccaaccaaccaaaccaatgttaacaagaacaatagcaaaacaagaataacaacgtaaaaagcagttgtctaataattcccaaaaggtggccttgggttgagccaactttaaaattttagtaaggcagcaaaaagatcacgtgaaagagaaatggataaggtagaagaagatggtggggagggggaatagaattaactgtgaaaggagagtagactgtgtctttattgttggtcattctgatttataagtcaacagaaattcatttcctagttaaattgttagaaataaattattcatggaagagccatctgtgttctctattgccaatttctccacataaaaggaacaatgtgttgtggcagaagtcggctgaagcttttttttttttaatgtgactcatgtcactttgaagatttactttactttcaaacttatatctcagttctcagtgtgacaggaggttcatgttacatttcttcctcttacaaaaaatccagagagacttctaatcaaagaattatattgatactaatgagaaaatatatatttacggttgctgctagacatttctatatataaaagataggggcagcagactgattggaagaggggagcagtttacaacaaatagagcaaatgtcaacattctggataaaatcatgttgaggcaatcaaggaaccgatagcatgatgagagggctaaagcactccccagatcagctcgtgagcccattaaatgaacaaaatgcaattcccttgtttatgaagtttatttctctgttttctataattttttgtttagcttttaataccttagctcaaagatcatcatttgcatagtgcaattatattgttacatagctttgcattagatatccatatcagcctttcttgccttcttcagtttttcctactataaacattgtgcatgtgtgtgtgtttttctgtttttactctctgtgtatcctttctaggttcccaacatgccgctcctgctgtgaaggctttaaccagaaaaactcctaatgttcttctgccagggatatatcagtgggaggcaggaagaatggtggttttaaagttcatcttcattattatagaaaataactttggctctttacttatctagaagttagatcagtttgaactgagccccttgtaatatagatgttggcaatatggaagtgtaccaaagtattcatttgcagagaaattaatcaaagataagtttcagaatccccttagctgctgctgctgctctcacaaccccacccccccacacacacacaagctgtggtttctggaacagtggtctggtgtgcaggatttggaaaaatgccactgatttcatgattcatatgcacaccatggaaataaacaagagcaaacttctataataatttaggtactttaagtcttatccactttgtgggattttttcctcgtaccttcccaactgagttcctgtagccctatataaacattagcatcattgctgggagaattccaaggagtgagtcagaaaataccacctctgcccctatgtcaccgatttggaaatatttgccttgaggggttgtcctcagtgacttctgagtccttgatagacactaactaattagcacttgaaaactgcctccgagacctggaacttgttggttgccagagaggctggtgtgctccttctttcatgtgcagcattagcaaatgccggtgtggtatgaatcttaaaaattcagctctgacaatctaatctcaataatgaaagtataaaaacgctattgcatcaatggaaatgcagatgtcactgggtggcaaatgcatcagtacaaaggcacatccaaagggaggcaaagtcggagacgtgcaggtgctgagttagatcytgactgcacacctggacctttacagcagtattcccagggggtgaccacatgtttgggtttgctcaggatggccccatttatgactgtttccctggcagaattaatcgtcgagaccccgttcactctcaagaatcttgatttgattgttaatctgatgaacagtgaaagtgttttcaatggctcaaatagcataaagaaacccagagtatctggagaatgaagcaatttgaggaagtggctcctatagatcctgaactccttaacaggccagattaatagcacttggtggaccttggctttcctgtgacatagtacgtcccagtgactccatttgctacagagtggagccatcatttgaatttycatcacggcctgtctctggagcagaccactgtggtactggggttttgggggctctctcaagcyagcttcatagactcgctaaccttattttacaagtagcattctagaaccagtcattataactttcagggtgggcattttccaygagatcctggttccaattackcctaattatttgttatgtcctatttgggttttctttttacagatctttaagaaattttcctttggctctgagttgagtcaaaatgttgagttcaactttcatcctaagcaagatagagggcatgaattatggttgaggacttatgcatattttgaccaaatgaaaatgaccactgttgctccagcccaattgctgctactctagattgtgaatgcagatatagtcaaaatgactttggtaaatgcttctaatcatgactgattatctttttggctggtagaggaagtaggaatgcattcatattttgtatgaaaggtagcgttctttttgtaaattcttgctatttaaataactttttgggtttgtcaaaaccttttcaaatttttccagttaaagtttcttcctacagcaagacggtgagtttgttttttttttttgttttttttttgtttttttttttttgagacagggtctagctctgtcacccaggctggagtgcaggagtgtgatcatggctgactgcagccttgaacttctgggctcaagcaatcctcccaccttggcctcctgagtagctgggactacaggtggatgctaccatgcccagctaattttgtaattcttttgtacagacagagtcttgcgatgttgcccaggctagtcttgaactcctcggttcaagtgatcctcctgcctcagcctctcaaagtgttgggattacaggcatgaaccactgtacccagcctagcaaaacattgagtttttataccaaaaatatacagcagctcgtgctagtgtatccacagtactacttccatatttccttctgatattcctcaaacttatcttcttgagatgggaataaactcaacatacaggaagttcatacaaaagtgctaaattcagtttccagattataacaaggccccataaacatcaaaacatcagaggttgatctgtgctgttcaatatgctacccacatatagctatttaaatttaaattaattaaaattaagaataaataaaaatccagttcctcagttgcactacccacatttcaagtgctcaaatgttatttcccgggacagtacagagagagaaaattgccaccactgcagaaagttctactggagagtaatggtgtaggaacaggcagaccttatataaaacaatccttttattttctggtgaaaatggaattgagccaacctttcatgcgttcctagttctgattctgtgccattaagtcagagcactatgagaatccctatattaccttgaggaagaacagtgaaaatttacagtgctgcagctgtcccagaattcagaacccatgatctaggagactttagatttcatgaaagtaaggtctaagcttaccctgtttttcactgcaatcccagggtctggcacatagtagactttcaataaacacttgtgtaatgaatagttgagggaacccagcaaggacccattaaaagggcctaactacaaaaacacgggcatctcttggggtttggatcatttttgagggttccctgggaatcatgcgaaggggcaggcagtagccattggagatttctcctttgtagaagccacagcacagcatagggcaaatggcatttgctgagtagcttctcctttttcttctctttcttctctgtctcctctccttctcatctccctattccaacatcctatcaaattgctaattctgtggagcatttattaaatgccagccactattctaaggtcctttaatagattatttcatcttcccagtgattctattgtattgctttgctaaggcyaccataacaaaataccacagactgggtagctttaaccacaaacatttattttttcacagttctggagactggaagtctgagatcaaaggcaggcaggtttgttttctcctgaggcctctctccttggcttgcagatggccgcctcctcactgtatcctcacatggccctttctgtgtatctgcatcactagtgtctctttctgtgtccaattttctcttcttataaggacaccagtcaggttggattaggtgcatcccaatagcctcattttaacttaactgcctatgtaaaggccttatcttcaaatacagtcacatgctgaggtactgggggataaggctttgctatggtctgaatgtttgtgttctcccaaaagtaatttgttgaaaacctaattgccaatgtgatggcatgaggggaagggcctttgggaggtgatttgtasatgatggctgaatccttatgaatgggattagtgcccttacaatgagaccccagagagttgccttttccatcacatgaggacacagccagaaggtaccatctacgaaccataaagggggcctttagcaaaygccggctctgccagtgccttgaccttggccatcctagcattctgaactgtgagaaattcatttctcttatttatcagttacgcagtttatggtgtttgttgtaacagcctgaatggaccaagccaggcgtcaacatatgaattttgagggtgcacgatttagcccgtaacacctataaagtcggtgttattattagtcccacattatagtagaggaaactgaggcatggagtaaccttgcccaaagtttaacagctggtaaatgatgtaacacagatagacatctcaccagtctgacttcaaagcttgcatttttaaccattagaaggggtactgcattttcttaaattggcaacacatttgggtttgaaactaattagaaaaagatatcattgaccaggcgcagtggctcacgcctgtaatcctaacactttgggaggccaaggcaggcgaattgcctgagctcaggcattcgagaccagcctgggcaacatgatgaaaccacatctctactgaaaaaaaaaaattaaaaaagaaaagaaaaagatatcaccatgagaggtagatcattgcagcattggaggtgatctgcctccccaggtggggagactgtgtacagctattgctgccccagcttctgccgttcttcatatgcttgtcaactgcactgtctccaaagttcctaccagctcagccatattcttcctccctgccctcaatgcgtcttccccagttttatctgggagtgaaacttgtggtggttagagagattcatcttgggctgtggcaatcttcagttgcacaaaccgtgtgaattacaggatggccggagcaactgaagggccagatccctagtcattgcaagtcggatagctttctctctagttactttgttttgtaatactaataagaataaaaattattttaacttcttccatatgtattattccattctctttcttcwtatttttttaaattttttttgagatggagtcttgctctgtcacctaagctggagtgcagtggcacgaacttggcttactgcaacctctgcctcctgggttcaagccattctcctgcctcagcctcccaggtagctaggattacaggcatgcaccaccacacttggctaatttttgtatttttatagacacgaggttttgccctgttggctgggctggtctcgaactcatgacctcatgtgatctgcccgcctcgaactcccaaagtgctgggtgtacatgtgtgagctattctctttcttctaaaaatatgtaaatttattttccctttttttgttttttttttcttttaggcacagcagaatttattctactttattggtatttttttgttttattggtgttatttatccttcataccgcatmtttaattgttttttaaaatactaatttcgcttttagcttttaaaatttctactcctaccttcttttggctggttttggtattttctttgaatttgaaaaaatgaaagaaatgacaaagaaagttaacagcttttaaaaataatggcaataacaagttagatacagaagtagaaaaatgttcttttcacaattgtatagccaggaatagatttaacaaaaaaggtgcaactcccrcatgaagaaagatgtacttattgacaggacttgaataaatacaaattaaattcacaagaagatgtaaaatcatgaaaataacagttcttccaaaattaatatttgacttaataaaattccaaccagaattttatttttttaagcaaaaatattattttcggttcatttgaaataataaatgttttagaattccagaaaatatgttagaaaagagacttatattggagcactagtcctactggctattaatacatggttctaagattcttttagcaaaacagcttgatatgaagtctggaaaaaagcagctattataatagaataaagtccagaaatagattaaagtatagatggaaacctaatttatgataaaggtagaatttaaattcagagggaaaacgatgttggtgtaattggcttctaggtagaataagataaaatgaaaccacaaattcacaccatgtatatataaaatatacatgtgaggtggaataaatactgaaatgtcaaaatcagaatataaaataatagaagaaaaattttgattatatttagtttttctttaaaaacaggaaaaatccataagccatttaagaagagttggatagttttcactaacaaaattataaatttctgtgttgaaaaatgcacaacataaagtaagaaatacaagtttagactgagaaaatatttccaatactgcattataaacaaaagtgtaatgtacttatacaatgagacttaataaagcattaagaaacatagaaacaacaggcaaagcataagatttggcaagatacattggatggaatgcagatggccaataaatgtatgaaaaatgtttaactttttaaataaaagaaatacaaattagagtttttgttttgctttgttttgtttgttttgagacagggtcttgctctgtcacccaggttggagtgcagtggcgtgatcacgactcctgaactcaagtgatccacctgcctcagcctcccaaagtgctgggattacaggcatgagccactgcgcccggcctagagttattttctaatagtttggaaaaaataataatttttattgctggccttagaatgagtaaacaaaccctttcacacattacgaaggggggtgtgaattgctacaattgttttgggaaaagctattgaaatataaaattcatattctcctcaaatcaacaacactgctgttagaaatcttacctactgaaatgaaagcacaagtatgtattgataaacaaattatgcaaaacttaacaatggagatatgttttgagaaattagttgttagatgattttgtcattgaatgaacatcagactatatggtagagcctactacacatgtaggttatgtggtatagcctattgctcctaggctacaaacccgtctggcatattactgtactgaacactgtcatacattggtaagcatttgtatatctaaatatagaaaaggtacaataaaaatacagcatgaaagattaaaaatggtacacctgtatagggcacttaccatgactgtaggactgaaagttgctctgggtgagttagtgagtgctgaatgaatgtgacggcctaggacatgaccatttaaaactgtaaaccttattaacactggatactttggttacacaaaatttattaagaaatatttttatggccaggagtggtggctcacacctgtaatcccagcactttgggagaccgaggcgggcagattacctgaggtcaggatttcaagaccagcctggccaacatggcgaaaccccgtctctactaaaaatacaaaaattagccaggcgtggtggcgcatgcctgtaatcccagctacttgggaggctgaggcaggagaatcacttgaatccaggaggcagaggttgaggtgagctgagatcacgccactgcactccagcctgggcgacagagggagactctgtctttaaaaaaaaaaaaagaaaagaaaagaaaagaaaagaaatatctttattttttcagtaacaaattaaccttagcttacagtaactttttttacattataaatttaaaattttttgactcttttgtaatcacacagcttaaaacacagaagcattctatagctgtacaaaaatcttttctttctcttatatcctattctataagcctttttgtattttaaaaatttttgtatttttctactttttaaattctttttttaaaaaaacaaggacacaaacacacagattaacctaggcctacacagggtcaggaacatcaaaacataggccctaggcaatgggaaatcttcagatccattataatcttatgggattgcagtcatatgtggggttaatcattgactagaatgtcattatatggcctatgactgtacattgattttactaaatatatgcatgtatatatacatatgtacatatccacaaggatgtttattgccttttcagaaggttcatcaataggagagaggtaaaaattattgtgtatttataaaaggaattgttacccactattataaagaataagatctaagtgtgttgacctatagaggggtagagagaggaaaggagattatgaacttttcaaaaataaaacttcagataattttgtttgtcacaggagaatgcattacttttcatattaattataataatggttaccacttattgaccgttacgatggaccaagtgtagcgggaatttaaatatatcatttataattctcacaagaacatgcaagaacaatgtcttcagttacctatggggaactgaggctcagattggcagtcaagtggtggagccaggattcagcccctagcccatctgctgagaaagtctttgctctttcttctggttcctaccatggctgcatcatcttctgtgtgggccctaacggggagcaggaaatgccccacttctctctgggcatgggagccataagaaggaggtccctaacatgtacaaccactgctggttttggtcctggggagaactaataaagaataaagcaaaaaaaaaacccttcttttatcattgcgagcattgtcaccagtcctaactgaccactccactctaccacacccatagcaatgggctgccttactgtgtcatttttgatcgtcagtccactatccagtgaattattgcatattcataagctagaatgtggacagtcagggaaggccagcatggaagaggtaaacacctgaaacttgattatggagacagagtcagagggtagtgatgttctttggttgtggtgctacatcgtgggttgctgagttccagtactgctgtgaataagctctgtggtataggggaagatatttaaactcctgatgccctaggttttctcatctgtaaaacgcagatgaaaakagttcctacttcttagcgtgtgtttgtgtgcacacaggcacatgcacctgtgtgtatttgagtgtatattaaatgaattaatacacagcccttggaaaagtccccaccacagggtaagcccaaaagtacatgaaggccattattatgattatcaagaccaatcctcagattctaggtctaataagatagtttacttttggcatgattagcctatgattaccaatgtcataatgctaatgcctgcatttataccatgagtttaaagaaggataagatcaggtcgaggttaataaccatttgaattctgacatgtttgtgacacaataatgttcacgggtgacaccaaaaatgttgaattataatttgctttcttgaatcccggtttattttaggaggggcctaattttttgtgtgactcctgttaattttcatgactgtccttgttgctctgttgtctgtgtcttttcctgtcttggatgttggggagatgagygatatgtagataggagaggtgagtgtgagggcagaagtgtggttggttgagtgttgaagagagagtaacagacccgtaaagaaaaccacagtatttcctacccttgatgctgagatatgcgatgaatatatctatctgttgatagagctgtttaggtttttgtttatttgtttgggtttcgtgcaatttcatgtaaaatttttctggtaattttttgttatttaattatcttcccagaagagaaattcttttttttttctgggtttggggcacattgctttatctttttctgagttgttaagcagttagaaaattattttaaatagattttttttgatacacttgatgatttttatcagtaaacttgaaaacggctgtttattttggtcacaaagaaatattttaataatgcttttgacaagatatctcaaaccatctgaatagagaatcttaaatagctttaaaagaatcatgaacttattagcaaaaataatgaagttcagtataacatttaagttgacattttgagatagtagataaagtttacttgggacacacatgaaattaaaggtgattcgttagtgtttagtaactgtctttatttcttcatttttttgttttatattttatttagcaaaacatcttaatattatttttagtttggagtgtttgtagaatatttaaataaacattaaaaaattcctaagggaagggacaggtgaaatactaatacaaacaaaaactgttacaaaatcagaaatgtcaagattttggggggctactgtgtatctgtttatctacttgatcttatatgcrattttgtctttcatttcattactcttcttcattgggaagaaaaaatcctctcaaggtcctatctcagtccctgaagaaataaataaaaaagagtagcagaagatggatgagattgagtgggaggtaaaattagaatggttgcaatcagtaaaaatcttgaaagtactttagtgagagaaccataaacaaaatatgatagtgcatatcctataagatccatgattactcataatttattcacaagtacattaaaaatgtaaaaccatgcataattatttaatgtataattaaaatttaaatattgaatttgaaactgggacaagcaatacgctttcctgtcatctgaacagttctggagtatcataggattatttcatgtctgataatattccatcatcttcctgtatctaacatcagatttaatacacacagcaggtactttttgatcatacagtttagcatttataatgaatcttggagctgaagccatatagcagccttgaaaattatgctgtatgcctttgaatgcgtgggcactcaagtaggttggagtaagaaaaagcactcaagtttttgttgttgttgttgtctttaattattttaaaagtcagtctcatttgatctctctttctttcccccactcttgattttggaggttccaaatggcctttctccactcaaagagtggttcttaggcctgcaggatagcatggtccactgacaagccgcatggcatcccaggggagcttattagagctacaggctctcaggccccactccagatctgccgaattggaatctgcattttaataggatcttccgttgcttcacgtgacatccaaatttgaggagccctgccatatgggataggtctgaatcaggccgatgttattgtytatattcctggaaggattgcttaattttccaaacttgtttgggttctgtagctttttgaatgatcccagggacgcctgatattcctgttggaagtttctaagtctccaacagggaagatcatctatattattattaccagtatgagtaacaacaatgggtgatatgatttccatttattagctacccactagtggagcatgatgcaaaatgtctcatctgtgtatttcacctgtaatcctctcaacaactcagcagaagaggttttattattatttatttatttatttatttatttacttgagacagagtctcgctccgttgcccaggctggagtgcagtggtgcgatctctgttcactgcaacctccacctcccaggttcaagtgattctcctgcctcagcctcctgagtagctgggattacaggcacatgccaccacggctggctaatttttgaatttttagtacagacggggtttcaccatgttggtcaggctggtctcaaactcctgaccttgtgatccacccgcctcggcctcccaaagtgctgggattacagkcgtgagccactgtgctcggcccagaagaggttttaagaagacaatttacagaaaagaaaaccgaggctaggggttattgttcaaggttaaatatacaatgttagttctgaaatcaaacccaagtttgtctcccctaagccacgtaccgcccccccaacccccgttttttttttcrttttttttaaacaatactatattgctacatgccactttggtcctcttgcagtaaggaagggcatataaaagtgccctgtttgtctgggatcagaaaacaagcctgtgtaggcccagagagacaaatatggcttgttgtcacatgtgtgcaagagctaaagtggatctcacagaaggagagggcagaatgatagatactagasgttgggaagggaaggtgagaatgaggagaagttagttaatggacacagttagctagaagaaataagttctaatattcaacactaccgtcggtaaattatatgtaataatttattgtgcatttcaaaatagctagaagagaagaattgcaatgtttccagcacaaagaaaagataaatgtttgaggtgatggatatcctagttacccaaattcgatcattgcatattgtatacatgtatcaaaatatcacatgtatgtataattatatatttatgtacaactatgatataccattaaaaaaagaaaataaacctgtgtataggcatatgctgatatttattgtgactcttatttctgttttctgattctgacttataaatgtstagaataaggttctttaaatttgtaaaatctttgtacatttttgtgatttgttttttgggttttttttgcaaatgtgggggaagatcattcatagttttgtttaaattgaattttcaaaaaaggccataacccacaaattgttaagagccatcccctaactcagcctgtaccttcatggccctcagctgttgaaattcccaccagtctgctggcatcattgcatccctcccaattactagattttcccagtgccttcttcccagatcattccttctcaatcctgccctggcatcagaatcacctctagaccctgtacagaatacagctgctcaggccccttctcaaaccttctgaaggatgaccttgggaatggggctcagaaacctgtatgtttaagaagctccacaaatgattctgacccagagcgctataagtcagcacaattttctttctttcttttttttttgagatggagtctcactctgtcgcccaggctggagtgcagtggcgcaatctcagctcacaggttcaagtgattctcccgcctcagcctcctgagtagctgggactataggcatgtgccaccacacctggctaattttttgtattttagtagagacggggttttaccatgttggtcaggctggtctcgaactcctgacctcgtgatccgcccacctcggcctcccaaagtgctaggatgaaggcatgagccaccatgcctggccaattttcttattttctttctttctcattttctttccttctttttctttctttttccttccttccttccttccttctttccttccttccttccttcctttctctctctctctctctttctttctttctctctctctttctttctttctttttcagggtctcactctgtcacccaggctgagtgcagtagcatgatcatggctcactgcagtctcaacctcccaggctcaggtgatcctcccacctcagkctcctgagtagctggaaccacaggcttgcaccaccatgcccagctaatttttaaattttttgtagagacagggttttgccatgttgcccaggttggtctcaaactcctaggctcaagtgatcctcccgccttggtttcccaaagtgctgagattacaggcatgagccaccacacccagcttcaattttctttacaaactttgaacaaaaggagatacttcatgaacgtcctcttgtggaatgatctcctggagggagacccaaagcagcccagtcctcccacaagagactcatcatcatctagatctggctttcctggtaagatcctaactaaagaaagagaggtgagcaaaggaaaagaaggtatttccaccttcactagtttataaaaaataatgtcagagtttcaatatttacagaaatgccctcactttttgaaatgcaagcatttgatgccttcacaaaagctagaatttttttttttacaaataccccatacacagtggtgtgctggtaaatgttttacaatcagctctgatttgtagcattgcctatttccatggtgtaaatactcccatcctggccaatttgaagctaccaacttggctcacaaatttcctgaaaattaaaaaagcctctcatatgccagtacaagcctactccatcccaccactgcatatggagagtgattatctgggagagatggcttctggatttctccataggctcaggcatgcagaatgattcagagagctccatttgcttctttattctccttcagaagattctactgcgtggcctactccttccgaaaccagtgcatgttcgacaccgcaagtctttcatgatgatgttgaaaaaaaataacatcctgaagatgttttgacaaattaatttgacttttgaattattttccttttgagagaataaaatgttccaaaggtctcctgggaagagattgttcaaataaggttttatattgttgattttgttttaggtagttaatgctactacctctttatctgtgggttagtaaattgacgtttttctccttcatttatctgtgtctgctagaactgtttgacattctccacccacacaggttctgatgacattacttttactcattgtctatttacctgtgaaaggatgagctgttcattcatgggcataaagagcaatgactgaggaaatggactagtgtttttccattaatttttataatcatgtcttagttcactatgatgacgtacagttttctctttgttccagagaactatcaaaattgtcactgacatttatttacaaccatgatttgtataggacagttttagaaacttgaataccagtagtttgtcaagcaagatacagcgcctgcttctctagaatcaggggatgtttaagaggttatctagtccagcytcacagcttrtctcttagatatctttctgcttctgtgggaattaatgacttctactgactgtagatttgtctggagttttgcagaacaaaccaaatccttccccacataactatcttggaaaacctggagaactttcgacctttggaaacttgatgctgcctcctaaacttttcttctcaacctatgaaatgagcttctcatggaaattattttccaaaatagatatacaaagcacaataaaatatgttaatgagagaatcagctaaattgattcactcgaatcatagttgctgccacaagtcaggtgcattcctattttctttccattacctctagtgtcacttcgtttacctctgttttgtgcttaacttcttagacaaatttatctttccaatttatcttatttgataagaatattagtgaaagacagcagaatcttctaagagagttatctaagataactagaagctaataattctaaaagatgcttcaaggtccaaaaaccctcttcagtaaataaatgcacaaaggcattttgataagcatttgatgtagccgataactattatagcactttaaaaaataattatggtctttttggtgattaatatctacagaaagatttcaaatcatgaaactaaatcattaaaacaatctctgccttatctgatttgtatattaaaacttctctgtgctcacttaacaatgttcttaaacaagtcaaaggtatttttttttttttttgagacagagtcttgcactgttgcccaggatagagtgcagtggcatgatgtcggctcactgcaacctctgcctcctgggttcaagtgattctcctgcctcagcctctcgagtagctggaattacaggcgcccgccaccacatctagctaatttttgtatttttagtagagacagggtttcaccatgttggccaggctggtgtggaactcctgacctcaggtaatccgcctgctttggcctcccaaagtgctgggattacaggcgtgagccaccatgcctggccacaagtcaaaggtttttctgaatctgaaggctttcataggtagcttcttcttgaatggtaataataaggtgttttgtgatactaattttaaattattgatttctgtgaattttaaatgatgaatttatatgaatgggaatggaaattatattgcctttttattgtgaaggtcgtcttgtaggataggactatagagagagcagaaggaattttgaatatctgatattattgctgacaaatattttagaaaaactatataataggttaaagtaaattttcttcattgatttattatggctaatatttagggcaaagggtgatatactctcgtgagtcagtaactgctaggataacttattcagtcaaaaaattttccctaggcccgtttaccgccactccccctaagttgaattcataatgatgcagtgctttggaaaacagctctgtattaatacaaggtaaaaaagcccccacaaaataaaagcttcttttaattatcctagcatgaaatgaaacaaaaagaaaagtaatagggtagacgctaatttcatctttctttctttgtttctctttgtttctctctttctttgtttctctctctctttctctctctctctctctctttctttgtttcgacggagtcttgctctgtcgcccaggctggagtgcagtggcgcgatctcggctcattgcaagctccgcctcctgggttcaagcgattctcctgcctcagcctcccgagtaggagtagctgggactacaggcgtgcaccactatgcccagctaattttttttttttttttttttgagatggagtctcactctgtcgcccaggctggagtatagtggcacgatcttggctcactgcaacctccacctcccaggtttaagcagttctctgcctcagcctcctgagtagctgggattacaggcacccaccaccatgcccggctaatctttgtatttttagtagagacggagtttcaccagcttgaccaggctgctcttgaactcctgacctcgtgatccacccgccactgcctcccaaagtgctgggattacaggtatgagccactgttccaggctgtagcctcattatatgtcttattgtgtttcaaaattctgcagatttcttagacctcagtttccccttttggagaatctttggagaaaccagaagccatctatcccaaataattgctttccacatgcagtggtgggttggagtaggcttttactggcatatgagagcctattttcattttcaggaaatttgtgagccaagtgaccacacattagtagcttcaaattggccagggtgggagtatttacaccatggaaatagtcaatgctacaaattagagctgagtgtgaaacatttaccagcacaccactgtgtatggggtatttgtaaaaagtttgtagctttcttttgtgaaggcatcaaatactttcatttcagaaagttaaggcattgctgctaatattggaactctgacattattttataaacttgtgaagctggaaataccttctgttcttttgctcacctctccttcaattagaatcttagtagagatattttagatgtcatatgtaagacaactttgaaattatattaaaagcaaatgcataattaagattacaaaatgattctgtaatatgtctctgcagaataattctgtaatatattccatcttgactgcccattaaaaatcagatgaagtgagatttcacttttaagatatcatgttgatttggttgttttctaaatttcactctgaaggaagaagcaagaagagagaatataatgctgtcatttcttttgcaatcattttttgttcctttgccttttcttggtttcctttctccacttttttctttactttttcctcatttcttctgtaagtgagtaatctgtttttgtarccatcctaccccctcgtgttgtttattggacccctggtgacttgcatttcctttaggaatatgcccagcatttttaggctgctaaaatatgagccaattaatgatgttcttattgacgaggtctaggaaacttgtagggttcagtttctgcaagaatgatttacagtctataataggttagaatgtcaaacaaggggaaacaattagtagcactaatgttttaaccccaggtttatcactgagggaggatcattgatgaagaggcccatctgttccaaagatgtttccaacttgcttgtatagcagtttgtaaatcaaatcagtgcrgtgattgtgaggcttatatagccacttgtttgtcaatttttaaaaatcactgcttttgtgcacatttcatcatgatatctttgaaaaatggggttttacctgtggaaattacactattgtttttcagcattatgttcagtttattacatgtaccaggaacacgtgttttgaaattgtcaccagctccaagaattatgtaatcagtgagttaaatatataacttccaaatgaattagtgcacctatattttggcaaaaatttgttgttggaggaagaatagattcatcccagagtaagtttcttgtctattttcaggataaaagatgggagaattctgttactataatcaagttctttcttaaaatacccttaacctactttttttccctctaaataatgaatgctccacttcttacatagaatttcacaatttacaacccacattcacatttgttatttcatttcctgttggatattttccctctgctgttttcttcctatagaaaggccattgaataattggctctaagatttgaaaggagtcttcagattatctgttcaattactgtgcctagtgatcagcctgtctcttatttccaaaaggagaagaaaatattagataggtagacagactgatcatggggccaaataacagagtgaaagtaaattttcttttcataggagtggaagacaatattattttttacttttgtctttttatttgatcatttatgtcatgctcaccctactgacatgtggacttctgtttcagtggctctctggtcactttaaggcataaattccttttaccatttgggaacattgctaacttgcctccagcttcaaatttcacccacatggatgtgagtttctggggtgtaaaagagtaacattttatttttgaggcaagagacttctttctttaaagctgcttttttactgatttagttatttcaaatcatattaatacaaattggggcaaattaagagttacaagtctggacttaaaatcatttgcctgctctggtttggaatttatgcagctatttctgccttaattaaaactgtggatatttttaaagcttagaatttattcttatcttattctgacgagaatgcaaatccaaccaggcacattaaatgttctgtgatacggatggaaaaagatagaaactgggcccagccaggctggatttggtttgtgagaagatcgtcttttaataatggcttgattgatgattgtgtgccatgtgaagtaactggaatgctggatggttacatgaaattgtgggaaaattgacacaatggggaaaagatgcttgctgagcctatgaagtgcaacctgtgcaaatatgatgattcctcaattgcaagatcaggaactcaggattactgtgtaaaaaagaaaatgaaggccgggcgtggtggctcacgtctgtaatcccagcactttgggagggctgggtgggggggggcggggcagatcatgaggtcaggaggagttcgagaccagcttggccaatatggtgaaaccctgtctgtactaaaaatacaaaaattagctgggtgtggtggcgtgcgcctgtactcccagctactcaggaggctgaggcagaagaattgcttgaacctaggaggcgggactgcagtgagccgagattgtgccactgcactccagcctgggcaacagagtgagactctgtctcaaaaaaaaaaaaaaaaaaaaaggaaaatgaattagtgargaaagtaagatgatgtaaaaacaaccatccccagtgtcctgagggtagtgcttctagccgctttccccgctcccccaccccgttgctaggagagagatgagttaacacacagggacgtgtacattataccagccggatccacatacctggcagctgcaacctgttaaacctgtgtttttttcttctgtgtaaacactataaacaggaaggcaaacgtcatccatttacgcagaagagaaaattgatgatgaaaaactgtcactgctttgcttaaaaaagtctaaggtaaagaacgtattgactcagagagggccattcaaaatctaaagtcttcaattttattgctatttctgtattaaggattctgaaggcaaaatttcttcagaatctgttgtttagactttacaacaaaaatagctttggggagctgcttgcctggagaggttttgtggtgactatggaaattaatcttsttgatgggaaatcagctgttcaccatactgctgccttcattcccaaagaagagtttccattcctacctggaatggctagagcctgttggctagagcaatgagccattgaggcctcctgatattccacccgggtgcagcctccttgaagctgcctcaagcccccttcagttactcctttattcccttcactgctccagaagggttttcaagcatctgcagctgcacctctgtctcaagggcaagctctactgtcagccacgctgctgcaaggatgggattgaaaagcaagaccattcatttactctttcattcacaaatttattgaactgatatttaagcttagaatttattcttatcgtattcttacaagaatgcaaatccctactatgttccagactctatgtgggggcacaggtgacacactggtgagctaaaatagatcccatcccaggactaatagaccttacagtctgggtgacagaggagttaatcaaataactacattgatgaatgtatattttcaaactgaggtgttaaaaataacaaacccagcctgggcaacatgacaaaacctcatctctacaaaaaaattagttgggcatggtggtgcacacccatagtcctagctactcagaaggctgatgtgggaggatcacctgagcccgggaggtcgaggctgcagtgagccatgattgtgccactgcactctagcctgggtgacagagtgagcctctgcctcaaaaaaaaaaaaaaaaaaaaagaaagaaagaaaagaaaagaaaaataacaaaggaactgtggacttagactaaagctactccaaggaagctgtatttagccatacttagaaggctgtgcggataaaatatgtgaatatgtgaagcagagagcattatagggacgagcctcgtggctgaaagaaggatggctgaaacacaggagggaaaggctggtgccttgagaggcaccacgccaaaccacatggaggttcaagatctcgtagagaattttggtctttatcatgaaagcaaaggggaagttactgatgggttctttggtggaggtgacctgaggagggttgcgttttaaaaagaaagctttggccttgggagggaaaagagctggagagaggccagaggggtgggaggaatatcccagtttggaaccttgaagcagtttagttacatatccaacattccttcaccgttgcctcactcctgaacattgtccattgcatgtctgagtcttcttccagactctacattccttcagtttaggaatgctgacatatttgcttttggatcccatgtagtgtctgaccctgggatttgcatgtatgtccaacaaatgctgtatttaaacaatgtggctgttccgcatctcacaagtcatgttagttggcttaaaggagcatagctcttctgtattctagtgataacattatatagtgatctaagttattcctgaggacagaaggagttagagatacacttgccttttcttttgctatcatatgtgccttgcattttatttccgtacattagtatcttcaatataatgacctttgttgtcctgtcttcatgtcaacctaaagcattgttattgtcattagtgttactaccgcctcacaaatacatagatatattgggggagatttttcctgagagaaatctgcagatttgaagagaaaccatgtcatacattttctgagtctgaaaatcaggagttgcaaacataaatgagtaaagcagcagtagggaatggcgcagcctgtggcagaactagggggagcatgctctatcccaaagcattcacattcgaacacaaaatatactgtgctagctaaaccagacatctgggggcaagtgtggcttagtgactatgggtttgttgtttcttctttaattgattaaaaaaagatttaaacacagagaagttataaaaattttcagtgtaattaggggttgtgggccaagctttattgagtgacatgaagcttcaaagttgttttggggaagggagcaggaccaaaatgccttcttagtgcaactttttcaaaaaaaacttgtgaagccagcttctaatattcccctggctacttgctctctctctctaatgggctgcagcagtttctcctgtgcctcaatcaaatgaatacatcacataaatgagggtataaactgcatgagtttacagaaaggaagaaggttattattacctttgaaatcagaagccaagaaaacatctcttctcacacctcctcatctcttctcttactttctgggcaagtccctaggggtaattttattagagactctccctcaaagtaaaaactgaggggggtataaatagccccgatcctgctcccacctgatccttagattaagattagcataagctcaggctgagaggtcaccacaaggtcatagttttctggggtgaatagtcacttaattcagaaactcaggaatctcatgcaaagaatgcttagttaacatatttccaggagaaaaataattctaatttgctttcttataccaagaaccagcagtcttagtgattttgtaaatgcagaaattgggcccgtggggatggatgaagcagaaacgagcagaacaacaggattaattgagatcactttgctgctacgttctgcaatttcattactactcctaaaacgcaatggagagtctcacaaacaggcaacagtgacttttgttagtattctgagcccttcagcaaagtatatcctctttgggctgatttataccataaggataataaaaatacatgccttacacattttagtgggctgttgtgaagagaaaattagattatgtatggcaaggaacttcacaatgacaagataatgtcatgtaataataatattaaagaaaattataggaaacatatagcacttgctatttgtcaggcactgttctaagcatttacattcattattttatttagttcttataataaccttccgtatgggctagaatctattgttatctctaatttttagatggaaaaacagagccacagagaactgaagtaacttgcccaagcctagacagtaagaattggtgctaggatttgaatccatgcagtctggcccctctcaatcactatgatttaggaataaaaacaaaaaaacaaaaacatagacgtttaagtaaaccagaagactagcatttgaatcctggcttcccaggccatgtaactatggagacagtcttcttaagcagtctgaatttcagtttgtttatctgcaaaatgaagttggataataatacttatttttagatgtttggtcaggattaaataagaaaacatgcaaagcacagtgtttaataggaggcacgtagtgtgttattattattagttattgtgggtgagatggtatattagtcttgtcagactgccatagcaaaatatccacagactggctggcttaaacaacagaaattaattttctcacaggcctggaggctagaagttcaagatcaaggtggcagcaggggtggtttctggtgaggcctctcctcctggctgccgccttctcactgtgctctcacatggtctttcctctgtgcagaggagagaaagagggctctggtgtctcttcctctttttataaagatgacagtcctattggatcagagctccacacttataacttaatttaaccctaattacctccttaatacagtcacattggatgttagaccttcaacatactaattttgggtgaatacagttcagtccataacaggtgggtagctgggaggcgaggaatagaaggatagaaggggtattttaatgtctacggtagatttttttttaaggcatcgctgctggaggaaaaaacccatcagatattcataatacatttgtaggtatacaatatatttggctctgtatgtcatagaaaacatctccatgctatctattaatcttttaggtgagcctgaatttaaatacattgggaatatgcatgggaatgaggcygttggacgagaactrctcattttcttggcccagtacctatgcaacgaataccagaaggggaacgagacaattgtcaacctgatccacagtacccgcattcacatcatgccttccctgaacccagatggctttgagaaggcagcgtctcaggtgagtgccaggcagctcagatcaggcgtgctttcttcattttctgtatgtttgtacatacatgtttatctaaaaattatgccctcgcacaaagcttacagatggtgcagtggagggcataagtgatgcattcattattcaactcaccagtaagaaaatagtttagaatgaaagggattatgggtgagtttttccagtgaagactgcaaatcagaaattgtgttaagaagttaatgttctaatagtgttctgttttatgtttttcaataaattattcatccatttttgtgactaggtaagttttgttttaaaaatctacaaatataaaaaatatctactgccttttgttgaagagtaacgccatgggtgtatgtggatgagccagtgtcacagcgccctctactgaatttaaggaagaaatacttttggccggaataatgttttactgatgtttacttggtttttacatacgctgagtaaagttaaaaaacaagcgaaaaccctacctcttaactaaaaataatttaatatatcttcgctgttagatgaactggaaagtaatgcctttttaagagaagatatatggtgtgtgttcctattttattggacggggcgggggacattatatttgctgttttctacagtttaaaataattttcttagtctatgggaacatgggaacacattcaagttaatatttagcatgtttatctacagctaaaaaatccaatgacatagtttgacattgtaagaaacccagccaatttctgtaaataaatataaaattgatacgatttctaaagttatgagagaaaaattctagtaatatataaaattaaattatttaatattttaaggtaatattcagaatttttagacacatgggcaacagattatcattgctgttttctgtcttatagatttttatccctcacagtctaaggtatctaaacttccatgacttaaaatatgtgggaaatatatctatatcatgtgatataatttaacagtaaaacaagaaaattcacattataaaatgaaacaaatataccgaaaatttattagttttccagattgtaccattagttaaatgaagagtttaaacgggagagaaattcctcaaatcataaagccctagaacttttgttctaggttcatattttttcatgaagactataagagggagacatgttattagtctataaygcatgttaaattcattttaagcttctaatctttagttattcttctaaatatttaaaaaataggttgctgtgatttacagaggcaatgaatattttacttaaatctaattatagaatgatatgctttgaaataggtcatttataactagtgaatatatattgtgaaatttgataaatatctctttatattattaacatttaaaatattattcatcgaacatattttcaaaatacttatgacaagtacagtgatgcatctcttaataatggggaagcattctgagaaatgcaatgttgggtgattttgtcattttgtgaacattctagagtgcacctacataaacctgcatggtgtagccyactacacacctaggctatgtgatatagcccatggttcctaggctacaagtctgtacagcatgttactgtactgaatactgtaggcaactgcaacacactagtaactatttgtgtatctaaacatagaaaaggtacagtgaaaatacagcataaaagataaaaacagtacctttggacagggcttttaccatgaatggagccagaagttgctctgggtgagtcaatgagtgagtggtgagtgaatgtgaaggcctaggacattactgtacactactatagaatttataaacactgtacactcaggttacactaaatttataaaaactatttttcttcctgcagtaataaattaaacttaccttactgtaactttcttttttttttgagatggagtctcactctgtcaccaggmtggagtgcaatggcatgatctcggctcactgcacactccgactccctggttcaagctattttcctgcctcagcctcccaagtagctgggattacaggcacgtgccatcatgcccagctaattttttatatttttattagagacggggtttcatcatgttggccaggatggtcttgatctcctgacctcatgatccacccaccttggcctctcaaagtgctgggattacaggcgtgagccactgcacctggccaccttactgtaacttttttactttataaacttttaaactttaaaaaccttttggactctttgtaataacacttagattgaaacacacaacacattgtacagctgtccaaaaatcttttctgtctttatatctttattctacaagcttttttctatttttaaaacttttttaaagcattttaatggtttcttagtttttcaaatgttttgttaaatataagacacaggctgtgtgcagcagcttatatctataatcccagtgctttgggaggcccagaggagaagattgcttaaggccaggagtttgagaccagcctgagcaacatagcgagaccctgtctttaccaaaaataaaaaacttagcctagcatgattgtgcacatgtgtagtcccagtgctttgggaggccaaggagggaggatcacttgaacccaggagtttgaggttacagttagctgtgattatgccactgcacccaagcctgggcaacagagtgagaccctgtctcttagaaaaaagaaaaagaaactaagacacaaacacacatatcggcctaggcctacacagggtcaggatcatcaaaatgtcactaggcaataggaatttttcacctccattatagtcttatgggatcactgctgtatagtctgtcagtcgtggtaagaaatgtcattatgcggcccatcacagtactttaaatctgataccttcatgtttatataagtaaagtagtgaaaatgctgacatgggagggcattgttgaagtaaataatcttaatagttattttaaagagcattgatagggaccttaaatagaaagtgacataataataagcaactaatgatttttctctttgacttttttttttttagcctggtgaactcaaggactggtttgtgggtcgaagcaatgcccagggaatagatctgaaccggaactttccagacctggataggatagtgtacgtgaatgagaaagaaggtggtccaaataatcatctgttgaaaaatatgaagaaaattgtggatcaaaacacaaaggtagtraccacgggatagtcttcttgggttcgtctctagcctaaggaaatatgttccaatatcttcatcatcatgaaggacagaggagtaacatcacagcttgtatggggtggttaactgtggctttaagtcaaggctggaagggctggtgccatgaaatttgtcctggcccctagaattgggccgtaggtggagaggagttggaggtgcagatatagggaggaacccagttgtaggtttcttagaaaatcaccatggccttctcagagaccctttattagctcatttgatcagctcctcctgccatattaccctgttgctccttttctcttttccagaactttctcctcccttgctttacaaaactctactttctcctacctcttctactgtctttcaaatcactactcagtttttttccctgtttcttctacctgggcataaatgctggccattttcagggtctcatctgataccgttatttgcttccctgggcttccctccttacctgtactttcagtgttgtctgttacacaaggtctcccagatcygtgcctctaactccagaccttccacagagatttatgtctctgttttactagctaacttgggttcctttaactggtggaacttgatatctcaagctcaggttgtccagaaacaaatattttcccttagaaccactattctttcatttatcccaatcatcaaagcttttgatttttccatctctgtcaccgctcaccagttaccacctctcagcgatttgatctctctgacacctcttccatttcccttcttctgcaaactcattcccctgcctcagctgagatccccacggtctcctgctgtaactggcacagtggcctcctacttgtgtttcatgtccagcctctcccaactctattctatcttctcaaattctcaatcttccagagtgacctcacacacaaattattgctcttttgcttaaaaaaccttagcagctctccactgcccagaagataaagtgaaaacttaatgtgatggttaagtatggagactctagaggtaaccaccttggtgtaaatcatggcttcatacttgctgtgtgaactttgtaaagttatttgacctctctgtgcttcaggttcttcatctgtaatatggaagtgataatatctacctcataggataaggattgaatgagttaatacatataaagtacttgaarccaggacctggaacttttattaccatttcagtgtaattttttggtactctctgttatgtagctcagggctaggtggacacatttacatatccactaaacatttggtgcatctttgaaccaatattgtcatcagtyacttggaggacaaattgagcccatcttggaggaaaggtgaagaactgctgtcagcagccctctattccttctctattgttctgggtatttctgctttcatatgtcccctacatgtagtgtctttcctaagtgagagctcgcaaagtacmatttctccatttyattctagttgctgggtcattccagcagctcttggcccctggaagctgccggctggtttattccttaagctggcttcgataccctatagactcaactcataccaactcttttgtgctcctaaacataccattttctaacaattttatgtcttcagatgagttgctgctccaactgtctagaattctcttgtctttccttccatgccactccctctgtgaagtcatcctctactcttcaagacagattcttttttcacatgttcttcatctatacttccagtatgggcttactgttacatccagctttatgtatgttatttgtttatacacctgttttcccctttgattmtagaatttgatcacttgattgtaagaattacgattaatatttgattatgacaggcagtaggctgagggcctgttatgaataaacacaatccagctcagcaaacaaatcacaatatctgaaaaagagggccactgcaagtaagcagacaggaatccagacaagtgttcatcatggggttgggatgctggatgaaggatccaggagacagggagccttagattattggtttaaacttttaaaaactctcctgcctatatatgggattcattgcagaaacatgggctgagcctacaggtgggggctggtcttcttagtggtggcaaatccatacaggtcttcagcaacctcaattcttgcctcctcagaagaattcgaccaagaggcataaggcagagtgagagactaaagcaagttttagagcaggagtgaaagtttattaaaaagtttagagcatgaatgaaaggaggtaaagtacacttggaagagggccaagcaggcaacttgagagatcaagtgcactgtttgacctttgacttggggttttctatgttggcatgcttacaagggagcaggaggttgtgtgtcttttcccctgattcttcccttggggtgggctgtccacatgcacagtagcctcctagcacttggtaggcactgtattcacagtgtgtttatcgaagttgtatgcatgctctcttgagttgttcttcccttaccagttgagtgttcctactaagtcacataccagttaatccgtgccattttgcctcttagtatgcttaagcccacttgcccaactcctgccgtcttatcaggaagccgatcaccagttttaggcttttctgtctgttgagggactgcctttccctggcacttgctgcaaccaattattatgttacagaggcagtttaacaaccgcttgaccatcacctgatggttgcctgacattcctggtggttggagggccctctcttgtcctgctcatgtctgactacctacctaccataacatttcccccctcaagaatccaagacctcaattctttgggaaaaatggataaaggtcagtcttctgtaactgcttcctactgatagaggggtggtggtkgttgttttgtgggtcttcacctcttgctagctgtcagggtaggatggctccatgggttggtaaaaacagtatccagccaggctggagggagaaaggggtggaattaagcctctgtcatgtcttgttgatgggaagtctaggggtcctctgtagaagggtgactcttgaatactgacatgatggtgtctctcactgaggatcatctggagcttgatggcctgaaggcaagaggagacgaattagtttattagatttagaagaatgtcaaaatgaaataagggagtgaggacaactccaaaaaatcctgacgctgccaacacactcaggtaactggtggctattttcgtgcctgctaagacttgtgtggatggggttacaagccaattccaatgtgttcccagaattagaatattgatccagatttttacattacccattcctcttgtttcttctgagctgtggccagagatcactggttggttcacaggaataaacagggttagtctaaattgcagacaaaaactcaaaaacaactgctgagaatagaatctaataccaagttattagattatagtctgttatgttcttgaaacataacttttctctctccagtcctcatttttattaaaaacaaatcatgataggactgatttgtttgcaaaataagcattagtcctatcatacttggcctggttatttgcataaagcacagcaagaataattatttgccatataggctcctttttaaattggctttgatgaaacttcattccataaggtatttcagataagacgttttaaatgccttgagcccagccatgggtttctgccatcaaatacctgtatgaattgggtaaattcctctcctcttgaggtcctaaataacctggggctcctaggcctgtcagaaagtgacattctttactccccatggatcaggaaccctgtacagggactgtgtagacaaggtatgagaccagttttcccaaggggtttttattggctctataagtcaaatttgattccttaaaggagagcatgccattccagtcaaacccttggtaaaataaccagtttctccaattgtgccttgttgcaaaagaaaacagattactattgcacttatgcaaataactgtattgccattagttaagaatacccacaaatagtttccaaattctggagaaatcaggtagagagaaatatgctccaaattttgtttacaggagtacttatttttaaaagctgtaaatagctcaaaagaaagttttcttgactttgaaaaacaaaggatcagcaatgttttaagcaaaaagtcataaaaggattattttagtcttcttttagttcagtccatgcagttaactcctgttctgcctggtatttgtgaacatttcagctctccatgagagtcctgaaagttctttctctattctaatgttacaatctttaaagttatcagcaacctgcattcaagagtgcctgccagagtcctatagctgattataaaggccaccttttaaagaggattaaaacaagacaacaattgtgaatgagaaaaagtcttagggcagccacagtcaaagacacagttgccaagaaaatttgttatttctgtggcacacaattatgtagcataacagttataattattactgacaatgtatactaagttatatcagaattataggagctttgtataattttggaacacatacaaataacacatttatgaagagtagatcaatgctttactaaaagtctgttgtgcttttcaatttgtggaaaaactgaacaatagttctttaactttagccaatatgattaggcatagaattttttttatcagattgatctttcacaaaccttccacaacttgctcaaaccttcagctttatcctatctaactttaaaaaatcctttaactctctaaactaggtcaaaaaaatccacatttttatgcctttttatataatcttttactaaaaccacattctactttccttacatgccttgcatataaaagttttccagtagtctcaagaacatgttacactgttaactcttagcaacttttacttttggtgaaaaacctgctaagtaagtgattctgactatgtactaggtttgcagcttaggacactagacagaaatgcagaaaaggtttgactctttctagcatctagggggcatgggtaactctgtatgtccccgggcctcacgtagctttaaaggcagcaagttgtacagttaggagtcaaagtagcagtttatgaagcatttagtaagcctaataacttttaaaactgtataactttttaaaaataaattctctttcacagatcttttcacaacttacacagaccatctatgacatgcttggactttctgatttgtcccaaacattcctctttttaaacaaccagtcatttaatttaggacaagaatttaccatacaagatcctttctcatataaaacttctgttctttataatctgccttaccaaaaatacctcctctttctctttatagcttttgaattatattaaagtcattttctttctgttaggaagttaaggtttgtactgcatgttgctgtgtgaggattgtgaagggggagcagagaagaatgaggttatctgcatactgcagaagttatcccccctcaagagattgctcagttagatttttgctggggcttgtctgaataaatgtgggctatttctgtatccttgaggtaggactgactaggttgaagttattagttaaacatttaggtaactttccagaagaaatagagctattagagggaaagatgaatttagagactgggtaaatattaatcaggcacccatcttggaaagcatatttttgcccaaaagagtgtgaatcttttcttttggaaggaggaggtgccatttgccccattatgtggcagaatttggaggagakttcagagaaggagattagcacagagtaggcagctcttaaatcccaaagggaaatttataattttactcctccaggagtttctcttagctttgtcttgtcaatgacttggaagccagccagagcagagagccccttcagctcaaggccattaggcattgggactctgtcccagagccctttggccctcagggcatccaatttccagtagctaagcttgtggcagagggggcaagctgtgctaggcttcctctcatttgtcccattggggcagtttgccttccagtggcctggcttcccacaccaatggcagttacctgaaggagtgtttttagggaaacctggatgggggctggagagcttataaagcagccaataattgagcattcctcttgtttctgcatttttccttctccttatctctatcctccttattatgctctcagttataaaagactgaggaggctgatttgagggtttcctgcataagggcaatgggttccaaggctgacttttgtattttctcccagttcatttttaggccaaacgatattacaaaggaaagctagttttgttttgttttaagctttgggggagtcaaatgtttctgtttttggggatgcatctgaggagtatatcctgtggtatagagacatggttacccatctgtaaagagggaacagaggagaaaaaaaaggaaaaaggaaaacaaaggcatcccctcttactttcctgttatcctagataagcatctcccattcatccttagggttctggaatgaaccagtcttaccgtgtacccattaccttggttccatctcatcacaattacccacttgagaacagaagagatactagagtaaacagtgggacccttgttcatccttgggactctggaataaccgttcttactgtatacccctaacctttccttcatctgttttaatggtaatctgttaacctagaaccaaccttcatgtctgtcmtatgggtcttttgtgactgcaaccttgggctggcctatgtccttgtctccawgacattatggtgactctcactcagagcattgtagcaacaaaatgattgtctcttttttcagatttccttcccatgttctttaagtagatgagaagcctgtttttcagctaactgccacaagatggctggatttccctcccttcgaatatgaccttgaaggtcttggtgcatgttaagaagggcatggaagtgattagagaaatggaggctatgggaggaagtgagataaatactcatggaaagctttcatatgcgagtgaaayggcaacatttatttgccctcttaacataaagtagtaacctccggaggacttgaggcttgaggtaagaactcacaagtggcaaaggaagaattttccctcctttcaaaggagtgttaactcaaaaaaagcaaataagtgagatccttaaagggccacagtgaggacctatgcagacacacaaagtacttaaaaagtcactggaaaacagccctggagggtaacagggacaaaaagtatacaataaatcataagggctgggattccaatttgtatctatcctggcaatgcgccaccagacaggggatgagttggaggtcatctgagctggtagggtaaaaacaagtataaacctcaggggatatttgcaagggagcctatgtctttgctgctgcacaaatgcagcaagagccatgggcacacaaataacaaggagtgtgtgtttaagaagttacatggcatgtgacgtgaaagcaaacaagaggcaggcttgcccctgaggcggatggtctagctggtgtacaaggccatttgagaacacgaaggagaataggaggtgaataggtggagtaaaaaggagaataggcagtggttttggggaaatagccaactttagttgaaaaagcagaggaaaccccagacattgcagtgttaggctttagttctaccactcttgtaagcctcctgtccaggagggccattagtgtctgagttctactcggtgtgaactccgagttccttccacccctccgagccacccattagagtgaactgaaagatcagctagcgggagcagagccattgtggctgagaagaattgttctagtggttggtcagtaagcaggagagcaaaaagagagaaggaaactgcatacaggggttgagtacctccagccaaagaaggtgaggcatagaggtcctttaccactgggaaacatatccaagtcatgtggcacaaaggtatgttaccagtgatgaatccatatgggtttgcagcaacctcaattcttgcttcctcagaagaaagaattaaattgagaaacataaggcagagcgagagactgaggcaggttttagagtagcagtgaaagtgtattaaaaagctttagagcaggaataaaaggaagtaaagtacacttggaagtaggccaagcgggcaacttgagagatcaagtgccctgtttgaccttttgacttggggctttataggttggtatgcttatgcttctggggggttgtgtcccttttcccctgattcttcccttggggtgggctgtctgcatgtgcagtggcctggcaacacttgggaggggcgcttgcacagtgtgtttactgaagctgcgcacatgctcacttgaggcgttcgtcccttaccagtccagtgttcctagaggaaggtcatataccagttaaactctgccattttgcctctcggtgcgcatgtatgaacccatttgcccagctcctgagatcttattgggaagctgctgatcaccagtttcaggttttttaatctattgggagactgcctttcgctggcgcctgctgcaaccaattattattttagagaggcagtttaacaacctcccgcccatcacctaatgtttgcctgacattcctggtgttgggagaaggccctctcctgccctgctcatgtctgactagctacctactgcaacagtctgagacaaaggctaccaaaggctgaggacactggcagaacctgataagtgagtgacttaagctttcctgcttctgagtcatggatacacgtcactgtctcagcctgaaaattatctttcatgggagagggggagccagaaaggcggcaggctggggtaaccccaggtgaaagagggcagtcctgtgtggtaaaccacgagggctgagacagaaatggaaaacttctggaagcggagtccccatattagcctacaagctttccccattgcttgcattgacttgcttgtgctgtctttgttaaatctgagaaatgaagaaaataattccttccacctatcatagaagaatggtgaaatcaactcaggttgacaggatatttgattgtcaactttgtgcaagcaccattatttctagccagcactaccttyttctccagctgaacctgaatatttgcataatctctagattagatgtttttgtatttctagcttaggcaatacttatttaaaagaggcatgttcatggtactattttttaataagagcttttgtttaaaacaaactcagtgtgacttcttttcataaaggtaaattaaagaaaaatacatgaaaatgaaagattagtccctttttggaacataagcaagatttgtttactttacactaaatctttagtaaacttacttcataatcatggggtgatattgcctatgtctggttcatcacctttttccatttttgtctgtaagtgtgagacagtgttttgacccagcttggtacaaaatatatagtaggcagttcattaatgttattatacattcctcttccctcttccccttctcagcctaatatctgtatttgtatcccttatagaggttcttaaatgtcaagatttattcttctgtttggtggaacagggaatcaaatcakattaatagaaaatagaaatgcagattcctcctcctttgtatagctgtgagaaaaaaaaaaaagaaattcatattcccacataagctgatccaggcctggggtgtgtgtgcttcaggagggggtggtgggaaggaagttcattcttgcaaagccctccagatgctggaggtagctgagacacatccactcgctcgagatccatgctctccttgttcktctgaacttctctgaataaaaagctctctcttgctctcccagacttccttctctaagtcgtttgtcatcggctcttgagctcttcagcctggtcacctccactgttatctgggctcagtacatgagccttggcctgaaagcagagtcaattaaaatatacccagccatttattaagtttaccctgactttaatagctagagttgtgaagaaaactgaataaatagagcttcaacataatttaagaaccaaagacatctaattatagaacatcatatttgagctgtatttataatctttaaatggaaagtttaaagaaaggccacaattgtttctagtttctattaaaggctcaattttaaaggtactccaaagtcttctctgtggatcagttaaatatataattatagtacacagggrtctcaggatttagtcagmctaaaagattctgttaatagtcaaagggaaatttagtttaatttatcaaattgtagaatttgcttgcttttgaacatactggtaacatgcatataagcaattgtgtatgatgtaagaactagtaataggctaaacctgatagcttcacacaactttgtgtatttagggctgtatctttcaatttgtttcaagaacagtttcttttaaaagttttttattgcaaaattcatattttattacaaaaattaaaacatrcaaataaggagaaagaagaatccattaccctacaatcttcagtgaacaccattaacattttgatacgtacctttcaaaattattttttatggctgtatcaacctgtaaatatatggtgcatactgtgcaagccattctgaacacttttaggtggataacaaacacaggaatacagtctgccttggcatggctttgcctcctaactcccactaaaaccaaccctccctctcagagagtattttccttacccccgacagatgggccatgggtacttccaacttctttatttttactactcttttctcttttcttctcctaccccaattcgtccctggacttggtgaagttccacctccttcctgaagtcctcaatgattctccaaaccatggtgattttgcctcttctgaacttattgaaatgtgaatatttgtcaatatctgccattgggttaaagaaaatagagggaatgagagatgtacaaagaagaggaggactgaaaataaattcaatagtaaaagaaaaacttttgaatagaatattatagaagagtgtgttaaactcatctcatataatattcatgtcatgttagcaattggatataaaaaacataaattcacttaaaaaagcatatgcattatagagtattttgatttcatctcccatattagttatttttaggttgatttaaatcaaaatataataagagtgtatttcagatccctgtggaaagaatgcattattgaatacatggaattgagacaaatccatctcataaataacagcatagatcaaaataaattctagacactacaatttaagtttaaaaagtatgaaactagaaaactttcgtaaggatgtaatacttagagggggatagaactttctaaatttcttgtatagacactagcacatagtggtcacttaatacttattgaacgaatgaatgaaatggaaaagcaaagagaccataaagaaaagatcaataggtttgatgttatgtacttaacataaatatcttaatgctctgtattttaattacaaaatttgaaaggcacatgacacacttagaaaatatttatagtgtgtaggtcagagctaattttttttactaaacaactcttgcaagtcaaaaagaaaagctatgcatttctcccagcactttgggaggccgaggcgggcggatcacgaggtcaggagatcgagaccatcctggctaacacagtgaaaactcgtctctactaaaaatacaaaaaaattagccaggtgtggtggcaggcacctgtagtcccagctacgcgggaggckgaggcaggagaatggcgtgaacccgggaggcggagcttgcagtgaaccaagatcgctccactgcactctagcctgggtgacagagtgagactccgcctcaaaaaaaaaaaaaaaaagctatgcatttcaatagaaaaattagttaaaccatataaatatgtcacagaagaataaatagaaataatctctaaatataaaaaacttctagttttattagttaattaaaataatgcaaactttaaaaattctattgtcattaatcaaagtgacacactttaaaacacataataattccattgttcttaaaaagattagagatggaaggtttattatactgttgctggttatatttctgtaccttacaggaatgcagtttggaatacatttttaaatgtaaacagttttagctaatatagattttaacttaaaacatttttagctaaaaacgtgcttagcttttggtcaagtcattcaatttctagggatttctctaaggaaagtacagatttggacaaatggtagctacaaaggtgttcatagtatttttaatttttaaaatataaacatcccagtatcacctcttggagattactagtactagtgtagtggctgtgtagccggcctggctgggcttgagaccagcctctgccagtaccagctgagtggcctcatgctgttccctaacttctctacatctcagtttactcatctgtagggtgggggaaaatgtagtccctatttcatagagtaaatgggagaattgaatgtctgacacagaaagtgtttaataagtattagctatcattttattagtatttaagaatggtatatccagacattggctgccactcagccattaaaatatcattttagaagggtatttaataacatgaaaaggtgttcattatctgttttcaagcaaaaaaagcagtatataaaatggcatataaatgatcacatttaaaaattatataaatacattgggaaaagactgaaaaagagatatatacaaatgttagtagtggatatctttaggtggtaaaattatgggtaattttaattttcttctttgttcttgtctgtctctacattttctacaatggatatatatatatatatatatatttttttttttttttttagcaaaaataagatctaccaaccaaatgaaaaataataaaaacaacctcctactctaaatcacacttttccacagttaacagtagcttatgtgaaaataggataattttaatagactaaagctgatacactagaaacagcgtgagccttagggtttcactgactggatgtgaactcttagctgtgtgaacttagatatgctatttaacacacccaactttcagattcctccttgtgaaatgggtatgaatatctttgcatatccaatacgaatgttgaagtgcagtaaaatagttcatgtcagaactattcataaacagagcagagctatacaaatatgagatcttataaccatcaaaccctactgatgccattagattttctgtcctaaagaacagcatggatcacgttgccagtaaaatcttttcttttcatcagagaagcacttggggtttgagagtcttcctagttgctattaaaaactcattgcataaaagtatcaagcttttggctccacattatttctttggtatacatttcttttttcctttgttttgcttccaagatatgaggggcagtgaatcattctaaagacttaacatgaattcttgaaacttgcctttattttaaaatttaagatgaccattccaaagtaaacatattttacagtccactctgaaagagactcaacctaatattctttgataggaacaatgtttgaagtaattgagggaagttgggaaaatagtaagcaaaatttggaaataaactttaccacatgtttgaaccaccacagaggacaaatcttgttctgcagttcaattattttcttttctcctcatattatccttaactattcataataacaatgtgtgaaccactacagatcagacagcgatgtcccaaaatttgtgagttgcatgctggttttcaagttacaaagagaggataactggcagcccacaaaaataaaactttgaaagaaatttaaacacttttgaaacattttttattaaaaatctgagaaagttagacatgaggaatactgcttttgtaggaacctttattttttctgtgaggacaacagcaaaatagttgaaatatgaccagctttcagttttttcctttacctttcctatgtcttttctgtcaagtgatcataccaatgattattaaatttataatccttttaatctctcatctgaacagcttgctcctgagaccaaggctgtcattcatyggattatggatattccttttgtgctttctgccaatctccatggaggagaccttgtggccaattatccatatgatgagacgcggagtggtaggtattctttctgcttctcttattggttcaaagtttataacactgtacaaggktttatargatgatttctgtaattttttttaaggaactgaacattaagtgatttttgcctgaagaaagaactatgtttaacaggaagctctcctaatcatttcatatggtgttggcatatctatttggcagaaaaggactcactttttcaataggttaggtgaagagaaacgtgatcttgacagtacctagccaacagaaagggagaaaacacacgtcataaacttgggtcactcttggacactgataaagtggagagattacagaagttgtgtaggttcatgtagaagatggcttaaacatgggggcagcctcttggtgcttgatcaggrtccctgtggatctctacatgtgtcttattgtgttgacacagttttgcatttggaactgtttctggtggtgtcagggaggggaagtggtgctttggctttctctaactagttttagttaagcttcagacaaagcaagctttagccagacagatattttcaaattgttttttgttgctccagggaatttcctgctttggatctattttctggggcctttgaagagttagctttttgtaaaaacaggatgattagtttgtttttttttttttaattttagattcggggtacctgtgtaggtttgttacacggatatattacataatggtgaggtttgggtttctagggtacccatcaccaaaagagtgaactcaataggtaatttttcacccctcacctcctcccatcctccccgcttttggagtccccagggtctattatttccatcttaatgtccaggtacacccattgtttagcttccacttataaatgagagtatgtggtatttgatttctgaattatttcgctccagataatggctcctagctccatccatgtcgttgcaaaatacatgatttcattctttttaatggctgcttagtattgcatagtgtatatgtaccacattttctttatctaatcaaccattgatggacaattaggttgattccatgactctgcttttgtgaatagtgctgccataaacatatgagtgcacatgtcttctttatataataatttcttttcctttggatgcatactcagtagtgggattactaggttgaatggtagttctatttttagttctttgagaaatctctgtactgttcctcatagaagttatattaatttacatttccaccaacactggtgggaatccacgacaacatctgttgttttttgactttttaatcatagccattctaagtcatgtaatatgatattgtggttttaatttgcctttctcagatgattagtgatgttgaggatttttccaattattttgactgcttgtatgtcttcttttgagaaaagtctgttcttgtcctttgcccactttttaatggggttgttgggatgataattttagatattggaaactgagtgttgaagaacgtctttggggaaataacattgttaaataaatttgaagactttgtggtttgttgataattgggaaacttgtaggcctgcataatttataatgcatgaataagaacacagtgtatcaaaatatgttatttatttctataatacatacaggagatttaaaaaatataaaaccagatattgaatggtatatatgagaatgattcatagtgggtatgaggttagtataggtacattttttaaattaaagatttaatgataaaaatcttcctcctattctcccaggcctagtttactatgactttattacctttccctgcaaagctttcaactcataagtagaatgtacattctacccaatttctactttgtagtattaggaatggaaattttgtaacttaaaactaagtgtaattatttagtatttaaattttacctctttcccatagttatgtagctaaaaaaatacatcaacaatacaattactcaatactgaatcactctttagaaaacatgctgtgctgcttggtctgtgtctgtttctttaatcttgtggatttgttttctaggtagtgctcaygaatacagctcctccccagatgacgccattttccaaagcttggccygggcatactcttctttcaacccggccatgtctgaccccaatcggccaccatgtcgcaagaatgatgatgacagcagctttgtagatggaaccaccaacggtggtgcttggtacagcgtacctggaggtgagtttccattgtgctctctgattatgtgattgtagcttatytacaatgaccatttaggtttagagagtgatttagatttagagaatcttcaatcgtcctccatcattaaaaagtagactgaatctatagttcttccattaaagtcaactttttgcgtgaatgattactatgtataattttgtttttgtggattttaaaaattgtgatgctaattgaagagatacaggaaatgaactgaagacattcatttggaaaataataaattgaatattgttaactaccctactttccaaattcaagccttagggaataagatggcatccttagtttatgccagtcatgctctttcactgtaggtaaatatatattttagagggcttgttttggcttttagcataacctggtgcacagtacttttgtattaaatgatgggataatggggagtatttgacatggaatatttagtttatgttcactattctaataatctctatgagatcaggtagctttttgccttttagtctgaaaaggaagcagttgccatgtgggacagcagctgggggaagccccttcctaggtagccaaggaagctctcttgccttccttgtcccaaggcggactttacagagctcgtattttcactaacactcaaggatgaagagtgaaatgcgaagatatttatatatatttttacttttctctttgcctgagaaaaattttctatggcccacctggaaaaagaaaatttgttagggtaataagcaacattagctaattgaagggtattggtatgtttaatatgcttaattttgttgaattatgtgctgagaaaaatattctttctgatttttttctttctgatacatgttaattctgtttttatttatattttgcattttatccagatcagacttagtactctttccccaatagcttcagaaatatgatctatgtcaaatttaggatttagagcatgtctagtacatcagatgggaagtaattttatactttagtttttawaaaaactttaatgacttcttggaattcctttttgaacaaatagtgtattgtcaacaaaatataaagtaatctatatcagttaaatactgataataacattattaacaatagtaataatgttagttaacgattacgtctcgcttaactaaacagtcaaaggaagctccgttagtcttcagttctgtatatagtgaataacattcatgtcttaggtcaggttttctagaagcagagcctgagatagggatttgggtacttgtaatttattaagggattactttttaggacaaaccctgtagggaagtgagggaagcagggcaaggaaggggatagagctaaacagggttgtggtstcaggcaaagtccagccttggcctragccattggaagaagcctggagcataaattaggggcaggtttgtctccccttgagagaaagggaccagcctttggtggctccatatctgtcagccattggttgtggggtgccagcaggaattgggggtgagagatagcatgatgtaactcccaagccaggtgggagattctggctcccatcagcaattctctggaaaaggggtgggggggtagctgtgagctctaacagccaacacctgcagcagtttgggtctggatgccctgcctccataaaagcaayctggtgggcactaacagcatcctctgctaatttgagtcagatttaaattaaaattgttctgaatgcagaatattctctttggtgctatttgaagtattgttatcattatatcttgtatgtaattcaactcagggattgttgaattagcatatagtgtgaaaggaaattaaattctaggaccccaaattcatttagctaaagggaaaagtcaagctgggaactgggtcacacaaacctgcctccccattttggttcctaaataagatgattacaagatgaaagggtacacgcctcccccatattttgcccacagggaaattctgggtgagctgttaaaacttcaccatggccatgtaaattgatagcttatctttacaggtgcaggcaccccagcccaccagacacaaatgcgtatccgattgcccccctaccccattttgtctgcgttatcttatgtaaaatgcacattccccacatttttcctctgtcccctttggtttatgtgaaaactctgtgcttatcaatatcccaccctctcccctttcaatttggagccctcaaaatcatcttcggagagaggcatagacctgtctctggggcgcatccttaactttggcaaagaaatctcctaaaacaattgagacttgtctcatcattttccttgattgacaatagtatattgccaagactcccaatccctcaggaatacactatgatattgattgggcttaaggaataatatagtatgtcagatcatgtcacatgaagctccaagttcttctccagtagaaaggtagacttagagggatgtgcatttctttaatagatcagtggggatgaagtcttttaccctgttgtcttctccgaagcccactccagcaatgtggaaggtgggtaatgtctgcattagcactctgcagcagcaaatgcttttgcttaggaacctgagagtttgtgcttttaaggtataacaacccccgacctatgttgttcaatcccttacagcagatgatttcccttaagttttcccacaggcttcccaaatgccctggtttgtgtrccttttacttggttcttgaytcagaagactagcctgtgtagagttttaggctccttgtgcatattttgactttccatttggtgttttggcagggatgcaagacttcaattaccttagcagcaactgttttgagatcaccgtggagcttagctgtgagaagttcccacctgaagagactctgaagacctactgggaggataacaaaaactccctcattagctaccttgagcaggtaaacacagtccccagcataaaaatgcaaggtttacaagcattcaaacctgkcctacaatggtcttgtaagaggagtccaggagaatccgtctggtgcagaatgaggatgccatatttggaaggcaggtgtcagcagtgtttcagttaggcttttatttgtcataggttttgtggctcakgactattcaccaagaactgactaaactggagagtatacagaaaagacgtagactctcrtttctgtttgtattattctaagcaagggcaatcctaggactctctcccaccctgatcaccgtgaggcatcccaggcagagccagaacaaaagtaaggcaagcgaggcacctgaatggaaaatttaaggaggattttaatcttaggggcatgcaagtacaggattagcacttgagagtgagtgtctctttaagttttgagctgtacaagcctcatctttctcaccctagactcaactgcatcacaggtaataataataataatgagttatgtttgtcatttactatttcccaggcattatactaaatgccttttatgtaatagttagttcatttaatccacacaacaaccttatgagggaaattatcatcatcatcattataatcatcactaaattaaagatgaggaatcagagacacagagaggctagacagctcacctgaagttgcttagctagaatctgaatcaaggctgtctatttccagaatcaccatgctgtactgactttcagaacagaagcctggatctttaccagagagtcatttatgtagccattccaatgtgatccatatagaattttgggggatctcaccatctgccagaataaaatcctttacctactcaggccagtcctctgccaaccccaccccctgcatagtatgtagacactggccccagaggcagtggcagtggaaagacctaagactctgttcattcctgcagttctttgccagtcttcaaattttatcctgaatgtggccatttacacctaaagtcaagtagagtgatgttagtttcatgtgccaacaaatagtccagaccaatctgttaaactaatttgacataaaaaagctgttaaataaacatttaagtatttatatgtgtatatgtacatataaacatatacatataaaatcaacactttttttaaagtaaaaccaggagttgaatccagtttctttctccaccattgcaaggctctgttgcagtggtccctatagcttgctatggcctcctttgaataaaggctgctctaaaaaaaaaaagaagaagaagaagcaaaatcagcataggaattcttttacacatgtcaaatatccatatactgtaataccttaccagggactgtcgtggaatagatccactgatgtcagatggtgattaaagagcactcattccactggattctttttaaatcaatggattcctgctgcatgttagcttaaaaaggtattttccaacaacaaaaactaaggataagcagtccacgatgactctagaacaactttggtgggaacccctacagaatgtctcctttgaggagagccgtatttggatggatcttctgagagcaaagttaactgaaaagtatgtttttggatagaggaagtaagatgggactgattggggtgttctccacttacatatcaaatacagtgctttttattttaataaatatttaataatctttaaatgtttaataatatttgtcttaatactccttaatacagtgcttttaattttatgtatatagtttttcaactaaaatgtattgactagtttcacatcccaggcattctgtgaggcactggggatagtgaccgtcctcaggaaggcttcacacgagtgctgtcagaaacaagaatacctaatcacaagagaggaggagagctggctgaaaaacaataaaagcttagctacaaggagcaataacagtacacagaaggggacctaaccgagtcacgggagtttggaaaaggcttcttggagccgggctataagatttactaaagttgatgccaataagatcatcactgtgatcaacaatttaaaaacatgcttagctgctgtttaaatcatctcttagttcttgagaaaaaaaataatacaaaacaaataaaacacgtcttcttaccatcaggaaaaaggagatttgtcatacttatggtagcaggtgggcatgcatccaattcatctgacagtaatatcaatttatatataaataagctaaaaagaagaaggttaaagttatacaatcctattttatgccacgcaaaataagaatttgctctgtccacagatccatgtgatctaccttgatatggcattgtcattaggatgcaaactgtgtctaagcagtgagtggtatttataaccagctcatctagcttgcatcatagaacactccagtttaggaaaacaaaggctgatgaaaaatcagtgagggctgccagaagttctgtgttgtaattgttgtcttgacaatggtggtgattagtaattgaacacctgggcctaaaatctaagcttggactagtttacaactcatggaaaataggtgattaggagatctatttctgtaattgtttgagaggaaatcccttgcagagttttaaagagatgtttgcagggactagaattgtaaagctaattagagtagagagtctgctaaggagaagagcctcccttccactcagtagctttgaaagagtctagttctcaaaattctcaaaaaatttcttaaagaatggttcatgggccaggcgtggtggctcacgcctgtaatcccagcactttgggaggccgaggcaggcagatcatgaggtcaggagatcaagaccatcctggctaacacggtgaaaccctgtctctactaaaaatacaaaaaattagccgggcgtggtggcatgtgcctgtagtcccagctactccggaggctgaggcaggagaatggcatgaacccgggaggcggagcttgcagtgagccgagatcacactacactccagcctgggcgacagagcgagactccgtctcaaaaaaaaaaaaaaaaaaaaaaaaagaatggttcatgggcacctgcattagaatcacctagagttcttattaaaaatgagtttcctctcctaccattgaatcacactctctgcagggcaggaccgaagtatcttcatttgcagcaagctatctgcgtgacactaagtacatgagggtttaggggctataaacagtcctagcaaaaatggagaatcttctggaggctttttcagccttcgctgaaactgagatgtcctggaatctggggagcaatcattgcaggcaccgcaagtgtagtaaaacagcttctccaggcatgagtgaaatttggactttcgtgatttcttttgcaaaagccatacaatctgaattttccagtctgaattcatgggggagttgacacagcccatacacttctactgagatttattactacactggaatttttcaaacagaaaagttgacatatcacagacagacatttacttctttaactatttgttaaactgcatattgcacatattgcaatataagtcttggattgcagaagcagaaaaaagtaaagccatgaatattaacctaatatatttctgcctaatacaggcaaataatatgttcttgtagtgattgatttacttactttacaatgatgtgggaattagaacctttctttaaggcttatgctattgataatttcaggattatagtgcctcaagaggaataaagtacttgggtaaagcctcttttatcagctagcatctttctaagttttattgaatggggcctcattttaagaaatttagagtttgggtctctatatatagcccttttcttcttctctacactttttctgatttttcatcttttaattcagaaagttaagttttcatgtttcatgttttccaatggctgaatttcaaactcttttcaattttggttggcttattagttatggagaaaagttagaattgaataaatcttaaatttttaaaaatatatttactctactatactggttgccaataaaatgatcattattactgtttcctatttgcaacattaaaaaattacatgttatttttatagggtgtgagagttttctttttttttaagaaaaatggcacacacaaaaaatattgctggtaacaaggcacatctttttgataaaacagtgtaccactgccgaatttattctttgatgacaaaggattacaggagacttatctgtcttctgtagggaaatagtcaagtatcataagtagcgaaagacaatttattttctatagcccgattgagtgaggcacaacctgagcatttgggaggttggtgcatattttgttgagtaatcaagtttaatgcattacgatttgatattctagatgcagtactttcttaaagacctgaagcgactctgtcacttcaaacacatattgacttagatgaattgtctttccaaaataaagagaaaagcagtttttgtagtttgcagtgtattaaataatagccagttgatgactacaacttaatttagggggattattttcaatggcagctctcccatcttctttctaaatcaacattctattttctgttatgaggctcactactctattttcagccaaaataatgttaatagatttaatgcaaaagcagtcacagtatatatctttttatccagaatgagctaatattaacaggcttttattatgatatccttgttaattgacagtagccatataatgaatacacaggtgaccaaaattgaaagagagtaagttatgaaatgcactaagactagaactttacacatattggagcaggacgagctgcagacaaaacccctcagacaccgagttaaagaaggaagggctttattattcagccgggagcatcgtcaagactcatgtykcaaaaacccagctccctgagtgagcaattcctgtccttcttaagggcttacaactctaagggggaccgcatgagagggtcgtgatcaattgagcaagcagggggtacgtgactgggggctgcatgcaccagtaattagaacggaacagaacaggacagggattttcacagtgcttttccatacactgtctgtaatctatagataacataaccgattaggtcaggagtccatctttaactaccaggcccagggtgtggccccgggctgcctgcttgtggatttcatttctgccttttagtttttccttctttggaggcagaaattgggcataagacaatatgaggagtggtctcctcccttaatatgacactttttaaaatgatttggaaggtactaaaatctttttttkgggaagcaaacaagacattaattttcacttatctatttagggaaaagcagaataaaatgcacaaaaaattcagtggccttttgtgcatgtcttgattcttaaacaatgggggtctacggtatttgctggaaaataaagagatgcttgatatgaaacatatttaaggccatttctataaatttataggtcatattaattttttggttatttttgaccttcacagatacaccgaggagttaaaggatttgtccgagaccttcaaggtaacccaattgcgaatgccaccatctccgtggaaggaatagaccacgatgttacatccggtgggtctttgccacaattggaggctctacgttatgtacaagagcataattactaattatcataattataagtcttatgttcttctaagcaaaacaaatagctcgtatctctacagcgtttctcagctttgatctggtgaagtttcctttgtgggctcaggtcaggcggagtgagtggagcccagggcggctgctgcgttagaaatccgggtgcagcagatggcgccctttcctcagctatctcgccccagagctgggaggtggtgccacaggctgccgattcttcgcggttcttcaggcaaaggaaaaggagctgctggagttaaaataccagtgactttctagtctctgttaagaagtgctaacgagctgcgaatggggagaccgaaggagggagcggaaagaggaggaaggaagaaaactgctgcgggttgtgtgtctaaaaattctcacacagtttttcatttaatccgtataataaatccgcagggattcaaggttaaacaagagtttataggattgaggtgcgatgttagtgacttccaggttttgagctccatttccatttccccagtttgaggaaaatgatgcatttttctggcaagtctacctactcgcattaataaacattgatccaggtcattttagtttgtcatttgttgggatcttttcaataatgacaactttttctttttagctgtaaactctttacaattttttttagactttgtgacaattaacctttaacttatgtcccaaaccactctgtaccatcaactctttcttaaccttcacatttatagcttggattaaaaaaaaatctttaacatttgtcctctaaaactccattcattcttcatgtatcaacagcccactaggtgccagccagtatgccagaatctgtgccaagatgtcagcccatgtagccccttagcccttagctgagagggtgaaacccagcgttagtatccctgccacaagaaacctgttagccctaatatgtcatacaaatattttattttctctacattccatgatgtgaaatgtttaggaaaatctaacctagggaataaacacgtgggaagaaattaaatcagaggaggggctctagaatactccagcttttcagggacaaggtgataataagaaggaaccagcaatagaactgacggtagaaaatgaagtgtgttgtactgaaggtagaaaatgaagtgtgttgtcctggaggctttgaagtgcttcaagaagaagggagtgaaaaagcgttaattaagatgaaccttgtgaatgaatccttggatttagcagttcagaggatcttgaaaaaatctgttcaatggagtgaatggtgggatcctgattggactgggtccaagacagaataagaaaagaaccattctgagattgagaacatgaacaaacctttccagaaattttgctataaagcaaaaagacaattgaggcactagctgcaaggagatgtagatttagaggtagatttgatgatacggtgatgggggcttaatttttttgactgtacctatttttgcaatgaaataagatgtaaagtaacaactgggaggttgaacaggatgtgtaggggtgttaggaaaaaggagaaggtgtgaagtgtctacgaaaaccttgctcttcaaagtgtggcctctgctcgcaaccttagcattgccctggggctggtcaggaatgcagaacctgggagctggaatcagatttttcattttaccaagttcccaggtttgcacccaagtttgaaaatcactgacttaggtaaatgggagattgaatggactagggtgcccagtgtattctaagtctttagaaatctaaatttctaactaggacctcagagatcctacaagggctacctttggcccacactctgtgaagattctctgaccagcaggtcttcacctggcaagaatcaaaacatgatggctgtatgttctgaccctgctgcttggggaattcatctgtctttttacctgtgttgctcctgatgtgattagaagrtctatgatcgtacgaggtttattagacaatttaacattgatatctataaagtagctataagaaatgaagcctgtaaagagagtttcacaccctattcaataaaatttcattaaattccctatatatttactttaaaaatcgagaatcaaaaaaggtgaactgagctagactgggtattccttagatggcataattatgcattgtgtaattctgcatatttcatgtgctttgtgatttgatattctgccttcctacagcaaaggatggtgattactggagattgcttatacctggaaactataaacttacagcctcagctccaggctatctggcaataacmaagaaagtggcagttccttacagccctgctgctggggtaagtaatcataataatagccaaacgctataataataattaagcatttatcattgtcaggcatactgaagtgatttatatttaatcttcgtactagccctatgaggtaggcaacattgttatctcaacttaacagatgagaaaactgaggcttagcaaagttaatatgaagctctattacyatttctcagtttttgaagagatttacaagaaaatgaaataaaactttaaaaaattaaatttttatttgctaaccttgatttccatctcaatgggattatgtttcatttgcctttttatctttagcacctagcgcagtgcctttctcaataagtatttgaaaaaaaaatgatgcatataagaaaattttaggtggtaaccaaacacttatttagcatattttatgtgcaaggctctctgtgctaagtagtatcaaaaaccatatcttatttaagtagatctcatttgtttgttaggaaggtgatggtgataagaccaaaacttctcttagagcagaattttactactacctttgtattatatgcctgggaccgtgggaatacctgtaggatttcttgaaagtctaaaaagcttacttgaaaagaatttattattatttttgtttatgtacccaaaacttggagtataaatgcttgatttatgcaaacaaaatatcttgagtttttaactggtatatggttttgattgtgtgcatgtatgtctacattgggctgtatatgtattaaaatcaagaggtatatttgggtaactgaaacctggaaaaaatggccctgggaacaagttgtaaaggttcaactattttgatcctttgtctttctggcatgtgttagtgcaaggatatagtcagtgtaatcacgatccaaaataatcaggcgtttaagtggccaaatcaagaaactcttagttccatctgggatggggcctgaggggattggggttgggggctgcctactttgaatagccttttatgcggagtgtgtggcttctccctagacctgatgaagattcccattcacaaagagagtggcttggacacatacgtgcttttgtcagtttctttaacaaattcaagattctggatagcagaaccttgtggtttgggataccagcatgctgaactgtattcttccacattccctcccacattaggaaaagattcaaggctgacaggaggtgctcactaaataaccaaaggcagaaaattaactataagttacatcctctttttttcttttcttttttgagacagagtcttgctctgtcgcccaggctggagtgcagtggcacgatcttggctcactgcaagctctgcctcccgggttcaagaaattctcctgcctcagcctcctgagtagctgggattacagcgtgcgccaccgtgcccggctaatttttgtatttttagcagagatgtggtttcaccatgttggtcaggcgggcctcgaattcttgaccttgtgatctgcccacctcgacctcccaaagtgctgggattacagacgtgagccaccgcgcctggccagttacatctttttatgaggagaagagactggggcaagaatkttgttgaattatatctgtcttcaaagctattaaatcaaaggacatttcaaacataaggcttttgaattttgcttttgaattttttccccctgaaaatatcttttgtttattgcaagagattttatttcaggatttactttaattcaggtggctggattgagtgtatactgaaactgctcttatttttttatttcaatttaaaaaaacacatgcagtttgataataatatgttcttgattttctcttttaggttgattttgaactggagtcattttctgaaaggaaagaagaggagaaggaagaattgatggaatggtggaaaatgatgtcagaaactttaaatttttaaaaaggcttctagttagctgctttaaatctatctatataatgtagtatgatgtaatgtggtcttttttttagattttgtgcagttaatacttaacattgatttattttttaatcatttaaatattaatcaactttccttaaaataaatagcctcttaggtaaaaatataagaacttgatatatttcattctcttatatagtattcattttccyacctatattacacaaaaaagtatagaaaagatttaagtaattttgccatcctaggcttaaatgcaatattcctggtattatttacaatgcagaattttttgagtaattctagctttcaaaaattagtgaagttcttttactgtaattggtgacaatgtcacataatgaatgctattgaaaaggttaacagatacagctcggagttgtgagcactctactgcaagacttaaatagttcagtataaattgtcgtttttttcttgtgctgactaactataagcatgatcttgttaatgcatttttgatgggaagaaaaggtacatgtttacaaagaggttttatgaaaagaataaaaattgacttcttgcttgtacatataggagcaatactattatattatgtagtccgttaacactacttaaaagtttagggttttctcttggttgtagagtggcccagaattgyattctgaatgaataaaggttaaaaaaaaatccccagtgcatgtatttcagttctctaagatttttggtctggcattgtggtcttatgatgaaaacatgtatcctcttaatggcggcttctcatatattcatcctgtacattttaaaatttgttaagcaactactgtgtgctaagcactgcatagcctctatgtatgttattgtggcaggcaaaaggttctgattttgggcacaacctttatataaataacacaaaaattaatgtttggacacaaactctaaatcagtaacacactggttaatatgtaattatgcattgtgataagtaaaatgacaagaaagagtagggaaagagaaagaatgacagagcaacttaaattagactggatgagaagagtcagggatgcatcttaatgcacagacctagaatattgagtgggtgtgagcagtgcagagtgcaggggtgtgtgtgtgtgtgtgtgcatggtggtggtggtatggttgatcaatgctgcaagtgtaagttttggttaaaatcgtgctgttataatagtaggcccccacatatatcctgggttaaacacaatggaagtgtattttttgctcaggtacctatactggaaaaagacagaaagatggggtgacttttcttcacacagtctgggaccacgttctgggatccattctgacagaagatctgccatcttctgcacacgtccaacactgccgcattggtggtcgtctccattgcagccaataggaaaggggaaagagcaagggggagaatgtagagggtgttcttatgggcaggcctgggagtggtgtacattacttctgttcacatcacactgcctggaattgtacattctttggccacagtaactgcaagggagtctgggaaaggtagtctagaagtgtacccaggtaggtgaggagaagtggactttgggacagaatagcagatgcaaaggcattggggtaggaaacacatggcttgatggagattgaagaaggacagatgtacaattgcctaagagaagcccacagtgagaagaaaaatgagattgaaactgagctctgaagagcttcaaaattttgcttcttgaggtttagataagataggatagactggagtatgctgccgtaagaagcaactccaaatcttagcgttctaacttaatagtaattgatttttcatgcaaagtctgtaggtctacgtaactctccaggaactttgcgctgcatgctgtgacacaattatgtagaatgtttccacgtgcggttctgccatctcagcacaaggtttcctcagtctcctgtgttggtcgcagaagaagataactggggccactactgcccacagcccacaggtcagagctagttacatggccttgcctaaccacaatgtttggtaagcattgtcactgccgtagtcctctctctggtgccaacacaactttgctctcctgtttccaaaagtaggactcactttgcaagggagacgatttacagccacatcaaatcatggctttgagcttcaatttcaggatctctgagtgatctcacaatagtctctatgtcaggtctgtacatggccagtcctgtttcagggacaagtaaactaagaagacaggtaaaatgcatccctcacccgcagtgtgcagtggtagaacaggatcaagacaatgtgaggaaacacttccacagtggtgaggaatgagaggggcccagcattcaggcctgcagcaactcagaaatcttgccgagcaaatactttatgggcctcctattttgggggtggaaaatgtttctggtttcagaattcattctacactttggcaagagctttctttcttttctttttttttttgagacggagtctcactgtgtcgcccaggctggagtgcagtggcgtgatctcagctcattgcaagctctgcctcctgggttcatgccattctcctgcctcagcctcccgagtagctgggattacaggtccccaccaccacgcccggctaatttttttgtatttttagtagagatgggttttcaccgtgttagccaggatggtctcgatctcctgaccttgtgagctgcccgcctcggcctcccaaagtgctgggattacaggcgtgagccaccgcgcccagccaatagctttcttttcttattgttctccatggccttaactttgctctcttaaacttctctctgttcactcgggacctaggttggtggaggtcctgacttgcatagctgtaccatctggaatgtgggacctccccacttactgcagagggaggggaggagagactggaactaaggagtggaccttcattggcttagcctggaggtgacacatgtcacttctgctcacattttgttgtccaggactagtcaggcggctttgcctaactgaacagaatgcaggaaatgtaggggaggacacaggttatatgtctccactacagggccatatagaccaaatggactacctattcgattgttggaaggaagttgttaggtccacgtagtcttgtccttgcacccatttttcttgatagagggcttcaaagctccctgtcctggtcatgctgttaacatgctccaattttatctgatggcataggggacatagaattgagcactgttggccgggtgcggtggctcacgcctgtaatcccagcactttgggaggctgaggcgggcggatcacaagatcaggagattgagaccatcctgactaatacagtgaaacccgtctctactaaaaatacaaaaaattagccgggcatggtggcgggcgcttgtagtcccagctactcgggaggctgaggcaggagaatggcgtgaacccaggaggtggaggttgcagtgagcagggaccgtgccactgcactccaacctgggtgacagagcaagactccgtctcaaaaaaaaaaaaaaaaaaaaaaaaaaaagaattgagcactgttgggagggaaagtcctttccctggtctcatgtttttgtgttgaaggacctccattgaaatacaactcttggcctgtagtctcactcctcacacactccttccagcagagaaattaattacctaattgctaggtggtgatggggtgctaacggggtagaacaactctatcaaaggactgtaaacttcccattttcctccctagagacagctccaaactttcctttgggtgcagagggaggctttggatgtgtatttggatacaggagagagttggcagtcacagagtattaataggctctttggttcacagatctaatgtcattttctccaattggtttatcaataataaagctgacagtttaaactcttgtctgtctattgatctgtgttttatttttcaactgcttctgaactcaggagtagaagaaataggcaacttatactgaatgcctaaaatttttaagaggcataaatatgtagtattttagatttgtggctttttttttgtaaaagtaaagtggggccaggcgcggtggctcatgcctgtaatcccagcactttgggaggccaaggaggatggattgcctgagcttaggagtttgagatcaccctgggcaacatggtgaaactcggtctctactaaaaaaatacaaaaattagccgggtgtggtggcaggcgcctgcagtcccagctacttgagaggctgaggcaggagaattgcttgaacttgggaggtggaggttgccgtgagccaagattgcgcccctgcactccagcctgggtgacagttgagactctgtctcaaaaaaaaaaaaaaaaaaagtgaagtaggcagcacctttctcttttgactactctccttcttcctcttcttctttcccttcttcctctcctcctcctcctcttcatttttgtcttcgtcgtcttctttttcttctttcttgggattccctctgttgtccaggctaaatttcagtggccccatcatggctcactgtagccctaacctcccaggcacaggcaatcctttcacctcagcctcctgtagctaggactacaggcacacaccactgcacccagctaatttttgtatattttgtaaagacagggttttgccatgttgcacaggctggtctcaaattccttggctcaaacaatccatctgccttggcctgccaaagtgctgggattacaggcatgagccaccacactcggcctatacttctcttaattcagtctaagatgatactgacatttatttgaagttaagtcacattgttgtttcatataaacttaaaataaatgaaaaatctgaactaagattttttgatctggtttggaagtgaaggttagagcagtcaaggatatgggagatacatgagctgaaggttaaacagatctggattatgaacaagagggtcaaattgctttaggtaagaaaaataagaagagaaggggactgagtagttgattttaatgaaataatgaacatattttgaacttcgctttctttctctgtcattgacaatgaaaatcagacacattactatggaaaaatagctaatcttaactcattttgatttccaatttttcacataaacaaaggtaaacattacttgcagaaagggaaatatgaactttgatattcatattttatttatacagacaacttctgaaatctttccatgatttggtgttgtgggaggccgaaaaccatcatttgttccaacatattgctcaacttgtcttttcaaaattcccatgacgattgtcttctgtggttaggactggatggcatttggagtttctgcctcaaaaatgtcaagatagaatatacctaagcttttatgtctcaccttgtaaatacgctcatcctggttttgctgttcttaagtaaacatctttctaggcacttacaaatggtctgattctttactctttcatttttttctcctagactatcagcctgtgaatcaactcaatcatgacttgaatttctagggtagtacataattttagttttaatttaaatcattgcaaaattccctgaggatcagtgtttttaaaaacaattcaaagatttggcttagctgggttaagggtcatcagtgtgacccaagctgatattgactatggtctgtaatgatgactcagaaaagaaaaatccccctcgtgaagcttactgaaaatttccatgatgtcaggggccacaaggctgtaagcttttggagggtgtcatagtttcttagacctcttacacattatcctgtcttagctcttttagtattctacctccttccttttcctttctccattctttccttttgaagattcattcagcaattactaagtgctcaccctgtcttctctaccagggattccagcagcactttgctatggtctatggtcaccaccaccatcactggaatcatcatcaccatcactaccatcctcaccatgactgagtgtgtgtcgtatgctgcactcagcgctagacacttgaaatgcagtgttttgaaacccaactacaatattttaaggtgagaagtgatgcagctgtcctatttaacagatgaagaaagagattcagaatttaagttaaatttcccacttcatacggctgaaatgtggcagagcaagattacagcctacgtctgccttacttctagtccatcctgtttccaccttacctcacttctttagcatggcctggaaagaattgtgtacttcttcattaaatgtatctttgttttatattcttttgactattcacatatgctgattgctatactttgggcttcaggggagtatttattacctgttttgaaagaaggccctttaaagatgattttaaacatttttcaagtaaatgcaatagctcttgtttattgcttcttgccatgtggaattactgtaaatccaattagtttgatcaagttccctgtagacatggtgttgtttggcacagatgttatgtttgatcctgacattatgcagtagagagacatgtttcaggatttgccagggtggtcagcagaacagggcagctgaggacagggactcctggcatcacaactgcctcctagtctcccactcccctaagagggaaaggatttcctggaaagcccacgcagctgcagggtttggttgctgacgttctgtctgttttgaagttatagtcagggcaggcagcagcaggggtggagttggagtgtacaaaatggaatatcaagagccctgaagtcagcaaaaaaattaatgtagacaacact

SEQ ID NO: 96180 - DNA, 26667 bp, Homo sapiens
cccagctactcaggaggctgaggtcagaggatcccttgaactcaggagttgcagtgagctatgattacaccactgtaccccagcctggggaacagagtgagaccttgtctaagaaagaaaaagagaaagatggacgaaaggaaggaaagaaggaagaaagatgaaggaaggaaggaaagagagagggaggaaaagagagaggaagggaagaaaggagggagggaagaaagggaaggagggaaggaagcaaggaaaggaaggataacccagaagccaagacaccatggtgtgcatccattgcccccatcactgagtagctgaccaagggaaaaatggggtttatttctcttccttcaccatttgggcctcctgccccacctcagcccgctggtcatcaagtacctccacagaaccaactttatccctcttttctttttttcttttttctttcttctttctttatttttttctttttctttattttatttatttattttttttgagacggggtctcactctgtcgcccaggctggagtgcagtggtgcaatctcagctcactgcagcctctgcctcctgggttcaagaaattctcccacctcagcctcctgagtagctgggattacaggggtgtgccaccatgcccagcaatttttttttttttttttttgtatttttagtagagacggggtttcaccatgttggccaggctggtctcaaactcctgacctcaggtgatccatccaactcggcctcccaaagtgctgggattacaggcgtgagtcactgtacctggcctatccctccttttcttctagtcttttcctctctctacattcttcacaaaggaccagctgattgaagcaggtggtgcagagggtatttctaaaggtggttatttaagcttgaaagatgttctccagcctgtagaaatggtctctaaatctcccgcatggatcaactgacctcactgctctgtgacttctggaatctaaataaaaaaagagaagcccttatcatcagatgtgtagacaaaaccccatccctcctccctttggggtggaaaaccctggtggttctagcaatgtctgtccttacaatgcatgtggcttatggatgacactaaattagcgggcccttcctgaattttgccttggtaatgaaaatcatcttcctggaatagaggagagggaaaggagggggtttggaactctgggcaccatcttaacagggtagatattaaaaaacacccacagtggcgttcagtctgtggctaggactaggaacagcgtccagcctctgacttctgtccatcacagcagaactggcactttgcaggtccccttccccttagcatagaggtgagattgaggagctcattgttcattgatctccttgctcctatgagctaggcagggatgtgggggtgggggcgtctgattcctctcagctcagctgcttccgactaagtctggaaaaccaatacaaagtcatttttaattcaccttcctctttgagtcaatgcctacttattcattaaactcagatctttgcttctattttcaaggaaaggagaaatatcttcagaggaagactgccgccatactgaggctgagcacagatttgtctttttcattgcatctgtcaagcttaaataaccacctttagaaataccctctgcaccacctgcttcaatcagctggtcctttgtgaagaacgtagagagaatgcggcataaccaccaataaaggagtcttgatttaaccctgggatctgccttttctgcttcctaagatgagaccgatggtgaatgtgtggggaaggaaagattggtagccaggctgtcgagtctcatagtgtggagaggtcagactctcaggccagggacctctaggagtcattacagcctgctctgtcttctgagggaaatcacagatttgggtggggtgtttgtagatacatattaaattattaatgaataaattaggaagtaaacagagggtagaaaattcaccacaagactgcctcaaccattccctccctgtgcccatggcagatatcaagaactgattacagaatctgattccctctcagtccagatggaaattcacattgttgttcttgttctttcttcttcttcctttcactcttcttctccctctcctcctcctccatcttctcctccttctcctccatgtctcctcttactcctctcctactccctcttgtcctccttcttctactcctccctcttctcctcctccctctccacctccttctcctcctccctctccttctcctcctccttctcctcctccctctccttctccttttccctcttcacctcctccttctcctcctccctctccttctccctctcctcctcctccccccgcctccgtgtcttccttgtgctggaattctcttaccccttgtcttcctgcagtctcctcctcccttcactcattgtccgtggaattgcccctgtgatggagatagacgtgggcttcctagatcccccttcaagaaaggacttgctgcccagctccagtgagtgctgtctgcaggcagcctttggtgttcagcccaaatcagagatggtctcagcttcaaaatggcctccctcgcccaaaccatgcccttcccagggtaggccacaactaacgaatgaccaatgctgggtttaaaggcctggctattccagtccaagtgagataactcaaaaagagctacatccagagctcccgtctgttccgctgaggttgtagagcctgcaccgtggctcaacctctccctctgtccaatcccagttccttcccttcccttccataactgatcccaaggaaactccctgataagcctcctgcctgctgtctctgctcttggacagaggaggagccctggggaacccaacctgagacagctcatctttaagagatgcccattctggcagggcatggtgactcatgcctgtaaccccagcactttgggaggccaaggcaggaggatcactggaggccaggagtttgagaccagcttgggcaacatagcaacactctatctccacaaaaaaatacaaaaatcagctgggtttggtggctcacacctgtagttccagctacttgggagactaaggcaggaggattgctttagtccaggagtttgaggctgcagtgagctgtgattgcaccactgcactccagcctgggtgacagagcaagactctgtctgaagaaaaaaatagagagatgtcccttctgaccactctgattaagccccttccccaaattatctttgtatccaaccatcccaatttatcctcaaagtatttgtcccaatctgagctgcttctgatggatttaattttttactcccctggcactggaatgtagcctgcaagaaaccaaaagaccttattgctgggcacattccaggacctagaataatcccaggcatataacatgaaattgtgatgtccaatatagtagccactagccataaggagctagttacatttaacttaagtaattaataacattccttaccgatatggtttggctatgtccccaaccaaatctcatcttgaatgatagctcccacaattctcattccatctacacattcacccatcttccccttcatttcttcagtcacccattcaaaaaagattttctaagtacctggtctatgcctggcattgttccaggtaatggaaatagagcaaggacaaggtatttggcctcaacaagcttatattttgaaacatgcaattcaatagaatcttctgcgaggatggaaatatggtttggccatgtccccacccaaatctcatcttgaattgtagctcccataattcccatgttacctattgatgtggtttggctgtgtccccacccaaatctcatcttgaatcatagctcccgtaattcccacatgttgtgggagaaacctggtggaagataatggaattatgggggaagtttccttcatactgttctcatggtagtgaataagtctcacaagagctgatggttttatagggggaaacccctttctcttggctcttattctatcttgcctgctgctgtgtaagacgtgcctttcaccttccgccatgattgtgaggcctccccagccacgtggaactgtgaggccattatacctttttttctttttctttttctttttttttttttttgagatggagttttgctctttcactcaggctggagtgaagtggcatgatctcggctcactgcaacctccaccccctcaagttcaagtgattctcctgcctcagcctcctgagtagctgggattacaggcatgcaccaccacacccggctaatttttttatttttagtagagatagggtttcaccatgttgatcaggttggtcttgacctcctgacctgagatgatccacccacctcggcctctgaaagtgctaggattacaagcatgagccaccatgcctggcctctttttctttataaattatccagtctcgggtatgtctttatcagcatcatgaaaacagactaatgcacttatgtattcattaataaaactgttctcacttgataaaaataaaataaaatttagtttctcagccttgctcacacatttaatactcagtagtcacatgtggctaccataataaacagcgcgggtctggaatatttctatcctcgcagaagattctattgaattgcatggttctaaaatatgagactgttgaggccaaataccttgtccttgctctatttccattacctgaaacaatgtcaggcatagaccaggtacttagaaaatcttttttgaatgggtgactgaagaaatgaaggggcggatgggtgcatgtgtggatggaatgggatggagctgaggaaagagcttgagattaggaaataacattattctgcttccactttttcttttttagagacagggactcactctgtcacccaggctgagtgcagggtgccatcttggttcactgtaaccttgacttctgagttcaagctttcctcctgcctcagtctcttgagtagctgggatcacaggcacacactgccatgcctggctattttttttttcttttctttctttctttttttttttttttttttttgtagagatagggtctcatgttgccaggctggttgtgaactcccagcctcaagtgaccctccctcctcggcttccccaagggctccactttttcttaatttttttattttataaaacaaagctattggctgggtgtggtggctcacacctgtaatctcagcactttgggggagctgaaaagggtggatagcttgagcccaggagtttgcaaccagcctgggcaacatggcaaaaccctgtctttacaaaaaaaaaaatacaaaaattaaccaggcatggtggcatgcacctatggtcccagctgaggagggtgaggctgaggtgggtggatggcttgagcccgggaggtagacgttgcagtgaggtgagatcactccagcctggacaacagagtgagaccctgtctcaaaaataaatacataaataggctgggtgcagtggctcacgtctgtaatcttagcactttgggaggctgaggcaggcagatcacatgaggtcagttcaagacagcctggccaacatggtgaaaccccatctctacttaaaaaaaaaaaaaaattagctaggcatagtggcacacgagtgcacgcctgtaatcccagctactctggaggctgaggcgtaagaatcgcttgaacccagaaggcggaggttgcagtgagccgaattcgcgccactgcactccagtctgggtgacagagtgagactctgtctcaaaaataaataaataaatgcatgcatacatacataatacataaatacaaaaataaaataaaataaaataaaacaaagctattgaaccagatgactcattttaaacatctaattcatggacttcaaagcaagaaaaagttggaggaaggcatgaagttaattctttattttgacttttattttaacctttgcattgctggagtgtcttgctttgggcggaggtcaggaggaatctctcttttctgtttcatggcacagatcgatgtcaggacgtgagggacggaacagacgacccatctaacagagacacagcctctgggtggtccaggacagaccagcgcggaggtaggaggcttctaggaaagactttgcaacaacctggctgaactggggatttgggggatcctgtcatctctctctttgcatgatgacattttttcaggggattaattccccaaggatcagctagctctaaaccttgataatccagatttgtggtttaattcagtcccctgagtatcttacacaaaggaagggatgtgggaggggagacagagacagacagsgagagagagagagagagagagagagagagagagagagaaaccagacagtgcttccaggaaatcaggaaaaggaaggagttgactttgaatgccacttgcacgagccatttccaagcccagcctcaacaacaactctgtttccagctctgtgactgatttgcatcctttttatttcattttgtatttctatagatttagggagtacaagtgcggttttgttacatggatatattgcgtagtggtgaagtctgggctgttcatgtaaccatcacctgaataaagtataatttgtccccttaccgggagagagaaacgggatttgcaacagttgatgcaggcaggggaagagtagagactacgttctgaaccttttgatacccaacaggagaagagactattttcacccaaggggaagctggggaagagactctggcaggtcacagggacttaggactacgtgaagtgaaaagatgtcaagaatcattggaatttttgggggtggcaactggaccctcccacgcttcctatttccatccacagactcttccttcttaayctagttctgcagacgcccccatcctggcaaagataccgctctgggtctcaccccatgcacagcgccgcatgccaatgccctccctcccgcctgccctccctctctgctttaaggsgatctggggctttkgggctttggttctccacaagcgcttgctccatgttgaccaggtggagagggtctggagcttccaggacctcctcagcgagacatcatcttcacaaactctgcaaagaaaaaaaaraatccccagtaaggcatctcgttgtaaaagcccccaacattattttttgagcccttcctatgtggcaggcactgctggtgatccctgggaaattacttaatccctctatgcttccatttctccatctatgaaatgggaatcagatctctgtggcaagttacttaaccctgtgcctcagtttctcatctgtcaagttggcatgtttaatagakctacctcatgaggttgagataaaattggcttacaggctgggctcggtggctcacgcctgtaatcccagaactttgggaggccgaggtgggcagatcgcttgagcccaggagttcgagaccagcctgggcaacatagcgacacccccaactctacaaaaaaattaaaaaattaaataggtaaataaaatttgctcagaaccgtgcctgccatcacagtcaccccatgtaaactactgtggttattattatgctcctacttctgaaagactaatttcagtatgttgcagtttcttcatttctgttatgaaaataatcttgcatgtaaataaaacattaaatttaaaaaatgggaatcctagtattgctatttccttatatggtttttaagaccattaatggcataatgctcacaaaacagattaagtatcccataaacagctattgttggccgggcgcggtggctcataactgtaatcccagcactttgggacgtcagggagggtggatcacttgaggtcaagagtttgagactggcctggctaacatggtgaaaccccgtctctactaaaaatacaaaaattagctaggcgtggtggcgggcgcctgtaatcccagctactccacaggctgaggcaggagaattgcttgaacccaggaggtggaggttgcagtgagccaaggttgcaccactgtagtgcagcctgggtgacggagtgagactccatctaaaaaacaaaacccaaaaaacctgtgattgtcactatsagatttcatcatctcaaccatcctggagggataagtgtcactttacagataaggaaacttacgccagcgagggtcaccaacatrcctgaggccacgtggatagtgaatggtgaaccctggaaggaaygcaggttgcacctgactttgctgtggctcaagacgatcttgctgcccacccrggtcttgaggtcatcctgaccttcccttgcctttggttggcctgaggatcatctcccacccccaccccaccttctccagatgtcacttgatgtccactgcacacctaatcctggctagatctagcaggtgtccaaccagcctctactrtgtttccatactgggacatacagcatatatggtttagagaatggcccttcctcctctctatctaggatggaggycttggaagctaatacaactcaacacagcaaggtctgctgtgataacttccatggagaggaacagaaaaacttctgtaagacttcacagctgggaggaagacatgagggaaggatggagagaagcttcctgacaaaggttgccttgatgtgagttcctgagggatggatgagactgaaagatgtggtaagtggacggagcatctgatgcctaggaacggaggttggagaacataaagcaggcaccaagtttgtgccagaacttaaaagttcagagaatagctacagaagatacaggctgggtgggtgggcgaggccagatgatggatagacttgcatatcagacaaataattttggactttttttttttttttctggagacggagtctcgctctgtcacccaggctggagtgcagtggggcgatctcactgcaacctccgcctcccaagttcaagcaattctcctgcctcagcctcccaagtagctgggactacaggcacatgccaccacccctggctaactttttgtatttcagtagagatgggtttcacggtgttgcccagtctggtcttgaactcctgagctcaggcaatctgcctgccttagcttcacaaagtgctaggattacaggtgtgagccacgcgcctggcctttttttctttttttctttttttgagatggagtctcactgttgcccgggctggagtgcagtggtgtgacctcggctcactgcagcctccacctcctgggttcaagcaattctcctgcctcagcccccgtatagcctgggactacaggcgtgcactgtcactcctagctaatttgtatatttttagtagagatggggtttcaccacgttggcccccctggtctcgaactcctgacctcaggtgatccgccaaccttggcttcccaaagtgctgaaattacaggcatgagccactgagcccggccagaattttggatttttgtccataagcagcagataggtgctgagatctttgaaccaaagaatgtcacaattagaacttgacatgcttttttttttttttttttggacggagtgttgctctggagtgcaatggcgcgatctcagctcactgcaacctccgcccccagcgttctagcaattctcctgtctcagcctcccaagtagctgggattacaggcacctgccaccacttccggctaatttttttgtattcgtagtagagacaggatttcgccatgttggccaggctggtctcaaactactaacctcaggtgatccactcgcctcggcctcccaaagtgctgggattacaggcgtgagccaccatgtccggccgacatgccttcctatgcctcacataaaaaagaaccccacgtctcatccatgtagaaccccaatccttttcacttattcagtgatccaatatactcatgctgggctcagtgctaggatttggggatatagtgatgatgaaggaattggtccatggtctcagaaggaaataggcaataaactctagagatgccacgaatccgtattactgcagaagcaagcgggaggtattactggggagmcagmagagggacacggagcccagtaagagaggtgggaggtaccttccaggaacataactaggarttagccaggggagaggggaaagggtattccagacggaaggacaactygagcaaagacagggaaggawaatttaaaaatacagtggtgctttgtgcatgatttcttttagttttctccaaaaggtgtcatcatccacctcattttacagatgggaaaactgacccttaaagagaaaaagggagtagcataagccacatgctgagtcagcgatgatcctgaatttgaagcycctgaacctgaccccagagctccagctgctagccagtccagtctctttctgatgggacaagttcttcctaggataaaaggtgccctgcaaactaacaaggaatgggcaaggcrgaagggcgtcctgagcatgggaaggaaagggccttggctgaggtgttcctcggagccaccagaagtgrgsgacacccagctctttgaaatgaatagcctgggaagaaagggacagaacaratgcttccaaaacctgccacccgcttccattctcaaacttggagaggagtgagaaggagtggccaacttggaaaatctgacagtgagttggaagtggattcctgcggtggctgcccccgctccccaccacgccccgtcaatgtcaccttcaaagtcaactgtgccgtctccattaacatcagcctccyggacaacctcagagatctcccggggggtgagccgctyccccaggagtctctgcatggcctgctgtagctccrccagggtgatctccccatctccattcgtgtcaaactgaatagaagcagaaatagattatatcagcaatgacaatgatgatagccacgagatgatggagtttacctatcgcttactgtgggtcaagcactgagataaaagctttgggaatgtgagccactagaacgtcagctccaaaagacagttttgttctgtttttttttttctttttttctttctttttttttttttttttatttgagacagtctcaccctgtcacccaggctgaagtgcagtggtgcaatctcagctcactgcagccttcacctcctggrttcaagcgattctcgtccctcagcctcccgagtagctgggattacaggcgcgcaccaccaaacctgtttaatatttgtatttttagtagagacagggtttcaccatgttgrccaggctgatcttgaactcctgacctcagttgatccacctgcctcagcctcctaaagtgctgrgattacaggcttgagccactgtgcccggccgaaacttttttttaatgagacggggtctcactattttggccaggttggtcttaaaatcttggccttaagcaacccttccaccttgtccttccaaagtgctaggcttacagtcctgagccaaagtgcccagcgatacatttaaaacttactttttargtgatttttgaaacatayattattatttactatagttatcctgctgtgcaatagatctcaaaagttattcctcctgtctaaccaaaactttgtaccctttgacaagcaactgtccattccttctctgtggctccccagcctctgctaaccacctttctttttatttgcatgagttcaattttttaagattctgcatgtaacatcatgtggtatttgtccttttgtgcctggcttatatagcttagaataatgtgcttcatgtttattcatgttgttgtaaatgatagagtttccttctttttaaaagctgaatatgccggactcagtggctcatgcctgtaatcccagcactttgggaggccaaggcgggtggatcacctgaggtcaggagttcgagaccagcctgaccaacatggagaaactccgtctttactaaaaatacaaaattagccaggcgtggtggcgcatgcctgtagtcccggctactcgagaggctgaggcaggagaatcgcttgaacctgggaggtggaggttgtggtgagccaagattgtgccattctactccagcctgggcaacaagagcaaaactgtctcaaaaaaagagaaagaaaattttaaatgacccatgctgcttacattgtatttattttggatgacacagctgtaggctgaggaagctgcaagttaacaagtgccgtaaggcaggaaggtgtacttgaggaagaggcagaagtggggagtgtttagggaggcgtgagctggggagaaatgagcatgaaatagacaaggtctcagtgttgcagaaggcagggcccaagtacgtaggggcttgtgtgtcatgggacgttgtcaggatttggttctgagtaagacaagaagccactggagaattttaagcaggggagtgaccagatctgatatacattttaaaagaatgtgagcatgaaaccctgttgtgtagagaacagaccacagtaggaccacgatgggagccaggaaaccaattagagggccgccatgatcatcctggtaggagatggttgtggtttgagccagttagcaccagcagagctcaagaaggagagttcactccccgatgttttggaaattgaacgtactagactttctggtagactagttaagggtgtgcagggcagagctttggaggcagttcattaattcaacacatatgtatccatattgctaaaaaaaaatgtgtcagtagtgcccatgtggaaggcaccgttcttgggactgagcacggagcagcaagcaagacacttagaaatacttgtcttctgtacctggcttatttcacccagcatactgtcctccaggttcatttgtgttgttgtgtggggcaggatttccttcttttgtaaggctgaatattgcatttaaatatataccacgcagaaggagaaatactgcatgattccacttacatatgaagtacttaaaataaccacactcatagaagcagagagtagaaggatagttgctgggggttaggaggacagggaaatggggagatattgtaccatgggtataaagtttcagttacgcaagataggttctagagatctgctgtgtggcattgtgcctataattaataatactgcataatgacaaatattgcttttaatggcaaaatcacaattacttttgcatcaatctaataactatgggcaaaagacgtgaacagccatctctctaaagargacaaatgggcaaaagacgtgaacagccatctctctaaagaagacaaatgggcaaaagacgtgaacagctatctctctaaagaagacagacaaatggcaaacaagttcgtgaaaaaaatgctcagcatcactaatcatttgggaaatttaaattaaaaccacaatgaaatatcacctcacatctgttaggatggctactgttaaaaagatgaataataacaagtgttggtgaggatgtggataaaagggaaccctggtacacttttgctgggtatggaaattagcacagctattatggaaaatggtatggaggttccttagaaaattaaacctagagctgccatatgacccagcaataccacttctgggtatgtatctaaagtaattgaaatcagtatatcaaagggatgtttgcactcccctgctcatggcagcactattcacaatagccaaggtatggaagcaacctgtgtccatcaaaacagaagagtggataaagaaaacatggcataagtacacaatggaatactattcagctttttttttttttttttttttttttttgaggtggagtttcgctctttttacccaggctggagtgcagtggtgcgatcttggctcactgcaacctctgcctcccgggttcaagcgattcttctgcctcagcctcctgagtacttgggattacacgcatgtaccaccacgcctagctaattttgtatttttagtagagacggggtttctccatgttggtcaggctggtctcaaactcccgacctcaggtgatccacccacctcagcctcccaaagtgctgggattacaggcatgagccactgcacctggccttaaaattttctagtagtgacgtttaaaaaaatgttaaaaggaacaaatgaaactaatttttaatattctcttttatttgacacaatatatctaaagtgttatcctttcatcatgtaatccacttaaaaattattaatttagctatgtaagtagcattctttttatacacactggatttcataaggcagtaagttctaagttcttagtaggtgcttagcatgcttaattaggatacttagcctagaagtttacttaagtatacaagtacgttatgctaattatattagcatactaagtcttaatacagtgttcacgttacacttacagcacttctcaatccagacaactttttctttttgttttgagatggagtttcactcttataacccaggctggaatgcaatggtgcgatctcagctcactgcaacctctgcctcccaggttcaagcaattccctgcctcagcctcccaagtagctgggattacaggcgcccaccaccatgtctggctaaatttttttgcatttttagtagagacggggtttcagcatcttggccaggctggtcttaaagtcctgaccttgtgatccacctgcatcggcctcccaaagtgctgggattatgggtgtgagccactgagcccggccagctgtagatctttataagaagctgggggaggcacttgcacagccaataggtggaggcctcctaggatttgaacccatgtttgcctggttccaaatcctttgctcccaaacactctactactctttattttcaccttgtgttgctgaaagctctcagaacgagaaggtattttatcaggggatataagcaagtctgttattctcactgggtctgatattttttagtatgtctgcagcaagtggttcgtaccakatgaccactttgcattcccttctgggatctcaaattcttggattcttcctgttacaggcactaagaatagaggccctggccaggcacggtggctcatgcctgtaatcccagcactttgggagaccgaggcaggtggatcacttgaggtcaggagttcgagaccagcctggtcaacatggtgaaaccccgtctctacgaaaaatacaaaaattagctgggtgtggtatcgcgcacctgtaatcccagttacttaggaggctgagacaggagactggcttgaacccgggaggcagaggttgtagtgagccgagattgcaccattgcactccagcctggggacaacagtgaaaccccgtctcaaaaaaawaaagtcctaacatttattctagagatggcaggatcttggataaratttataatcttcatgagcctcacttttctcatctgtttaattgggatacatgactgcttgcttactcctaatgtgtttgtgtgygtgtttttgtttttgtttgtttgtttttttgaggattaaatcagataaagtatacagaggcattgatccattgcaggtgtttggaataygttatttttcttccctatttatygatcccaccatggctggaaaaaaaaaggtgggggcctggttggtgggtgctgtccatggcattggctaattacaggcagacmtcagagggtctgcctctaccatcaccagcaccatgacactgttaactcacctccttgaaggcatccygcatctcctggacaccgatcatcccagctgtttctgcaagcaatttgggggtcatcagctccacaaagtcatcaaagtctacacggccacccactgaggargatggcacaggattagcgagaccccacaagccctggccttccattacctcactttgtgcttcgagtcagttagatcagctcccttctccctgccctataagagccgtctttgacttcctccctccagcagctaactccaagctccaaactcatgtccctctagcctgaacaggagtggatagggtgtggtatggtggaagtaactgcctgtgtgactttcagacagttggttaagatgtttctcctcctctgtagacctgtacaaagaggagcatgaattaaatgagcatacaawtttttttcagatatgaatactatcattaccttgaattcaaccttgtttagttcgttacatgcccagaagcaaacccaatagcttttttttttttttttttttttttttttgagacagagtcccactctgttgccaaggctggagtgcaatggtgcgatctcggctcactgcaacctctgcctcccgggttcaagcgattctcgtaccttagcctcccgagtagctgggattacaggtgcacgccatcacgcctggctaattttttgtatttttagtagagacggggtgtcaccatgttgcccatgctgttcacaaacccctaacctcaggtgatctgcccacctcagcctcccagagtgctggaattacaggttacaggtgtgagacactgcgcccagcctcaataggaattttattctagctaaaatctaaaaatcagttatgatctccatccaaaaatccatccatcctttttgcagctgtattcaccaacattagctccagctccaagtttgtttccaacatccaatacagctccaatctcgtgctccactgatgaatcttagtggtgatagtaataactacctttaataagaatttactggaggctaagactttaactgcatcagcatctttatctcttccttctcttcctttccacagtcccatgaggtaaggagagaggcatcttcctctatagatgaggaaatggaaactcaagagtagcggataacttcacttttcaaaatgactgtaattagtaaataatagaactgagatttgaacccagacctatctctaaaagcttttaaccacttcaaatgctgccttcctgagtcgaatctgacctgttttcttccagacttctagtccctctcatcctcctctccaccccsaactctactcttaacctctacatccttcccaattctgccctgatcccttccctaaccccggccatccctcccattccctggactcacrgttcatgcggatttgctggccgagctcaatcagttccatctccstgggcatgtaacccatmgtcctcatgagattccccagatccttacaagagatgaacccatctcggtccttatcgaactcaagaaatgcttcccgcagctctgaaagttaagagagaactttgggggaacttgaagcagtcagtggggaagagtggcatctcttgaagctatcaatgaggctccaactagagactccttaaaggagcgtacattagaaacaaaacaaaacaaaacaaaaaaaccaaggccggatgtggtggctcatggctgtaatcccagcactttgggaggtcgaggtgggtggatcacctgaggtgaggagtttgaggccagactgaccaacatggcagaaccccatctctactaaatacaaaaaattagcygggcatggtggctcatgcctttgatcccagctactagggaggctgcctcagccaaggcagaagaatcgcttgaacctgggaggcggaggtagcagtgagaggagatcgtgccattgcactccagcctggcaacaagagcaaaactctgtctcaaaaaagaaaaaaaaattcaaaaaggagtgatgtatgaaatgtgttagcaaaagaggcatcattcctgagaccactaaatgagagcactggcgtccttcagattcctggatgaagttatggggaacctcaaagtcaccaagagagaaactcatttgttttcactcctgagtcttggagatacttgaggatggatatgccttcgaaatactttgggaagtccttcaactgccacgagaaagagttctacaaaattacagttgagtgggaagagagagggattgtaaaaattccatgtaatggaatttatacrgaaatgcacaaagggactgagggcaggtcaggtgggtggatggcaacgtggaagcaactggggaagacggtgttaccttcaatytcatcttgtcccagtggtctttcctggaaaggaatgcagatgagagggaatttggagagagggtcacccattctccaaagggtctccttgttctcccaagctcctccccacgctctcgtggttctctttccattctctctctcctcctccatccctcccattccttttcccatctcctgactcctgttccacagttcttggctccccacccccctctcgatgtctctctcccacccacgaatcccaatctccctttttctccctttctgagacaaacacccatcacattgtgtcaaagggggtcttaaacactggggagtccaatctccagatgaaaaaagtgagacttcacaaccacagctaactcattcagagtggtgactctgtgccaggcagtttccacaatcatttcatttaaacctcagtactgctctgtgatgcagatctacatctcgtttccatcttacccatgagaaagctgaggaacagagaggttaaggaacctgcacaaggtcacacagctcacaagcagcagatcccctcccaagggaggaaggcattcacctgctccctggaggtcatggggcaagtcagacacagtattgggatttgaattcagggctcctgactcccaagtcagaattcttcacactagcccccattcactcctttctcacctgcctccaatcttcctgccaaaggttagaatctctgtgcatggaaacagcattcaatggctttcaggcaggagggtcagtgccagcatgaccagttcctaaacactctgagaatgtccagttattgctgccccacctactcctgcacatacctgaagggttgggcttacatatacatggcatgttaacaaggaaattctactgacctctggtctctttagccttcccatctccctttatccctggagcctttccctcagcttctctttcatctgatcccctccttgcggtcccttatcaccctttttttcattctctctctcttttttttttttgagacacagtctcgctctgtcacccaagctggagtgcagtggcacgaactcggctcactgcaacctctgcctcccgggttcaagcgattctcctgcctcagcctcccgagtagctgggattacaggcgcctgccactgcacccggctaatttttgtatttctaatagagacagggtttcaccatcttggccaggctggtcttgacctcctgacctcgtgatccacctgctttggcctcccaaagggctgggatcacaggcgtgagccactgcctggccttttttattctctttttttggtgatcttaaagcctaacaatgaaaagtatgcccacatatctggacaagttggtatatatggaaaaataaaaaaattttaaaaagcatgcccacaggaatcaagcaaacccgaccctgccacttacttttttttaacgagacaaagtctcactttgttgcccaggctggagtgcagtggcataatcagggctcactgcagcctccacttcctgggctcaagcgatcctcctgcctcagccacctgagtagctgggactgcagatgcatgccaccatgctgagctatttttttgtatttttagtagagatggggtcttgtgtttcccaggctggtctcaaactcctggacttaagtgatcctcccgcctctgcctcccaagatgctgcgattcaggcatgagccactatacttggccgaccctgccacttactaactgtgtaagcttaaggcaaatgacttcatgactcagagcttcactttcctcacctgtaaaatgggaatgaaagtcactgacctcatgagttgttctgaggtgtaaataacatcaggtgtgcaaatccctttgcacagggctgggcacagaacaatgacttaataagtggcagctattgttattaacgtcatcattatcatcaccaccaccaccatcatcaccaccattatcacaatgagcatccatagaaaagaatgatggtaatctcaacaatgacatcatcccactttcccttttcatttttcttccttttctctccttctctttgctcctgacttttgattttacccccacccatttatctcactggcttacatgaccccaccagggtccttggaatttcttataccttctcagctcctgctctatccacctgttcccctggttctgtggcaccatcatgtccccttctttgtcccacacccctgctccctttgccccgcccaccgcccttccccctcactccccacctcacccgstgtttctcagcaatgcctttcctcaagaagatgcaggcggggcccatggggaactgcatggaggggtggggtggagctcgcagggcaccagtctcaagatggcccctcctccctgctccctgtcggagctcagcctccttatcttctccagcactcctttgccacctcttcctgcctctcttggcttctccttcggtcccggtgtcttagagctgtgacagctgggctggaaatctctacccgggttggggagggaccagagctgtccctgcctccccatctggcttgaatgatatgggtggggaaatgcagagtcaggttctgtgacgcctttatccccagagtggaattggaaagtgcattttataaatggggattagaggctggatgtggtgctcatgtctgtagtcccagcgctttgggaggctgaggtgggaggattgcttgagcccaggagtttgagaccagctgagcaacatacggagaggctgtctttacaaaaaataaaaaaattagccgtgcatggtggcgcacacctgtagtcccagctgctccaaaggcagagatgggaggattgcttgagcccaggagttcaaggctgcagtgagctatgattgtaccattgcactccaggctgcagtgaactacgattgcaccattgtactccagcctggctgacatagtgagaccctgtctcgaaaaaaagaaaaaaaaagaaaaaaaagaaaagaaaatggaggattagagcagacggcatcatttattcaatgttccaacaagcatgtgaagggtcactccaacactggcctctgggcagtgagatggagagctcagcacccctggcctcagggagttttcctgggtgagtcgggaatgtgtgagagtgagcaggatgcaagcatggacttcaggaagtgggcgtacacggtgactaagagcatggcatttgctcttcctctgttcatctctttccttctgtctttcctgaatgatttagagggaaaaagcaaggtgggggtgtcagggagggtgtgaagttatggtggtgtcaaagcccaaaggggttttgcgactccacactaggtagggttaggggaggagggggctgggggccatctggcgtggagagccagcattccagtggggtagtggggtgaggagaagtccacatagaggggcagcatgacccagggtgttggggctggagatggtggggataaatccacagatgggcagcttggtgtgcagtgttggaacatgagctgagtggggcgggggcatttatatgcaggcattgtctggggtggaggtttgcactgtaaggcaattaggaaggaggccacatagaggggatctggcatgggttgtcataacccaagcagagagagaaatgtccactcatgggaatagcatggtgtatggtgttgaagccagactaggctgggaaagacatccccacaggggtgaaatggcaaaggaaaagggaaattggctacacacagtgagtaaggggaatgggggccaggtctcctactgttggaaaagggagttactaagacagaaaggaggaaagtcgaatgagccctgtggtgttggactataactggaggcgttggtatgtcctcatggatctcaattatacatagagagataaaaataaacacatagtttcagtgtgtataggaacatttgtacacatattctctagctctctccactaagagaacatagaaacaatgatggcccatacgaatgagcaccactagcatccaaatcttgacttctatataccattctccaccaaatggaaccagagtgcctaggaaatttggctgattccatgtctagagcaaaaaaagaacaagatgagcctacaaacgtcctatgcttaaagcaagaaattgctcaaagtgttgtgagaacatgtggaaagaacacaggagtctgcttgaagaagctccattggccatactgggcagtttgagagtcaaaataaataatgatagtaacaaattatacaggaccacagaagaaaccaggagtccatactcagataaataaaaagctaagtgagaagtttgatatttacagagctcaaaatacctccctacaaaataccaatttcaaaggagttactttatagtggagaaacgtggcaaacaccatcttagtcaatgaaagtggacatcatcagtaatgtgacaagttggaatttcacaccacctgacaggatgtcacgagaacagcatcgcttctgtaagattcctgaatctcatcataatcagacgtcagacgaacccacatggagggatggtttacaaaataactggcctgtaagcttcaaaaatgtcaaggtcatgaaaatcaaggaaagattgaggaaccgttcgagattggaggagactaagaagacatggccgaggctgggcgcgatggctcacacctgtaatcccagcaatttgggaggctgaggtgggcagatcacctgaggtcaggagttcgagaccagcctaaccaacgtggagaaaccccgtctctactaaaaatacaaaaaaattagcccggcatggtggcacatgcctgtaatccctgctactcgggaggctgaggcagcagaatcgcttaaacccaggaggcggaggttgcagtgagcccaagatcgtgccattgcactccagcctgggcaacaagagcaaaactctgtccaaaaaaaaaaaaaaaaaaaaaaaaaagctacgactgaatgcaacacagaattctgaacaggatccttctgctatcaaggtcttctttcggatgactggtggtttgctggcaatagtttggcagcccttggtcagtagagcctcaccccaatccctgcttccatgttcacatggtttcctctctgtatacatgcctgtctctgtctttaaatcccccccccttttttaaaagaattttatttcaaatctgggatacatgtgctgaacatgcaggtttattacataggtatacatgtgccatgctggtttgctgcaccaatcaacccgtcacctaggtattaagccctgcatgcattaggtatttgtcataatgctctccctcccctaaatccccccttttctttccttttttttttttttttttttttttttttgagacagagtcttcactctgtcaccaggctggagtgcagtggcatgatttggctcactgcaagctccacctcctgggttcaagcggttctcctgcctcagcctcccgagtagctgggactataggtgtgtgccaccatgcccagctaatttttgtatttttagtagagatgaggtttcaccatgttggtcaggatggtatcaatctcttgactttgtgatccacctgcctcggcctcccaaagtgctgggattacaggcgtgagccactgcgcccggcgaaatctctccttttcataaggacactagtcattgtggattagggtccacacgagtgacctcatcttcacttgatgacattggtaaagaccttatttccatgcaaggtcacattcacaggcactgggggttacaatggccacatcttttggtgggggtgggacacacaattcatcccataacagtcctgctttaattctggaaagcctgtatgaataataattgctctggaactccgtcggtgccagactaactattctaaggtcttgagactcatgaactcatttaagcctttctaggatacaggctccgtgatggtctattctacagacgatggaactggggcatggaggcgaaggctcttgcccatgttctcatggtaagcagataacagaagtaagatccaaacccagctgtggaaccaccatgcttaattgctgagatatagatggaagaagatggaaaggaaagggggaagggaagaaaggaacaagtaaagggtacacagagggtgaaaagggccgcagcaggggtggtggcagaccaagacacacacacacagctaatccatcagtcaatcagcaagcatttattgagcacttgttgtattctcagagctccacttggctgtggagagatagcccatgatttaagcccaagttcttacttctacagagctaacttgtgcagagctactggctagaagtgcagtcataaaggagcagtggaaggcattggtctgaactatcacattcattctggccatctggacattggacatgatgcttctgattgtcagacactcatgctccagctccaggatctcccgagggacctgcaggacaaatttcaccaccttcagctccttggacgccttcttctgaatgacgctatcaaaatcacagtctagctggtcactggtgattggccctgttaggacagccaaggtgaactcaaggccatgaagcgtgtggctgaagggagtgaagaacaggaaggccaggtggacttcagggccctagtagaccaacaggcccacagtgccctggaagctgaggctcatctatgccaagcagcaacttcgggcactatccttcgggtagtagagcctggggagaaaggaaagttagaagttaccactgtgctttgtaggcagtgttgcacactggataagattagaagacctggaagcctctacaggtcatacatgacttaggagaaagacattcatccattctttcattcattgagaagacctggagctccaccacctcctcctgtggagctcttgtgatctacttttaccacgtaaacgtttatttatccaacactacgcttattaagcatgtatcaggagctgggctaggaggtaactctttggcctacatcgaatgtcatgatacctgccagaattcacaagttctgatctctgtccatctctccaatcacatttcattccgtgcttcccctaccctgatccagcaataacagctttccttctgttcctcgaatagactgatatagtttggaaattcgtcctctccaaatctcatgttgaaatgtgatccccagtgttggaggtggggcccagagggagatgtttggatcatgggagtggatccttcatgaatgggttggtgccttccctgcggtaatgagtgagttcttgctctattagttcacttgagatctggttgttaaaaggaaactggtgctttcctcccttctctctctcttgctctctctcaccatgtaacacgccagccccccttccccttccaccaggattggatgctctctgaagccttcaccagaagtagatacaggcgccatgcttcttgcacagcctacagaaccatgagccaaataaacctctttcctttataaattaccgagcctcagatatgcctttatattagtacagaatgttatagacataggtaagacacagatcaaggtctttcccactccagacactttgcatttacttttcctttgcacagaattctgttccccaagacttcctcatggccaccccttctcagtattcagccccaggtgaaaggtctctccctcaggatgccttcccagacccccagaccctttcctaaaaagctttcacttcactcctcagcacaccgcacgttcggtcgtctccatggcacttactctccatggccatcctgttgacttctttgtttacctgtttatgtcatgttgcccccccgggaggaggtacattctacaagagcaagagcctcatctgacctgtatgcagccacggctgcaggacctgggcggactggatctagcaggcatccaggaaatgtttgtggaatcaatgaatgaaagaatgaacaccatggtgagcaaagtgatgtggttcctgaccccacactgctgcacaccttattatgaggagagagagtcaacaaataagcataaataagccctgagttctacaggtgagaaggtggggagtggacaggcacagaggaaaatcatgtgtagacacagggaggcaccatctgcaagccaaggagagaggtctcaggagaaaccacccctgttcacaccttgatcttggacttccagcctccagaactgtgagacaataagtgtcggttgtttaagccacctgatctgtggtacttttttctttgagacggaatctccctctgtcagcaggctggagtgcagtggcatgatctgggctcactgcaacctccaccttctgggttcaagcgattctcctgcctcagcctcccaagtaactg

SEQ ID NO: 96181 - DNA, 25222 bp, Homo sapiens
ggtctccttcctaccctttgggcctccattccccccacccccaagccacggagtctccattttgcctcccctatgaaactctgtctccctctttctaggtcagggaagggccatctaggggccgggggagaaggagaagcggaactcaaaggatgggaatacaggatgctatagattgaggtgcagcaagatcatctcgggttagaccttaagtaggacttcccaagcagcggctgcgcctacgaagtgcagcgcgagatcagggagcggtgaacctgataaggaaacgcccgaagcgtggggtcggaaatttccagatgccccgactagccctgccagccccgcctcctcacctccaacactgggcccgccgggtcctccgggagccactgagaggccgtcggcgtcgggccagagcgtcaccgcgcgacgcatcgtgctagctacacgcatctcgctcccagatccctttcttccggaaagctatcgagaacacggcctgggtagggccagagaggcccccgacgtgctggcccttccctcttggacgttgcgcttgttcctgcgctctatgctctctgccgttatcgcccggctagtcagtcgtccaactcaccacagagaagtccggatcgtggtagagcgccgcgtcgcacccatgtgacgtcacggcggcgccactcgcttgaggctttccccgcccaccccagcccgttctctctttccggacctggccgagcaggaggcgccatcatggtgagctcgctttgcggcgttcggggctggataatccgctgccatccgccgtggttttgggctaggggcacgctggagggcggcagggggtctgcggctgcccggagggagcaattcccgatactggggacctactctgggggccaggagagcagggatgggtcagtcatagcctaccgcccccacttagtagatgaccaagtggaggtactcggaggctgatatgactgggtttacaaagccaggaagtggcagagccaggattccgacccaggtggctggacccgcagccactcttagttatttggctttgctgcctttatctggacctgtcactttctagtatgaaaagtcgggttcgatgggggccgcggcgggtgagaggatcgagagccgaataactggatttggggaccaggcaggtctctgagtctcaggccccttcccaccttgtgatggtttttgagcctttgccccagtgtctggctgttcgttgggtacacagtaatctcatctgacaagtttgtgaatttgggaagaaataattcacaggagatgctcatcacggggttttgcacacagtaagtgctgcataagtggagctattaaatagttcttgtaattgtcaacacagtctgaaaaacttaagttgctcagaaaggcagcagggcggtaggagcctggcgaggcggctcacgcttgttatcctagcactttgggaggccgaggcgggaggattccttgcccaggagatcaagaccagcctggccaatattgtgagaccctgtctccactttaaaaacgatgttttaaaaagacactatttggtaagggttgttggattgactgatgctgtaggagaggtggttctagtagtattgctaggttctgaataaggattcgttttcatcattactgccattggtttgatatttttggttatccctccgggtatgggaaccagttttgataacattgttgcaaaatacaagttgtaaagaattgacctttttgtattaagttaatatgattgctgtgttacgatgtttcagggttctgtgtgccatgggctgaaggctttgtaaacagcccctttttacagagggatcagtggcagcccacaggtctcctggtggtgggcctgggatttgagctggtgtgttcagacctgggcttgtgtcccagctctcagtttcagaaataagtaataattggctatggttgggggtaattgggtccatggttgcctcttcacccccacagggagtggacatccgccataacaaggaccgaaaggttcggcgcaaggagcccaagagccaggatatctacctgaggctgttggtcaaggtgaggctgggccctgaggtctttgggaagggtcaccccaggtctgacttgcagatcctccattctagtgctggcaccaagctcctcccaggggcctgcagagcagtctcgggtctctggttctgttccagggtctcctgcatttgtattttcagcctctaggctgtgtacagctcgggagtggagccaggattttctaggtccttggccaggaaggacctgggccagctttctccctctaggtcggtgggttgggggaaagggataaagattcttttagtccagatcatcatgtgtttgccccttcactggaaggctgcgggggagcaggctgtcccagcttctcactgtcttcccgtccctccagttatacaggtttctggccagaagaaccaactccacattcaaccaggttgtgttgaagaggttgtttatgagtcgcaccaaccggccgcctctgtccctttcccggatggtgagtggctggtccagagagcacggtagacctgggagccgctgggtcttgtctgtctggaagggaggcaggacttggagctctgggagcaaccagggcatcaagggtttgtctcagccagtcgcgagcgtagagcttggactgttggttggaactgagtgtccatgggcagtgggcaagtctcctggtcctcctctccttctctttgtgaggtggaggtgtcctggtggcttcaggagattgccccaagtcataactgagttttatgtcaaaggctctgctgagggaggccctattgaacagtctgcatttttttttttatctggagctttccccagctggacctgaggagaggcctgtggggtttaaggggtgtggtgtgagtggggggtcccgttagagggcacagctgccctggcctggggatgcctcaagcggggctgaatgtaaacaccagaacaacttacgacgtacatcctccccaccctaagatccggaagatgaagcttcctggccgggaaaacaagacggccgtggttgtggggaccataactgatgatgtgcgggttcaggaggtacccaaactgaaggtgagctggcgggggctgggcagacccatcagacccttgctgtactgtgctgtgctgtgctgtgctgtgctgtgctgtgctggtccatcctcagtcttgccaccgctggtgaggcaagcatcctgcctgtctgagtggctttgaggattggtgtgggtcgtctctggcatggttgatggtggggtcccctgggcaagcttcttctggggcaagttgtaaactgttagtgctggcccctagagccagacagcctgggctcaagtctagactcctttgtcacctctgcacaggtctttttttggcccagcttccttgctgtagtttctagcataacaccagggatgtggtggtgaaagttccggaagtgttgagaactgctgctgtcagcccagggtgctccgggtagtaaacgatagtgttggttaccagggctctgctgcgccaaggcagtggagggtgagtcctggcagcccctgggtgaccacgcaggggtctgacccgccagccttgtcctctccaccaggtatgtgcactgcgcgtgaccagccgggcccgcagccgcatcctcagggcagggggcaagatcctcactttcgaccagctggccctggactcccctaagggctgtggcactgtcctgctctccggtgagtgatacgtggtcgacgggtttggactgagctgtgtggctactggcagccttcaccctcctggatctgggaggccagaagctgggcgccagatccctgtctcacccggttctccttccccttccctaggtcctcgcaagggccgagaggtgtaccggcatttcggcaaggccccaggaaccccgcacagccacaccaagtgagtatcaggcccccagccctgccctctccccagactcagcctgcagggccaggcctggccacacttgggctgcttctcctatccctcgtaccagccagccccaggccttctggaactctcagctgcctcatcctgcctgcttttcccttcaacactgcttggagctgtgttttccagggcctgagcaggcatctcctggggagcatgcagttcaccggcctttgccagcccaggctgggaccctccaggtggtggggcaggtgcttccatagcccctcctggctccttggcttcccactctgccaagcttttccagcagcattgactctcctggggctgaatgtgacaggcttgtggtgttcctgtgccactccacaatggcctcctttaagagggcccccctctcactccctcctctccccacagaccctacgtccgctccaagggccggaagttcgagcgtgccagaggccgacgggccagccgaggctacaaaaactaaccctggatcctactctcttattaaaaagatttttgctgacagtgctctgtgtgtgttattgggggatgggttggagaattggttcctgcgggtgagaatgcatttggtttggggacagggacgtcatgccagtgaagaccagccctcttcctgcccccactgccccggaagctccctgcctccttcccaacagccaggtggcaggtgttcccacaccggcttccttgggtcagccacgcccgcccctcttaaaggatcctgtgcccctccctggtgctgggatggcgggtggggcgtggaccgggaagtgcagggtgcaggctggcagggctgtggggagggagagactgcctgggaacaggtgaggcaatctcaaccccccggggaccgggaagcctgagtctagaggggcgttcaccccctgggagagcacaggtaaagaaagcgtgtgagccgcacccccggacctcctccaggggcctgtgggggccctcctgtgtttacacaaggggccgggctccctggattccaggtcgaggcctgatgagtgaggccagaagccgggaagcaccgcagaagtagaagccggggagccacagcctacgttctcggaaaaagcaggcactggaagggaggccattgagcccggcactagccggtgtgggtgagccccggcgatgggggggatgggtgagggtggggcggggaggctggcctgccttgactcctttcttctctttgcagctccctgctgtggtctggaggaagcagcggcctgggttggtgggattggaatgaagggcttctggtttgcagggatcaagggtccagggtccccgaggttgggtcaggagcctcaaggggataactgaggcttgggagggagacagggcgagatagagactggcccctgtccgggaagaagcgtccgggtagctggcaggagatagcatttaggcagaaaccaggctgggggcagcttgggtagggctccccgcagatcagaggacggcctggaacaggtcccagggccaggccccaggcaggggcagccagcctgaggagggtggctggttaggtggcactcacacctagatgggctgtgaagatcatagacctgtcccatagtaatggagacccctgtagcgcatttcaccctccactgcagcagctggaaggagtgtgaggagggtccagggagcagggtcccccattgacagggtagggaagggtttgccaagccttcggcctttaaggctgagcgagcaggcccagtggagaggcatcctggctggtctgcgggtgagagctgatgagcaggagaaactcgtgggggctgtcagatttggccagagacagatgctccaacaggcagatactgcgactgtcagtcggaagccattggcgtttgccagacagtggaaggagagggtcagttcgtcgtgctcttggccgggggcaggcaggcaacctgtcgtgcctttaaggacctttgggtgattagagacaggcaggcagcttgccrcctggaaatgatcaagtggtcagcctgaccaaattcaggacagctgaagggtctgactgggcactgtgtgactggtgggttggaggctgtcgtgtggctgagcagagatggccagctgatgggtcacacagttggggatggtgtcaggaggtcaacctgaccagcagagacggctggcaggaaggtcacggaaggccagccaggcatggtgccactgggtgcaggcaggtggcggatctgagtggcctgacacattggatggtcgcttatttgggcagcgtgattgtcagaacagtgtggcaggggctgctgcagggagccatttggacatctgcagggccccsccggaggcctcggatggccacgtagggtctgcctatcaggagaacccccagatgatcacagtccccagagacagccagacccccrgggacccagcctctcacagtcagtcctcccacccgagtgaccccgatggcggcctcccagctggcggcgctggaaggagtggactccggtcccagggtgcccggggccagccccggcttyctatattccgagggccagcggctggcactggaggctctgttgagcaagggcgyggaggcgttccagacctgcgtgcagcgcgaggagctgtggcccttcctcagtgcrgatgaggtycagggcttggcagcggcagctgaagactggacagtggccaagcaggagcccagcgggatggcagagggagccaccaccrccgatgtggacgcgggcagcctgagctactggcctgggcagtcrgagcagccggcgcccgtcctgcggctgggctggccagtggactctgcgtggaaaggcatcacccgggcgcagctgtacacccagcctcctggagagggtcagccgcccctcaaggagctggtgcggctggagatccaggctgcccacaaggtgggtgtcgcgggggccctgtgtccattcmccagactgggacggggacccaggcattctctcccttgtcctcctgggacttgcaagcscacacccctaccctaaaggacctatacccctgggacccaggagtgcacaccttccagccccaggactcaggtgcctacaaccccagacctcatccttactctcagaaaggggggcccggccgggcgcggtggctcacgcctgtaattccagcactgggaggccgaggtggacggatcacgaggtcaggagtttgagaccagcctggccaacatagtgaaaccccgtctgtactaaaaatacaaaaattagccgggcatggtgtgggcgcctgtagtcccagctactcgggaggctgaggaagcagaattgcttgaacccgggaggcggaggttgcagtgagccaagatcaagccactgcacttcagcctgggcgacagagcgagactccatctcaawaaaaaaaaaaaaagaaagaaatgggggcccctaccctcccccaagacctggatgcccttaggtatcgatgccccttgaacctaattatgacacccccagtctcagtcattcccccatcccctcatcaccaagccaggggtttccactctccctccaaggaaggcccagatgtccacactgcagcccttggaaagcctgctgtgtacttcacagccttagcgtccgccagctcccacrtgaagggtttctcagggactaatgtgcatcatcgtcccggaaccctgtaccgccagagggactattgtgcccacggaggcacgggggcggttaaatctcttccctgtaagtggccgagtggggatttgaacccaggctgtctggctgctgagtcagggtttccactgctttatgctgcctgcaagatccaggccttcagcacctccgtgtcccccaagttcgccacggtggcctagcaggtcagccgtcctgcacccagcacccagaaaattccacaggacccagaaatgcagttgcccacagtgccctacgggacatccaccactgatcctacagccaaactgccgtggacatttgggtaccgcagtgtcgcagctcaggggacgctgttctgtgttataaacgtgatttgtaggccagccacggtggctcacggcctgtaatcccagcactttgggaggccaaggctgggggatcacctgaggtcaggggttcaagaccaccctggccaagatggcgaaatcccgtctctactaaaaatacaaaaattagccgggcgtggtggtgggtgcctgtaatcccagctactctggaggctgaggcaggagaactgcttgagtcccagaggccgaagttgcagtgagctgatattgcgccactgcactccagcctgggcaacagagcaagacttcgtcttttaaaaaaagaaaaaaaaagccgggcgtggtggctcactcctgtactcctagcactttgggaggctgaggcaggtggatcacgaggtcaggagatcgagaccatcctggctaacacggtgaaagcccatctctactaaaaatacaaaaaattagctgggcgtggtggtgggcgcctgtagtcccagctacttgggaggctgaggcaggagaattgcttgaacccgggaggtggagtttgcagtgagctgagattgcgcccctgmgctgcagcctgggagacagagtgagactccgtctcaaaaaaaaaaaaacaacaaaaaacaacaacaacaacaaaaacacaaaaaaacaagcaaacagtgatttatgattacagttttccagcatttaggggccgggaatctcgaggaggggctggggatctcatggaggggcagcgttttgctcattcacamgtaggtgctgtttgagcagcagtgtatgtctgggggtctcccctttagcccmcctgaactttaaactcccagcccccagagcactttactcccagattccagatgtcaggtttcccacaccctctgagtgtcccctgagccagcttccgttcacaagcccaccgcccctctccccatgcccagctggtggccgtggtcatggacgtcttcactgacccagacctgcttttggacttggtggatgctgccacgcgccgctgggtacctgtctacctgctcctggaccgccagcagctgcctgccttcctggaactggcccagcagctgggggtgaacccctggaacacggaggtaggggccgggccaggkggtcctgtgagtccccattcccctggcatgggggcagtgggggcagacccttccatggagctccgggtcattgagatggatgctagcagggatggtcccctgggatctgatgcccacagcactggggaggtgggggtgggcattcccaaggaatcttgagtcactgagtttgggtatccccaagaaacgcctgagggttgatatcagtggctctaaggaagctgagacagatacttcttttttttttttttttttttttttttgagacggagtgttgctttgtcgcccaggctggagtgcagtggcgtgatctcggctcactgcaacctccacctcccgggttcaaacgattctcctgccttagactccccagtagctgggattacaggcatgtgtcaccatgcctggctaacttttgtatttttagtagagacggggtttcgccatgttggccaggctggtctcgacctcctgacctcagctgatccacccgcctcggcctcccaaagtgctgggattacaagtgtgagccaccacgcctggccttggacagatacttctatggagtcatgggtcccccagttagaaccagtctggagggagcctgaatccatgcagtgggcctcagcaagggtgtaccctccactccccacaccaacagaacgtggatgtccgtgtcgtgcggggctgcagcttccagagccgctggcgacggcaggtgagcggcaccgtgcgggagaagtttgtgctgctggacggcgagagggtcatctcaggatcctacaggtgtagcccccgccccgccccccacctcccggcgtcctataccccactttccctcagtgtgctcagagaacagctggcatccccttgcccaggcctctcttttstcatctgtgtaatgggggcaaaacactcttccctgcggaggaggtkggtgccgcggccggacctggtgctggcctgtttagtggtcttgggtaagtctgcttctctttgacctggtgttttcttatctggaaaactgggcaaacagtttgggggtggggtttgttcaaaatcaggagcacctggattgggatctaagctctgcctcgggtaaataactccacctctctgagcatctaagaaaatgcccggacatggtggctcacgcctgtaatcccagcactttgagaggctgaggcgggcagattggctgaggtcaggagttcaagaccagtctggccaacatggtgaaaccctgtcttcccagctacttgggaggttgaggcaggagaattgcttgaacccaggagagaggttgcagtgagccgagatcgcgctgtcgcactccagcctgggagacagagcaagactccatctcaaaaaagcaaaaaaaaaaaaaaaaaaaagaaagaaagaaactgcaaataataacagcacctacctcacagggtcacagcacagctagggaggagaggggtgtggcctctgggaccagacggcctggattcaaattctagctctctcagttcctcgttgtgtgacttcaggcaacttacttcacctctctgtgcctcagtttccccctctatgtcatgggctgatagggttagagcctctagaaccaggtccctcarcaggggtggcacccacgctcgggctgggtaagtctttgttttaggagctgttgggtgcrttgtgggaggctcctcggcatcttcagcctccacccagcagaggtcagtagcatcacacgccccatacccccgactttccctgccaattagagaaccgaaaacctctccagacagcgcagatgcccactggggagcacaggtgcccagctgagaacactgctcaggaacagtggctttcaaccctgtgcatgcaccagaatccctgggagcgcttgttaaaacacagcttttgggctgggcgtggtggctcacacctgtaatcccagcactttgggaggccgaggcaggtggatcacccgaggtcaggagtttcagaccagcctgattaacatggggaaaccctgtctctactaaaaatacaaaaaatcagccgggcctggtggaatgcatctctagtcccagctactcgggaggctgaggcaggagaatcgctagaacctgggaggtggaggttgcagtgagccaagatcgcgccactgcactaaagcctgggtgaccgagcgagactctgtctcaaaaaataaaaaaaaaaaaaaaaaaggaaaagaaaaagaaaacggaaaaaggccaggcgtggtggttcatgtctgtagtcccagcactttgggaggctgaggcaggaggatcgcttgagcccaggacttcaagaccagcctgggcaacatagcaggaccccatctctacaaaaatttaaaaaaataaaaattagacatgatggagcatgcttctagtcccagctactcaggaggctgaggtgggaggattgcttgagcccaggaggtagaggctgcaatgagccaagattgcaccactgcactccagcctgggcagcagagcaaaaccctgtttcaaaaagaaaaagagagaacaatacacagcttttggaccccactgccattcatcgtgcctggaacaggacctgagaatctgcattttcaggaagttcccacttgctgctgctgctgtttctggtccagggaccacactttgagaatgaytggagttgagaccaggatgtttgaaatgtttgaaagagtgtttaccttcccagcttggtgtgaggattcagtggcacgtaacgtaagacaggcttggccaggtgccgtggctcatacctgtaatcccagcactttgggaggctgaggtgggaggatcacttgagcccaagaatccgagaccaccctgggcaacatagctggaccttatctctacaaaaagaaaaaaaaaaaaaggaaaagaaaaagaaaagaaaacaaagaatgctccatgaacatcagctgtcatttattatgatatatatatattttttaccatatttcatggactctaaagtgctaccaatggagagaagcatcctgattgagatgtgagaagctctgcgtcttagaaccagtggaacagagtaatacaatcaaacccacgggccgtgctcccctgccgctcagtcaggcctggggatgcttcccctagcaccgggctcctggtggacagccttagaagggatgaagccagggccgcaagaggttgtccagggcctctctggccatttagtgggggaaggacatggggacatggggagtggcggatctgggagaacagtcccaggccctgtcctccctgttggtcacagcaaacgtggaggaagcagcatacccagccccagtgccaggctggtggtggcccccactgtctggctgctcggggctctgttacacaggcggccggtgcagcagttggtggtgaggctgtaggtgacgcccctgtagctgacgggttcctcaaggccgcagctggtggctcgcaggcagcctttgttgatgaccggaccagtgcccggggcgaccccgtggcctgtgaagcagtcctcgtcatcgccacagtgcatgtaggtaccaggacactgcatggagtcggtgagctcacagaagacgcagtccttgacgcccgtcgtgcctgggggcagagccatcaccagaagcagcagccagcacaggaccatggcggcctggcggcgttgaccctgccccagccaggccgtgggcttcccagacctcccggaaccgctgaatgaaggacctctgaggactcctcttgcccacgggactttggccctggtcctggcctcccagggtcagcgcctggagtgtcctctgttcccaacgccctgcgtccctctaagtcctggggatggaggtgagcgggtggctgctgcccaacaagagtctgtgaatggaatgagtgatctcacagatccctcagggttcccactggccgctctggggatgaggtcataggtgagaggagtgggtgtcacaatccaaggggtggcctgccccgccgacctgccggggcgcaagagggctctgccatccctgccaaggtgaagacgccctgaacccagaggacgctggccacaagcttgtccgcattctctgtgctgtacacccgccaagggcttgacttcagcctcacacctcccatagtgaccccatattccagatgggtaaactaaggctggggaaartgatgtatccagggtccccgagccaggatgagagccaggttcattgaattccaaagaggctgggaaagaagagggtgtattaactgagcacttgctgtgtgccaggattcatgctcagtgcttgcttgcttttatttttttgagacggagtctctcactctgtcacccaggctggagtgcagtggcgtgatctcagctcactgcagcttctgcttcccagcttcaagcgattctcgtaactcagcctcccgagtggctgggactgcaggcgcatgcaaccacatctggctaatttttgtatttttagtagagacagggtttcaccatgtaggccaggctggttgcgaactcttgagctcaagtgatctgcccgcctcgacctcccaaagtgctgggattacagacgtgagccaccacaccacgcctggcacttggtgctttcaataacaactactgtgatgacaggaagtgttagggcaccggcccccacagctcacaggctctcagggccagctacgtgcagggggcttgattcaaattcagtcatttgaatattcctatgttgtatttatttcttaattttattttttattttaaaaaattggccgggcgcagtggctcacgcctgtaatcccagcactttgggaggccgaggcgggtggatcacctgagctcaggagttcaagaccagcatggccaacgtggtaaaaccccatctctactaaaaatacaaaaatttgctgggcatggtggtgtgcacctgtaatcccagctacttgggaggcttgaacctgggaggtggaggttgcagtgagccaatattgtgccactgcacttgagcctaggcaatagagcaagactccatctcaaaaaaaaaaaaaaataggatcttgctctgttgcctagactggagtgcagtggcgcgatcttggctcactgcagcctcaacttcccaggctcaagtgattctcctccctgagcctccagagtagctgggactataggcgtgcaccaccatgcccggctaattttgtaaaattttttatagagatggggtcttgctatgttgcccaggctggtctcaaactcctagcctcaagtgatcctcctgcctcggcctcccaaagtgctgggattacaggcatgagccactgcacacggccttcctaggtttttgctccagattgcagatgagcactgcagggagcagcaacgtggagagcttggtgcacagccaggactgactaaatggcagtcattctaggaagcagctgggtcttaaaacaatccctgttagtgtccggaagtgaattccgtctctttccaaaggggaaaactgaggcattgaggtgttcctaagtggggaccaggcagagcctgggtttaaactccagtctgattccagataagttttttttttttttttttttttttgagtcagagtctcgctctgtcgcccaggttggagtgcagtggtgtgatttcagctcactgcaacctccacctcccgggttcaagcaattctcctgcctcagcctcctgagtagctggaattacaggcatgtgccaccatacccagctaatttctgtatttttagtagagatggggtttcaccatgttggtcaggctgatctcaaactcctgacctcatgatctgcccgcctcagcctcccaaagtgctgggattacaggagtgagccaccgcatctggcttttttttttttgggaggggggcgagggggacagggtcttgctttgctgcccaggctggaatgcagtggtattatcacggctcactgcagcctcaatttcccaggctcagccgggcacgggtggctcacacctgtaatcccagcactttgggaggccgaggcgggtggatcacctgaggtcaggggttcgagaccagcctggccaatgtggtgaaaccccatctctactaaaaatacaaaaaattagccgggcatggcggcaggtgcctgtaatcccaactactcaggaggctgaggcaggagaattgcttgaagccaggaggcagaggttgcagtgagccgagatcatgccactacactccagcctgggcaaaaagagcgaaactccgtctcacaaaaaaaaaaaaaaaaaaaaaaatcccagggtcaagggatcctcccgcctcagtctcccaagtggctgggagtacaggtgtgcgccaccacacctggctagtttttttgattttttgtagagatagggtctcaccatgttgcccaggctggtctgaaactcctgggctcaagcaaccctcctgcctcagcctcccaaagtgtgagtcaccacacctggccctgattatataagtgtcttaacttgggctgtcttcactccacccctcccgagtaggtacttcagttgtgcccattctacagacagggaagctgaggctggagaggtcaggactcgcctgaggtcctacggtctcccctgggacctggctgaggatgggggccgggctgggccctcagggttggagactctgaccccctactccccgacccccagcttcacgtggagtgacgcacgcctgcaccgaggcctggtgaccctgctgactggtgaaattgttgacgccttcagccttgagttccggacgctgtacgcggcctcctgcccgctcccacctgcgcccccccagaaaccctcggtcataggtggcctgcagcggggccgcagcccgcaccgcgtgtcccgccgccgctccgtggcccccgcgtcgcctccgccgcctgacggcccgctggcccaccgcctggccgcctgccgcgtctcccctgctaccccggggccggcactcagtgacattctaaggagtgtgcagcgcgcccggacccccagcggccccccggcccggcccagccgctccatgtgggacctaagccgcctgtcccagctgtctggctccagtgatggggacaacgaggtgagaccttgtggctggtgccagaagatggagcccaggaaggggaaggcgtttgcccagggtggtgcaagccaggctccaggggccctgctcccagccagagcaggcgtttcctgagggcctgcacccctaaattcataatggcatcgtttgttcatttcctgcacgcctgctgcattttgggcaggtgggcgctgggtggcatggggcagagacaggagagccctgggtgcaaatcctggcatgacagactaggtggggggaagccgaggacttgaattctctgaacctcggtatcctcatctaggaaggagcagagcaagggcactcattccgagtttggttgggggaggaatccacttggctaaatgaaatagagtagtaatgacaacaacaatacattcctgaaacagggagatcgagaccagcctggccagcatagtgaaaccctatctctactaaaaatacaaaaaaattcgctgggtgtgttggtgcacacctgtagtcccagctactccggaggcttaggcaggagaatcgtttgagccagggaggcggcggttgcagtgagctgagatcgttccactgcactctagcctgggtgacagagcaaggctgtctcaaaataataataataataataataataataataataataaacaataaataaatacattcctgaagtggaatttatttattttgtgacatcctcatcccaggccaaagaaagctatatatatatatatatatatatatatatatatatatatatatatatatttttttttttttttttttgagatagggtcttgctctgcaatgccttgggaatcaggaatcatctccctccgtcccaggcaaggaaggctcctagctggagaggagacgggggatgggcaggggcaaggtccttaccttcacctggtcctgagcaccctcacccagcatcccctcccttggcaaatatttgatcccggctggcagatgccggcgcttccggttcctccccagctgcagaggtggggacccagctccttgtccctctgtaggttagggggtcccaggtttgccctctcacttccccccttccctctcgggctccccacaccgtcctccttacctgcttcctcctctgcatccctctcctttctgtccctcctcctgctgctgccttcctgcctcttcctcacctcatccttcccctttcaccctctctgtctcctctctctccttcctggctcccctcctccctcctctccttctttctcctccctcaccttctcccttaccccttcctcttcttttacctcctccacccatttttttttttttttttttttttttgagatagggtctcgctctgtctcccaggctggagtacagtggcatgatctcggctcactgcagcctcaacctcctgggctcaagtgatcctcccacctcagccttccaagtagctaggattacagacccacgccaccacgcctggctaatttttgtattttttggagagatgaggtctcactgtgttgcctaggttggtctcgaactcctgagctcaagcaatcctcccacctcccaaagtgctgggattactggtgtgagccaccgcgtccggcctccatctctctcctccctctctcctctcttccctcccttccctcctccaccatctccttccacctccctcaaatcctctatcacttcctttttttttttttgagactgagtcttgttctgatgcccaggctggagtgcggtggcgctatctcagctcactgcaatctctcccttccgggttcaagcgattctcctgcctcagcctcccgagtagctaggattacaggcgcccaccaccacctcaggctaatttttgtatttttagtagagatagggtttcaccatgttggccaggctggtcttgaactcctgacctsaggtgatccacccacctcggcctcccaaagtgctgggattacaggcgtgagccaccgtgcctggccrtctgtcactttcgctgcttctctcttgcctcacctcctgccttccctggatctgggatgcccccagggccccaccccagcctcctctcacctccctctctttccctccacagctcaagaaatcctggggctccaaggacactccagccaaggctctgatgaggcagcggggcactggaggaggcccctggggggaagtggactcccgacctccgtggggcggtgccctgcccctgccccccgcccaccgcctccgctatctgtccccagcccgaaggcggttcggtggggatgctacattcaaacttcaagagcccagaggcgtcaggccgtcagactgggccccccgggcaggacttggggggcaaccctgaacaggagcccaagccaaatctgctggcccacccaaggagcagtgccggacaactgtcrgctcagagccctctgcctcaatgccctgccttggacaaggcttctggcctcggcgtctgtcaagcagaagggatgtttgtcacttgttctgcaacttgggccgggagtggtggctcatgcctgtaatccctgcactttgggaggctaaggtgggagggttgcttaaggccaggagttggagaccagcctgggcaacatagtgagaccccatctctacaattaaaaaaacaaattagttgggtgtggtggcgcacgcctgtggtcccagctacgcaggaggctgaggtgggaggatccctygagctcaggaggtggaggcagcagtgagccaagatcatgcccttgcactccagcctgggcaacacagtgagaggccatctctttaaaaaaaaaaaaaaaagaaaaaagaaaaagaaaggctgatcgaggtggctcactcctgtaatcccagcactttgggaggctgaggcatgtggatcacctgaggtcaggagttcaagaccaacctgaccaacatggtgaaaccccatctctactaaatacaaaaattagccaggtgtggtggcgggcgcctgtaatcccagctacttaggaggctgagacgggagaattgcttgaacccgggaggcggaggttgcagtgagctgagatcacgccactgcactccagcctgggtgacagagcgagatttcatctcaaacaaaaaaaaggacttgggcaagcccattgcctgcaccagacctcagtgtcacaacccagaagatgggctggcagcgtccccaggcagcggatcctaaagaagacacacacagctcccgagggtcaggccttcctgatgaggggcccgggtgaggccccgagctagagctgctagagctgtggaggggaagatggggagtcgctgccaggcacactgtgttcaggagctgtggggaaactgaggcaaggagctgaatactgagggagtggaatgtggtacagccacaggggaacagggtgggtggtgggactttctgtgggcgctgagagggcgggtctgccggagctcccgtttacctctgctcggaataaaaccactttatgccaaaaacgtgcgttactaaagactggctctgaatccaagagtccacaacccagccccctcctccctcagacccaggggtccaggcccccagctcctcctccctcagactcgagactccaggcccccagatactactccctcagacccgggagtccaggcccccaacccctcctccctcagactgaggggtccaagcctccagaccctcctccctcagacccgggagtgcagcctcccagcccctccttcctcaaacccgggagtccagacccccagccctctcctccctcagacccggcagtccagactcccagcccctcctccctcagacccaggagtccaggcccccagccccctcctccctcagactggggagtcaggcccccaccccgggaagtgagatgcccagcgctgggttcctgcagcacctttgcctctgggcgggactctgagtcggggaccccggcctctggaagccttggtgtggtgaggattctccacgccccgctgcctgccctgccacagcgcatcaaggaacctggacagaatcgacgtgtttattatgagggtcgtgggtgcggggtctcagaggcctggccggggctggggctggggctggagttgggtctgggctcacgctccaggctggtgttgggctcaaggctgggcttgggctcaggctcagggctgggctcaggatctgggctgccgtcctcctccgggtcttcatcccaggggaaggtcggcatcccccgcatctgcttgcggtaggcacgatcgaaggcttcgctctgggccaccgtgaagtggttcttccagtcgccacagacccctggagaagagggggcaccagggggtgaggagcctctggggagcactgcgcccctacctccaacattccagcaacctccttccccttcccggcctttggcgaggtgttccctttgccagaaacaccgtcctccctaccctccacattgccccctttgtgtcctatggtggcagagtcttggcctgtcacctggcgccgttctcacctccgccctcactgcctctgctactgcaggattcctgccagtcctcccctttatcccggaccctttaagtctctgcccagaacctctgcctccaaccctgaattcctgcccaccttacagcttgtgtcacctcctctgcgaccagtcccaaacctcccctgctagaacaaggcctcctgtctcaatgcccccacaacgctccatgctgcagccattactgcttggacatggaagggacccccttctgcaggctctgtgctcagggcttgcaaacaatttgctgattggcgcagcaagcgagcctcaggaaccctccaagcctcagttttccattttttttctttttgagatggagtctcgctctgtcgcccaggctggagtgcagtggtgtgatcacggctcactgcaacctccgattcaagcgattctcctgcctcagcctcccgagtaactgggattacaggcacgcaccaccacgcccggctaatttttatatttttagtagagatggcgtttaaccatgttggccaggctggtctcaaactcctgacctcaggtggtccacctgcctcggcctcccaaagtgctgggattacaggtgtgagccacggcacccctcccaagcctcagttttctcattgtggggctatcacaggggcatcacccctcacctggaaacctggggctcatggcattcagaggaccgtagtttgccttttggcaagtgcacgtgccccatgttacccagcacccttaatgaggttgtggggaggggttccctggggtgggctgaataaagactccctccatatccacgtcctaatccttggaacctgtgaatatgtgaccttatgtggcaaaagggattttgcagataggattaagctaaagatctggagatggggagaggaccctgaagtatctgggtgggctcagtgtcatcacctgggtccctatagaagggaggagggtcagagattagaagatgcttcacttggccgggcgcagtggctcacacctataatcccagcactttgggaggaagaggcgggtggtcaggagatcgagaccatcctggctaacacggtgaaaacctgtctctactagaaatacaaaaaattagccaggcgtggtggtgggtgcctatagtcacagctacttgggaggctgaggcaggagaattgcttgaacctgggaggcggaggttgcagtgagccgagatcgcgccattgcactccagcctgggcaacaagagtgaaactccgtctcaaaaaaaaaaaaaaaagaaaaaagaaaaggccgggcgcggtggctcacgcctgtaatcccagcactttgggaggccgaggcgggtggatcacaaggtcaggagattgagaccatcctgaccaacatggtgaaactccatctctactaaaaatacaaaaattaacctgacatggtttcaggtgcctgtagtctcagctacttaaggatgctgaggaaggagaatcgcttgaacctgggaggtggaggtcgcagtgagccgagatcacgccactgcaacctccagccagcctgggcgacagagcgagactctttcaaaaaaaaaaaaaaaaaagagtaaacgtgttttgagtcatggagtttgcggtgtttttgttacagcaggaagaggaaacaactatgctaccgcctgcgccccgtaacccagggcttgagtatttctgccgtgaacatggccgtcgaggaggactcatgaagactctaaatctctctcgggtaaacctggcgttggcagtactcctggatgttttgctgtcgttgggagttctctggatggggacgcctcgggtggctggcacgtgtgctgagtcagtgctaagccccgtgcgtgatcaaccctggggccacagtgaccctgttcacccaatgttacagctgggtgagaaactgaggcccagagaggttaagtaactctcccaggtcacacagccgggcagtggcctagtgggctctgaaccccagaacccccgcacctttccggaggaaggccccgcgacggtggtccagcaggctgggaggcagcagcgtgtagttggacatggtgttggccttcatggcgctgaaggttgagtgtgccacgacggagcccagtgcctccttgcccagcggacggcccaggaacccacagatgcgctccacggagccctgtaagtcctgcaggcaggggagaggggtcagcggagggagggcactcggccaaggaaggagcgtggaacctgggatccgcatgtctgggtcctaacctggggctgcctgagggacgctgcctctttgcctcagtttccccaactccaaactgaggggttgggctatatcgcctctaagggtttttgcagtttctgtctttggagggttctctaggtgggagggaataggtgggcttggggcagaggtcacagcagggggcagaggtcacagccgggggcagaggtcacagccgggggcagaggtcacagtggggggcagaggtcacatccgggggcagaggtcagtgcatcaccttacctggaatcaccctccttcaggttagagacaggcattggctggtctacatctcaaacctgctcctcccccaggcccccattgcaggatggccccaccatccacccaggagcctggcctccctctctgggtacccctcacccccaaaacctgtccgtcatgagccctgtccctccccacctgcctccccttgccatatcccctcctctgtgtccctgtagcctagaactgcttaggcctcatcctccccttcctggatccatgccccagcagccggctgctccacagccttcctgcctccagtctccatccccctccagctcatcccccacaccccagctgaccctgctcctcactggctcccaactcttccgtggctcccgagtgccctgggacacagtcccagacccagacccggctttcaagcacagatgtggggcaggtgcagtggctcatgcctgtaatcccagcactttgggaggctgagacaggtgtcgggagttcgagaccagtctggccaacatggtaaaaccctgtttctactaacaatacaaaaattagctgggtgtggtggcgggcacctgtaatcccaggtgctcgggagactgaggcaggagaatcgtttgaactgggaggtggaggttgcagtgagccgagatctcaccactatactacagcctgggtggcagagtgagactccatctcaaaaaaaaaaaaaaaccaaaaaacagatgtggtctggtcacagctcttccaatacctttcccaccctctccttctgggactcaccattccctacacattcctccctctgggccttggcatggggcttccagaagggcccattgccacggctacagctcaaatatcaccttcctttccgagtgtctactatgtaccaagctctgatccaagccccccatacatttgtgccgatcccaccatcagctttgcaagggaagtgtcattatctcaattggtaaacagaggcccagagagggagagacacttgtccaaggccacacagccagagaggagctcaggtccctggagcccttagtcctccccgtgcccctctgccttttttttttagacggagtttcactctttttgtccaggctggagtgcaatggcatgatctcgtctcaccgcaacctctgcctcccgggttcaagcgattctcctgcctcagcttcccgagtagctgggattacaggcatgtgccaccacgcctggctaattttgtatttttagtaaagacagggtttctccatgttggtcagggtagtctcgaactcccaccctcgggtgatctgctcacttcggcctcccaaagtgctgggattacaatgagactaagcctggctctgtcacccaggctggagtgcagtggtgctatctcagcttactgcaacctccacctcctgggttccagtgattctcctgcctcagcctccaaagtagctgggattataggcatgcaccaccatgcctggctaatttttgtatttttaatagagacaggatttcaccacgttggccaggctgatctcgaactcctgacctcaagtgatctgcctgcctcggcctcccaaagtgctgggattacaggcatgagccaccatgcccggccatcactaccttctgatatgcagcacccagcatggtcagccctctggtcagctccgccaaccccatggctccgattttccaggt

SEQ ID NO: 96182 - DNA, 24858 bp, Homo sapiens
  misc_feature (1)...(24858): n = A,T,C or G
cctcatggggttgcttgaagattaaatgtgatgattttgtaaagcagtgcctcgcacacaggaaatgccctgtatgtgttggaaaatcaatacctgcagtggctgggcacggtggttcacacctgtaatcccagcacttcgggaggccaaggtgggcggatcacctaaggtcaggagcttgagaccagcctggccaacatggcaaaaccccatctccactaaaaatacaaaaattagccgggcatggtggcgggtgcctgtaatcccagctactcaggaagctgaggcaggagaatcgcttgaacccaggaggtggagtttgcagtgagccgagattgtgccactgcactccagcctgggtgacagaacgagactgtctcaaaaaaaataaaaataacataaataaaatcaatacttgcagagtatttattacaatgccaggcacggtgctcagggccaggaagccagcagaggaaaaaacaggtaagaatctttggtgcccgtgcagagtttgggaaagagcacaggtgggcccaagttcatggacaggctctgccttctgcaggctggtgacctggaggtgttatttaactcctcctctcctcctccaagaaatggggctgccacacccctgcactgataagtgctaagcgtttcctgatactattagtgggtgtggtgggttcaagccaccacagactcctggactccctttcccttggatctgggcgggcccatgactgccttgaccactttaatatagtgcaagtgaaattgtgtccatttctggcccaggacttaaagaactaacagctttcatgtcttgccttgagaatgttccctctgcactatcgtgtcaagctggagagttcagcttttgttttttgagacaggttctcactctgtcacctaggatggagtgccagtggtctgatcacagctgggctcaagggatccttccacctcagcctccccagtagctggcaccacaggcatgtgccaccatgccccgctaattcttacattttttgtagagatggggtctcactgtgtttcccaggctggtcttgaactcctgggctcaagcaatcctcctgccttggcctcccaaagtactgagattataggcatgggccagttttagcttttgtatgtagggttatgattattcatttttttcttttcttttcttttcttttttttttttatgatggagtttttgctctgttgcccttgctggagtgcagtggtgtgatctcggctcactgcaacctctgcctcctgggttcaagcgattctcctgcatcagcctcccaagtaggtgggactacaggcacccgccaccacgcccagctaatttttgtatttttagtagagacaaagtttcaccatgttggccaggctggtctggaacacttgacctcaggtgatccactcacctcagcctcccaaagtgctgagattacaggcgtgagccaccacgtccagccagctcttttttggcaaccactttgagatataattaatataccctaccattcacccacgtaaggtgtgcgatttaatggcttttagtatatttacagagctgtgcaaccagcacaatcaatttttgaatatttgcatagcccccctcccaaaaaaacccacaccctttaaccatctccccacaatcttccctgttccttgtccccccaccaagtaatctcctttctgtctttatggatttgcctattctcgatttttcatgtgactgcaatcacacactccatggccttccgagtctggcttcctcactcggcaccgtgtttcaaggtccatccacactatagcacgtgtcacagcctcacgcctttcttttctttttctttttttgagacggtgtctcactctgtcgctcaggctggagtgcaatggcgcaatctcggctcactgcaacttctacctcctgggtttcagtgattctcctgcgtcagcctcccgagtagctgggactacaggtaggactacaggtacagccaccacgcccagataattgcctcactcctttcaagactgaaagtcccattgtccaggtagaccacaatgtattcactcatcaggtgataggcactggagttgtttccagttttcggctgttgcaaatagtgctgccacgaacctgtgtgctgggtcacagggtgaactctacgttgaatcgttttgggagctgccaggtggctgccccagtttccgtttccaccagcagtacgggaaggccccatttcccagcctcgctcgccgtcgtgtttggttgtggtgggtgtgcagggccatctcaccgtggggcccacacctattcacctccaggtccagccctgaccactgggcctgactgggctccaaggacctcggtcccggtcctcgccgtgggatggatggtcccttctccgggggctgctctttccgagtctcctccagctctccccagggctcccagaaggtcctctgctcccagcctctaccatgtcctgatcggctttctcttctccccttgtccactcctctgaccaatgtcctatggtttccctgtggccactccaatggctacagctcagcagtcatcccttcaccccctccctcccaccccattcctgctgaagccctggttggcatgggctcacccctaaaacttctggcttctgcctcacccctcccggctccccatctctccctccgcctgtcctcttaaacatcgggggcctacaggcctcttcaactgtcatcctcctctattccagggctcctcatttggttcatctggcccttctgagaagcctgaacaatctggggccctccaggcctcttcagctgtcatcctcctctattccagggctcctcatttggttcatctgacccttctgagaagcctgaacactctggggccctccttgaaagtctcgtgtgggtccccagcaaggccagctggcctaaggcctaagaaaaatgctcctggtgctgctttagtttgcaaaaagtgaattaaatctgcccaagccttttttcactgagctggtgaaaactgtgtcccaaacatgatcttgccatccactcaactcagggtcctgccccacggagaaggagctgagctctgagcccagctggagcccccaggcaggtcccaaggctagagctggggtcagtgggggtgcagggcagggacaggagcctgggtcactggccaagggaaaccagctcaggacaagggtgccccccgcggggtccgccttcattttgtgtgactcgtgcagttgcgctgagacaggccccacgcttgctttaatgatctggtgttgccgtcttaaaatccttcataaattctaaacaaggggtcctgtgtctgcattttcccccaggccctgcagatcaagcagtgggtaccgcggctgctctggcttctcctggaatctcaggtgctccctcttgtggctgttctcagcctagacaaccagaaagccgcagaaaagcaccagccaaggccgaggctgcgagggtgctggcgggcaggcccatcacggggctggctgtcctggtccgcgattccttgtcagccattttcctcagggggagcggcaaacgccaacctggactgaactcatctggggacaaccctggcttggaggagggtcatgtggctatttgcagactttacttctcttactgtgaacacccatgtgctctgctgcctaaaacataacatgtttgacaatgtgatgcggcccagacctaccatggatgccatgtcacgtacgtactatgcatccgacaacagggccaggaagcagaaggttccggaacacgactttcccagagagctcagataagaacccgtgggcatgtcagctcattcagtcctcatgaccccctccgcccaccatgaggaaggtccattctttcttcctcatttaacagatgaggaaatgaaggcacagagaggttaagaagcttgttctcggtcacacagctaggacagaggtggatttgaacccaggcagtatggctggggttaccatcctggcctttttgaacatgtccgggagggcaggccctacccagccacacaatgcccagtaactcctgcgggtgacctgccctgcctcgtggagactccgttatatctgggccaccaaggcaggggttagaggtctgtgtgagcccagcactgaggttctctctgggttgaacccacctcagagatgtgccttgggcaggcctggccttctgtagaagctgtgagggtgaaggtctccagcccttaaagaactctccccaacaaaaaaaacagtctccttcccagcttggggcactatgtgctcggctgtggcagctccgtctgttcttccccgcctgcccccgggcacccgcaggggcgcccatcaactcaggcagctcaagctgcaaggaacaaaagcttccctccaggagccggagcttgagacttcgcccaggtggggaggaagacgcagcgagacctaagccttcttcctcagttttgtgtggcagcaaagctgggttctgtgctggcggtgggctcagcacaaatgcccctccgcatcaccccacttacatctgcaatccccgggcccccgtggccgccccccccacttgctttgctccaaggcacttggcaccttccaacaacctagagcacagaaggacctgcgctgctggggtctccccctccctctctggacactgagcctgatggggcaggggtctgtgttcccagcgcgaacccccggcaaagtcccatacagggggagctcaggcagggtcagcggagggacctgcgcctgaatcccgaagttccactctgactcacacagcctgggcccccagctctgacatgccccctctgatggggggcgtctcagccccattccatcctcctgcagctgatgcacctcccagctttcggagtgactcccttctttcaaatccgatgtccctgtcctgctcctgccaaatctggccccctccaacgtggtacctaagggtccagagtcgagggtcgcctttgctgtgccctcgcaccccctgggggcgggcctggggcagtgggtcccaagcctgtcaggattgggcccacgctacaccacgataaacgctggggccacccagggcagcaggtgccgcgccccaactccatgaggcccttgcttttctcagcgggaagtgacagaaaacattatttttctagtcaacccattcggagatggaatagaacagacagcaacattcgcatgaaaatgtcacgatgaaagcactgaggactcgcaggacaccagcggcactggggaggtgcttttgagcttggtcccccgcaccccgggggtccccgccttctccctctgccgcatgagaaacactggggcccaggtgttctcagctcatttgtcgccttccccaccatcttagaaagcgactgaggtcttttgaattccaggggctggtctgaaccttccaagagcacagattttactgaccttaaggctcggtgaacccacagctgacaaaaggttccagagaggaggaggaggggctggcttggggtcacgcagccagaggcaggggctgagcaaagtttccaacagcgattgtctcccaaaggtcagcccctgcccgatcgcgatggcggccaccacaaggcggggctgagccagtgggcaggggtggagtgggatggagcgggacccccgactgacagcctcccgtcctacctgcggtgagcctcctaggccaggctgctcggggctgtcctgctgctggaccgccgggggcaacggcactcacgtcccacaccgttgcgggtggcctggctggcaggggtccctgtggggatagcgtggctgcggttggtgagggattggggtgggaggggggtggcggtgttagattctgcgggctctgctctgagcccccgcccagcccagaaaccccactagcctggggcctgagaacagccacgccactccctcctgagagcccaccgcgccacagcttggaggaagagcctgcggggaactggctgcaggacgctctcttcttgagtgcaggtttggccaatgtcggggcctcrgggctcgggttggggggtgcatgccaagagccagggaaaggaagcctgggtcccagatggaccccaggccgcccaggcaggcctcctatgagtctgctgggagcatggctggactctttcttaaagaggggtatgggctctctgtgggccacgactggtttctggatcccccaggaacactagggaactcacagcctggttsctcaaggtgctaagggccagagggtgccaccccctgaactatccagcaactatccagagagaaaggggacatgggggactggcccttaacaggatgctgctgagggccaggcaggcggctgccacctgagtgggtgcaaaatggcgccaggctccttgggagggcggagggcgaggcctgtcatctgggccaggggaggcagcgtctgcatgtggccaacagcagtggggacatgggcagtgaggccaggctggggcaggtgtggcccacctcaaccgccagggtgccccagagatgcccagcccagggacattcctgggcgcagattcagagccaagggcctggaaaggctccgaggcccccagtccacagtgagctcctcaccagaggctgctggccctggaaggggaaagtgggggcatttcagagtccagtccttcccagctcctgccattcctagggtctgggcttctgcccccacgggcgccctggcatctggcaccccaccctgtcccagctcctgccttcctgcctctctcctcctcattacccaccrcccccaacatctgttcccccatctgctctggggaactctggatgggtggagaatgtrgggactctggtctccaggccctgaggcccagaatagagggcagggttgaggtgagcagaaagtcccagaacgctaacttccggtccccacaccctgagttctgaagggaacccaggtgtctgcttcccctgaccccatggggatcccactgtcccgctcccaagccccagagccacccaggttccagctcccagcatccctttcctcagctcagctctctgggctttgcactcgggtgggaaagggttaagggtggggcgctgggggtgggtgggcgggtggcmgggaggctgggttgtttggtgataatccccttccgtgcccagggtgtggagaacaaggttagggccccatgtgggaaaggcaatggctctgatccctgcaggcctgggcctcggtctctcacttctgatcccccgccagacacccctagcctgtccccttccctcccctccccagggcctgccaggctgggtgtctctgagcccacctgcccacctatcccagcccccaggcagtccgagcctcagtctcccagctccctgtggcctctgggtgcctggcctctgtctcagcctctcagcctcctgtctgttcctctgtctttgcagcaacytctctgtgccgagcgcctcccctaggctgactgtcctctctctgcctctgtcctgtcctctatttctttgtgactgagtcttcatctgtccctaagccccctctcctgcccagccctgcttgtctctgtgtccctctctaggtttccacgtctgctggccttggccagcccctctgctccagccgctcaccgctccccagggccccctgcccctcgacactgacggataactctggggtgttaagctacggattagttcaggcaaaattctcgattttgtctgcgttctttcccctttgggttatgtaaacagtaattctccccagatggaactattttcctcgcttccatgcagccggggagggggcctggacgggttgggggtggaatgccccagttccacaggacacctccaggaggggtagaggctgcggctgagatccccagcccagccacctctcttccctccaggtgctggctctgctgtgaccatgcccgtgacctttgccctcctgctcctcctgggccaggccactgcggacccatgctacgatccacagggccgcccccaattctgcctcccgccagtgacacagctggctgccgtggcggcctcctgccctcaggcctgtgccctgtccccaggaaaccaccttggcgccagggaaacctgcaatggcagcctgactttggccctgggtggccccttcctcctgacatctgtcagcttgcgcttctgtaccccaggacccccagccctcatcctgtctgctgcctgggcctcagggggtccctggaggctgctgtggcacaggcccgcctggcctggggccttagggggccctgaaagggtgaccttccactccacaccaggtcctaaggccactgtggcggccagccacctccgtgtggagtttgggggccaggccgggctagcggcagctgggctgagaggccgctgccagtgtcatggccacgctgcccgctgtgccgcccgtgcccggcccccccgctgccactgccgccaccataccactggcccggggtgcgagagctgccgcccgtcccatcgagactggccctggcggcctgccacgccccggcacccccacccttgcctacgtgagtcctgcgcccctcactctccctgcctttgcctgcctgccactgggtcctttgtccctacgggagcaggatgttcccttccctcgctggaactgggtgctccttgcctctcaccccagtctcagactcggtcccctcatacctcctccctgcagccagtcctgtatctcagccacacatgggcctgtctgctcatgaggggctcagcctctccccaacactcatcagcctgtgatgatggtgatgatgatgatgatggtgtgatggtggtaatggtgatgatggtggtgatggtggtggtgataatggtgatgactgtggtggtgatggtggtggtgatgatggtggtgatggtgatggtggtggtgtgatggtgatgatggtggtgatgatggtgatggtggtggtgatggtgatggtagtggtgatgatggtgatggtggtggtggtgatggtggtggtgatggtgatggtagtggtgatgatggtgatggtggtggtgatggtagtggtggtgatggtgatggtggtggtggtgatggtgatgatggtggtgatggtgatggtggtggtgtgatggtgatggtagtggtgacgatggtgatggtggtggtgatggtgatggtggtggtggtggtgatggtggtgatggtgatgatggtggtggtgatggtggtgatgatggtgatggtggtggtgttggtggtggtgatggtgatgatggtggtggtgatggtggtgatgatggtggtggcggtgatggtggtcgtggtggtggtggtgtcgatggtggtgatggtggtggggatggtggtggtggtgatgatggtgatgttgggtggtgatggtggttggtggtgggtgggtggagggtggatggttggtggatgggtggtgggggatgggtgggtggtgggtggatgggtgcgtggtgatcggtggtagggggctgaatgaagtgtccgttggtgnnnnnnnnnnnnnnnnnnnnccgatgtcgtcccaggcagatcgaatcacagacgatcccgaccgtcacacgagatccacacgcttccgatccatagacatccctcccatcctcaccgaagaccgcacgacccgactagacccgagccgatccaagcaagctatatacgacagacgcaatctgacccaatgacgggtcgcctccgaacccctcgacgcgaccgatcagagccactccatccctgccgatctatcgagcgtgccggccacacgcagcgattcgaccgacagagcgtcgcacacactccaaccaccactgcgaccgaccgccgatccgaccatcctctcgatcgaccgatgcgccggccgtccgcaccaccagcgagcgacggacggacgacgaccgagacaccctcactacgacgagcgtcgacggacgaccagcgccgattctccatccaccgaccatccaccgtcgaggatcaacgtcatccaacgcggatcttcgctcctcatcaacagcgacgatcacaatcgcgagcatcatccacaggctcccactccacaccaccaacgcctccactacgtcgccgactgcaaagggaacactcgtccgaggtgcgaaagagtccaatacaccggtgactgcgatgcatcgactgcccacctcgctcaatgggtcatcacccgcggcgtacatcgttcataggctcgctgcctcgctcattggttcatggttacgtggctgacccaaggtcatcggttggtgcgtcaacgactcaatggtcgtgggtcgcggtcatcggtgcgctcatggttgattgatggtagctgcataatggtggtcaatgatggtgattgtgagtgcttggttcgtgttgtcgcatgctgatgacggtggtgtgaatggtggtgatgcatggtggtcgtggtccatggtgctcgtccgtggcggtggtcggtgatggtggtgatgctgctggtcatggtggtggtggtgataatgatgatggtggtggtgatggtggtggtcgtggtggtgctggtgatggtggtgatggtggtggtcatggtggtggtggtgatggtggtggtgatggtggtggtggtgatgatggtcgtggtggtggtgatggtgatggtggtgatggtggtgatgatggtggtcatggtggtgatggtggtggtggtggtgatggtggtgatggtggtggtgatggtggtggtggtgatggtggtggtgatggtggtggtggtgatggtggtggtgatggtggtggtggtgatggtggtggtggtgatggtggtggtgatggtggtggtggtgatggtggtggtgatggtggtggtggtgatgatggtcgtggtggtggtgatggtggtggtggtgatgatggtcgtggtggtggtggtggtgatggtgatggtggtgatgatggtggtcatggtggtgatggtggtggtggtgatggtggtgatgatggtgatatgatgatggtggtggtggtgatgatggtgatagtggtgatggtggtggtgatgatggtgatagtggtggtggtggtgatggtgatggtggtggtgatgatagtgatagtggtgatgatggtggtgatagtggtgatgatggtgatggtgatagtggtgatgatggtggtgatagtggtgatgatgatggtggtggtgatgatgatgtaataacagtttccgagcacccatcccagggcctggctggatgcaggtacttgggtaatatttattgaacagttgtaggggaacaggacagctggatggtacctgactcctcaaaccaaccacagggggaaagtattcggtcattaaacacatatttatcagtcacctacgtgtgccaggcagggatgtcatcaggcccattttacagatgaggagactcaggcctagagttcagaagtcccctgcacaaggacacacagtggctgcgtgtggcagggccaggatctgagctcaggaagccaagttctggggtctcagcctgtccctgccaggctcctgctgggtactgtcacaccacgtggcagacaagaggcaacagacaggagcacggccttggtggcctggcagccagactatttgggcttgaatcccagctcctctgcttacctgctgtgagaccttgggcaagtgacctaatcttttggtgccccagtttcctccaccatagattggggatagtaacagcacatcctttacaggctgtagtgaaaattaaatgcattaatacacataaagcctttaaataaagcccaatgtggtacctggcacaaaggaacggcttcctgagcacctgccaaagtcgccactccccagctgaggaaggtgaggctcaaagagaggtcacttgccctaagtctcattgccagcaagggatttaacccagggagccctgagttcctagatgctgcaacaatccgctgctccatccagctggacaggggccccccaggaatgtcccatgcgatgccctctttcccacaggtgcttccagaccaggccttccctacctccctccaacagcccctcctcagagacagccggtgtcagctccttccggccctgaccccctccctcctccagcctgagacacttggtacagggtctgaggtcctgggaggtaactctaccaacagacacagacatatacacacgtgtgcaagtgtaccctggccttccctctccacctcccatgcgctttgcctcccggccctctatttcttttttttttcttttgagatggagtcttgctctgtcacccaggctggagtgcagtggcgccatctcggctcactgtagcctctgcctctgggsttcaagccattctcttatctcagcctcccgagtagctgggattacaggtgtgtgccaccacgcccggctaattttgtatttctagtagagatgaggtttcgccatgttggccaggttggtctcaaactcctgacctcaggtgatctgccagccttggcctcccaaaatgttgggattacaggcgtgagccaccgcgcccggcctctgcccctctatttcttcatacatgaagatcacatgggctaacttacagaccatccccattctttggccaaatcttttacctaagcaggggagtgaggggtgagactcaccaggcctgaggatgaggcagccttcatcctgggcctggacagggcctgggcgctggggaggctgtcctgagggtcaccacatccccccagactgagcagggcagtgccctccaaacccgggtaagagactgacaatgctgcagtggagaaaggtcagggtggccaggtgagactaatgcctgtggcagagctatgggcttcacagacatcctggtctgcatctcctctccctcatctgagttctccacaggggaagtgaggcaaaacgattacccttgggtcagaaagaatccaaaacctgactcaactcactgatcatytgaatagctttgccactttgaatgcccacaaaaaccctgggagagagggatctggattctctctggacagggagaaaacagaggctgggagagggggagttgtttttccaagaacatgcagccgtytgagctccctgattatcccacaactcttccgggctctcagggacctgccagtccagggctctcaaacctcttagtgtcaaaacaccctgcagtccaagtytyttcaaagagtgtccatgagcctgggagacataatgagtccccgtctttaaaaaaaaaattttaaagtagcctggtgtggtggtgcatgcctgtggacccagctaccgaggaggctgaggtgggaagatcccttgagcccaggagttggaggctgtggtgagttatgatcgtgccactgcactccagcctgggcgagagtgagaccctgtctcaaaaaaaaaaaaaaaaaaaaaaaaaagagtggtctgtgaaccccctgtatcagcatctcactctgcagtgcttgctggaaatacagatccttgggcccatcagaaagcctagggaggagccttgcaatctggcttttgttgttgttttggatttttgcttcttttttaaagacaaggtctcactctgttgcccaggctggagtgcagtggtgcaatcataactcactgcagcctccaactcccaggctcaagtgatcctcccacctcagcctctagagtagctgggacttacaggtgtgggccactatgccctgttaatgtatttttaataaaaacaacaacaaaacatttccctggtaattctgatgagcagtaaggtttgagagccaccttaaaacacctgacaaacgctcccaggataatgcacatgctaaataatcctcacgggagctgtgtattactggagtgagctaagagctcagactgtcaagctagaagacctgtgtttaagtcctgcctccaactacccgctagctgtacctctctgtgcctcagctttctccctctgtaaaatggggatgataatagtgccagcctcacagagcccttgtggagatgaaatacatcaaacacagtgcagggtgtcctgcacgtacgaatgctagacagccaagtacttgctctccgccaggcctgggctatgcactttttatccactttatctcatttaagcctcaagtaaacattataaatgccatttcacagccaatcaaactacagaagggataaattacctgtccagggaatacggtcagagagaccgacaaggctaaaagggtctgattccacaggccatagcccactctttttgttttttttttttctgagatggagtcttgctctgtcaccctggctggagtgcagtggcgtgatctcggctcactgcaacctccacctcctgggttcaagcaattctcctgcctcagcctcctgagtacctgggattacaggcgcgtgccaccacgcccagctaatttttgtatttttagtagagacggtttcaccacgctggccaggctggttttgaactcctaacctcaggtgatctgcccaccttggcctcccaaagtgctaggattacaggcacgagccatcgtgccyggatgcagcctactctttagaggcccagtttcacagatgttcaggaggttcatgagtccccccggacttaccagctccagtccaatgtaccttttttttttttttttgagatggagtcttgctcctttgcccaggctggagtgcagtggtgcaatcttggctcactgcaacctccacctcccgggttcaggagattctcctgcctcagcctcccgagtagctgggactacaggcacaagccatcacagccaactaatttttttatttttagtagagatgggttttcgccatgttggccatgtgggtctcgaactcctgacctcaggtgatccacctaccttggcctcccaaagtgctgggattacaggcatgagcccggcctacccatttaaaagatgtgagaccatcctggctaacacggtgaaaccccgtctctactaaaaatacaaaaaaaaaaaaaaaattagctgtgtgtggtggcacgtgcctgtagttccagctacttgggaggctgaggcaggagaatcgcttgaacctgggaagtggaggttgcagtgagctgaggtcgcaccactgcactccagcctgggtgacagagtgagtctccgtctcaaaaaaaaaagataataatagagatgtcctgggacccaggcattctcttctaccttggacactcacggcttcctttcatgagggcagggccatgggaagaaagctgaggactggggagcagcacactcggccctgatgcgcccccaccccattttgctcctagcctgctcctgcaaccagcaygcccgacgctgccggttcaactctgagctgttcagactgtcgggcggccggagtgggggtgtttgtgagcggtgccgccaccacacagctgggcggcactgccactactgccaacctgggttctggagggaccctagccagcctatcttcagccgcagggcctgcagaggtgagtgtggcctgcagacaggcctggggggagcagaggtagggctggactcctggggctgagggaggaggggctgggggcctggattcctggatctgagggaggaggggctgggggcctggactctgggcctgagggaggaggggctgggggcctggactcctgggtctgagggaagaggggctgggggcctggactccccaggctgagggaggaggcactgtggaattgggaggggcatctggggccctgataccccatgcccccagctcctctgctcatgtagcctgccagtgccaccctattggggcaacaggaggaacctgcaaccagaccagtgggcagtgcacctgcaagttaggggtcacaggcctgacctgcaaccgctgtggccctggctaccagcagagccgctcccccaggatgccctgccagcgtaagtcttgaggggccaggccacaagcctgagtagagcgggaaggagacatcccaggtctccagtgcacagctgcagtgagggctggggccttgggaattgggagcccaaggctggaggctggactctgggccctcggataagcagggactgaaattctggactcttgaggaaaaggaggcttggggcctgaaggcaagggatgcttgcactcttgagtcctaaaggaataaacacttaagagtttgggtgcctggattcccggggcaggggcgaggggatcctgggggaaatgactaagaggttaatttctcctttggtctcacaggaattccagaggcaacaaccacccttgccactactcctggtgcttatagctctggtaagacagtctggcacggaggtccctgagtggcaagtgggaatgaggatgggctgactgggtccccagatggggatacatgggtcacccattgagcccagtcccaaaggtttgggtaccccagctggccatcaagatggaayggagggatgggcaggggcagaaggctgtggtctaggccccaggagcccactgcagacagcctgaccctccccagaccctcagtgtcaaaactactgcaatatgtcggacaccagggtacacatgagccttcggaggtactgccagcaggaccatggtgagtgctggggagacagacagctgaaggctacacagctggttctgatgactgcttctaagccaccccctttctggccttccactttctcatcttaaatgggaaggagtgttggattccaaaccccttcctgatctagaaattgatggggcagaagacaaatggggaggggastgrggagggggcattcactaccttcctgtgtctcctctttccccatgttcttcggcttacagagtttcatcatctccttcagcctgacatctctgagggatggaagagataggggaactggttgagtggaatgaactcttgccctgtcctccctatctcagagaccctttctgcttcccttcatggtcccagatatttgagccttagccccacttcccataaagacttgtcccacggttccctaatccccagtccrcacctgctccatgaccttggggtctatgacctcaggctattcagctctcttaagacactcaggagttcggcccagccaacaaatctagaccaacgccagctatttctctcaatgtataggaccgcagacttctccctcaggaacctcatctggtcactagtgttctaggccttcacaggtggaaagattttccccaccttccacagggatctcctgccccgcagacccagctggctagtcagagtcccacccagcctctcagaaagtgcatttttctggccgggcgcggtggctcatgctaataatcccagcactttgtgggggccgaggtgggcggatcacttgaggtcaggagttcgagaccagcctggccaacatggtgaaactccatctctactaaaaatacaaaaattagccaggcgtggtggcaggatcctgtaaacccagctgaggcacaagaatcacttcaacctgggaggcagaggctgcagtgagttgagatcacaccactgcactccagactgggcaatagagtaagattccgtctcaaaaaaaaaatttatgtttttctgaatcactatcagtatgacctcagccctcacattccagggaccagtctcttccttcttctggtcctcgaaatttatcccagagcccctcccccggcaatgtgacccctccttcccaagaattccaccattgataccttctgactccactgcattagagaccctggacctgcctcttctgccctgtccccagccccacctactatagtttaactccttatctcaaagatgtttcctccagcaggctctacccctcacgatttagggtcaaactctccaaggttcaaggtttctctccccactgcgataccagaagcccacccaccggtctcgggctcctgcccactgtgactgaccccacgggacccagaggtaccctggaagctccccacgacctgggctgacatctcccctccccacagttctccgcgcgcaggtgctagcgtccgaggcggcgggcccggcatggcagcggctggccgtgcgcgtgctggccgtttacaagcagcgggcgcagcccgtgcgacgcggcgaccaggacgcctgggtgccccgcgccgacctgacctgcggctgcctgcgcctgcagccaggcaccgactacctgctgctgggcagcgccgtgggcgaccccgaccccacgcgcctcatcctcgaccgccacggcctcgcgctgccatggaggccgcgctgggcccggcccctgaagcggctgcagcaggaggagcgcgccggaggctgccgcggcgtgcgggcacccacacccagycccaggccggagcactagacgtgagatggggctgcctcgagcaccaacaaagtaatttgggagcgactaggagmtgagccttctacctcgacggtgcactgcagagagccaatcagacgtcgcagagccccgacgacactatgcttgcgcccacgccgagcaggcgtgcggaacttttagcaaaaggcggcaagcgggacttctggtcccarcatttcctcctttggcctgtggcttattccccgccagtgatctgtttcccccaataaagtctcaaatctttgggaatttttgtctacagacccctgatcgatgctggcacactctctagagggaagcgaacaaggccttgaatcaatacgcggagctgaagttaggaccacagcacaacgggaccctgacaaagtggccaatccaataagaacgctcttatgacgtcattgggtgctagtcagattggtgttgcctgacgataggccgaaggccaatgggcggggcttggttggaaaaggcgggaaatctcacaaagggagggacagcagttccagatttctagaaaattccagacgtaggaactgttggtttctgatgggcctcaggataggctctgagaaaggaattgagatactttgagtgactcatttttgaaagaatagccaatcggaagccacagagtggtatgacataacttggtgctaagcagaattgtattcccactcaacaattggcctgcacgccagaggggaggggcgcaaaaggcaggaagcggtaagtaccacggaatggaaggttgccacagcctgggaccttccttgccaccctgacccctgcccctgcacccacagcaaacaacataatctcaaatttgggtgatcttttcaggagagtcactgagggggtactcagggagtcttagaggaagggatgtgatttaaggtccatttgtttgtttctaactcttttttaaaaaaattattttatttatagttatatttacttacttatttttttgagatggagttttgctcttgttgcccaggctggagtgcaatggcatgatctcggctcactgcaacctccacctccccggttcaagcagttctcctgcctcagcctcccaaatagctgggactacaggtgcgtgccaccacgcctggctaattttgtatttttagtagagatggggtttcaccacattgctcaggctggtctcgaactcctgacctcaggtgatccgcccacctaggcctcccaaagtgctgggattacaggcataagccactgtgcccagccaaaattttttattttattttattttaattatttagttttttgagactgggtctcactctgttgcccaggctggagtgcagtggctctatggtagctcactgcagccttgacctactgggctcaagcaatcctcccacctcagcctctcaagtagccgggaccacaggcgcaggccaccatgcctggctaattttgttgttggtagagacgaggtctcgctatgttgcccaggctggtctcgaactcctgggctcaagtgatccttccaccttggcctgccaaagtggtgggtttataggcgtgagccaccgcgctgtcctgaggtccatttggacctggaacaaagtggccaatacaataagcacactcctatgatgtaactgggtgctagtcagatttgtgttgcctaataatttccttctctgagagaaagctgggcctctcagccaatggggagtcaggatatgccatgatgtcacaggataccaggtagggagaaaggtgccttccagcaaacgttctgggtttgctcttggttagatggaaaaaggcaagaaattgcctccagggagactatttgacccccatgccaccaataaaatgttacataatctgggagaacctgcccttagcctcccgatgaacccagggtggggtcatctctgaagtaggagtcttttaagggattttcttttcttttcttttttagtagagatggggtctcactatgatgcccaggctggtctcgaccccctgagctcaagcaatcctcctgcctcagcctcccaaagcgttgggattacaggcatgagcaactgcgaccagtcttaagggattttcttttcttttcttttctttcttttctttctttctttttttttttttttctgagatggagtctcactgtgtcacccaggctggagtgcagtggagtgatcttggctcactgcagtctccgcctcccaggttcaagcgattctcctgcctcagtctcctgagtagctgggatcacaggcacgagccaccatgctcggctaatttttgtatttttagtagagacgggtttccccatgttggccaggctggtctcgaactcctgacctcaggtgatccacccgcctcagcctcccaaagtgctgggattacaggcgtgagccgccgcgcccggccaaggaattttctaagaagggtcctctgttccagaaaaactatattccttatctttgttattttcatcctctcttgaagccaattcagttgggcattcactgcccccatactccaccttcatatccaatccatgagcaaatcctgtccacatccacaaaatatctcccataattcaaccatttttaccatctctgttgctaccacctttgtccaaaccaccatcactgctcgtccggattattacaatagtccccacactactctcatcactaccccctgaaagtcttcttcacatggaagccaggatgatcactttaaatcatgtcaggacagacatggtggctcatgccggtaaccccagcactttgggaagctgaggtgggaatcacttgaagccaggagttcaagaccagcaaacgtggtaacatagcaaaaccccatctctacaaaaaaaaaaaaaaaattagctggacatggtggtgcatacctgtagtcccagctacttgggaggctgaggcagaggattgcttgaatccaggagtcggaggctgcagtgagctatgatcgtggcaccgcactccaacctgggcaacagagtgagaccccatcgctaaaaataaactcttttttttcttctgcattttttaatgcagaaaaaaacaaaaaacaaaacacaaaaaataaactcttgaatggcttcccatcactctcaaaataaaacccaaagtccctgccctgccccacaaagccctgcatgatctacctccaccacatcaccgacctcacctcttataagtcttcctcattcacatcactgcagccacactggtcttcttcctattcctttaaaaacaaagcacacttgctgggcacggtggctcacgcctgtaatcccagcactttgggaggccgaggcgggcagatcatgaggtcaggagatcgagaccatcctggctaacacggtgaaaccctgtctctactaaaaatacaaaaaaattagctgggcgtggtgatgggcgcctgtagtcccagctactctggaggctgaggcaggagaatggcgtgaaccagggaggtggggcttgcagtgagctgagatcacaccactgcactccagcctgggcaatagagcaagactccgtctcaaaggaaaaaaaaaagcacactctgctccaggacctttgcacttgctgttctcttcctggaacacaccttttcatgttatggcaagccagtttccttacttcattgagaccttccattaggcagcttaggctagctctgttggctctatggagtttattgagttctggctgggtgtggtggctcatgcctgtaatctcagcactttaggaggctgaggctggtgatcacttgagcccaggtctagaccagcgtgggcaccatggtgatactccatctctacaaaaaatacaaaaattagctgggcattgtggtgtgtgcctgcctgtagtcctcatacttgggaggctgaggcaggagaattgtttgagtccaggaggtccagactgcagggaactatgattgggccacaatactccaaactggttgacagagcaagaccttgtctcaaaaaaaaaaaaaaaaaaaaagaagaagaagaaagaaagaaaagaaaaagaaaaagaaaacacaaagtttctttcttgttcatatacatgttccatgcaagttggcaaaggttggttttccacacagtcaaggacccaggctgagagatgttcaccaccttgtagcaccacccgtaacccagggcatccttgatcactgagacaaggaaagaggaaaagcactgaatggtcttatgcaagcaaaacagctttggtccaggaacgactcccggcccttccaatcacagctcattcatcgggattactcatgtggttccactcagttgtatgaaggtggggacgtagaattccctcacgtgctcagtaacagagaactgtcgaattcctttcctgttactgccataacaaattaccataaactcagcagctgaaacaacacaaatttatcatcttacacgctacagatcaaaagcctcacatgggtttcactgggctaaaatcaaggtgctaacgaggctgcattccatctggagcctctaagagagaatctgtttcctttctattcccagtttctagaggccacccacattgcctgattcatgacccctttttccatcttcacggccaaccacgacaggtcgagtccctttcacatttcagatttttcctgcctcttctatcctcacatctctttctgaccatggctgggaaaggttctctgcttttaaggactcctgtaattagacgaggggcacccggtctaccgccataccaccctgaatgaacccgatcttgtctgatctcagaagctaagcagggtcagaccctgttagttcttggatgggagatggggccacccagataatccagaataatctcttccccatctcaaggtctcttgtttgtttgtttgttttgagacattctcgctctgttgcccaggctggagtatagtggcatgatctcggctcactgcaacctccgctagacagaaaaaaacaaacaaaaagccaaaacaaacaaacaaaaaacagaaaaaaacaaaacaaaacaaaaacaaaaaaatccccccaaaattagccaggcccggtggtgcacacctgtaatcccagctactcgggaggctgaggcaggagaatcgcttggatcgaggaggtggaggttgcagtgagccgagatcatgccactgctctccagcttgggcaacacagcgagaccccatctcaaaaaaaaaaaaaacaaaaaacaaacaacaaaaccacaaatcccagccctgctgagccacatcgctcagttttctcatctataatatgaggatgataataaaataatagaaaataatctacagggtacgttttgaggattaaatgagttaatatatataatgggcttagaacagtgcctagtgcagactgacagctgtatgagtttattatttatttatttattttgagatagggtctcactctgtcttccaggcaggaatgcagtgacacaattgcagcccaatgcagcctcaacctcccaggctcaagggatcctcctgcctcagcctcccaagtagctaggactacaggcgcaagccaccaggctaggtttttttttgtttttatttttttttaaatagaggcaaggttttgctgttgcccaggctggctttgaactcctgagctcaagcaatcctcttgcctcagcctcccaaagtgctgggtaatcccatcaccaggcgtgagccactgctcagggccttgagtttgttattaatattatttaggctgggcgtggtctttcacgcctgtaatcccagcactttgggaggccaaggcaggcagatcacttgaggtcaggagttcgagaccatgctggccaacatggtgaaaccccgtctctactaaacacagaaaaaataggctgggcacggtggttcatgcctgtaatcctagcactttggagggccgaggtgggcagatcacctgaggtcaggagttcgagaccagcctcaccaacatggtgaaaccctgtctctactaaaaatacaaaaagtagctgggtgtggtggcgtgcgcctgtagtcccagctcctcgggaggctgagacaggagaattgcttgaacctgggaggtgggttgcagtgagctgagatcacaccactacactccagcctgggcgacagagcaagacttcttctcaacaacaaaaaaaaaaaaaaaaaaaaaaaaaaagaaagaaa

SEQ ID NO: 96183 - DNA, 43692 bp, Homo sapiens
cattatagcaaatgtgtgttgatgccacccaatgacaggcagttggcttaaagctgcagggaacacaaaaataaataaacctgtaccttttgtaaggatggaggcagccatgtgtaccaagcattacaataccctgcaaaggactctctcctctgtctgcttggagaactcctgaatgtagctcaaatatcaccttatactgcttccactttgctcccacagcactctgggcatacctctgagagggaaagaataatggggtgaaacacctgggtttccatctttccttgttccagactgcaagctgttgttttgttttgttttgttttttttctctgaaacgaggtctcactctgtcgcccaggctggaatgcagtggcgcgatcatggttctctgcagccttgacttcctgggctgaagtgatcctcccacctcaggctcctgagtaactgggactacaagtgtgccctaccacgcccagctaattttttttcttttttgtagaggcagggtctccctgtgttgtctaggctggtctcaaactcctgggctcaggccatcttcccacctcagctcccaaagtactgggattacaggcatgaaccactgcacctggccagactcacactttgttataagcagaggaagatgctcttctggtacctgtgcctgtgcttccaattcagtccatttacagacttaattttatatcattctcatcagaaatacttttttgcatcctagttttgagttgtatcattcttctgtgctgcggtatagttttcagtgattttcatttcttatttattaatttttgagacagggtccctctctgtcacccaggctggagtgtggaggcatgatcgctgctcactggagccccaacgtctcaaaaaacaaaagtatttacagaatgtagtagatgcaccagtattgattccttattatgtggcatttaggttgtttccacacttctgcttgcctgcttgcctgcctccctccctccctccctcccttccttccttccttccttctttcctcctttcgacagagtctcgctgtgtcccccagccggagtgcagtggcgtgatctcagctcactgcaacttctgcctcctgagttcaagcaattctcctgcctcagcctcccaagaagctgggattacaggcacgcaccaccacgcccggctaatttttgtatttttagtagagacggggtttcaccatgttgcctaggctagtcttgaactcctgagctcaggtgacccgcccgcctcagcctcccacggtgctagggttacaggtgtgagccaccgcgcctggccatgtttccacccctctgttctttttttttttttttttttttttttgagacggagtctcgctctgccccccaggctggagtgtaatggcaccatctcggctcactgcaggccccgcctcccgggttcacaccattctcctgcctcagcctcctgagtagctgggactacaggtgcctgccatcacgcccagctaattttttgttttttttttgttgttgttgtttttttagtagagacggggtttcaccgtattggccagggtggtctcgatctcctgaccttgtgatccgccagcctcggcctcccaaggtgctgggattacaggtgtgagccaccgcgcccggctacttctgttcttataaatgaaatttgctattttttataagactgggactggcacctctgccttctctgtgtggaatcactgggccagggagcatagactttcatgagtctcttggtgggccgtgccctgccgccttcccgaggcctgtgccagtgagcactgtcctgccagcattgcatagtattggcgtccatcaccttccagccggtgcctttcctagagtggagctggacatgactcctgagatcctcaggcccaagagttgggctaggggttttcgataaaactgcctggtttccagtactgagaatcaacttttttctcaatctggcaggaaaaatcgcagccctcagagagtcgctggctgaagtatctagaaaaggactcccaagaactggagctggaaggaacaggagtgtgtttcagcaaacagccttcatccaaaatggaggagccaggcccccgcttcagtcaagacctgcctagaaaaaggtaccaagtgcgtctccgttccagccctggcccagggcctctgctgcctccagcagtggggcaccagtgagccactgtgagcgtcagccaagcgcgggaagcctaggtggcaagtgccagcaggtgggaaatcgggcagctgctgccactgctggccccacagcccacctgggcattgggcactgctggtgcagaggcgaaggctgggcaggacacccgtgtgcacaccctttatgatgcccacttaattctgaacatctcagactgtactgaccccaggggagaggtcggagtagctggcaggcctaagagcttttagctcagagaagcagaggcctcagacttgaaggaagttttcttctgcttcaggcatttcagtgagatttttggagagactgctttaggttaaggatctagggaggctcttagagggcaggtgctttcaggaggtagattctgctttcaaaccagaaccttcatccgggtacagtggctcacacctgtaatcccagcactttgggaggctgaggcaggaggatcatttgatcctccagtccgggcaacatagggagaccctatctgtacaacagattttttaaaacaaattcatggggcatggtggtgcatgcctgtggtcccagctacttgggaggctgaggcaggaggatcacctgagcccaggaggtcaaggcggcagtgagccattgcactccagcctgggtgccggtgagaccctgactgaaataaaaacaaaactttctagcacctagaagctgtgaagcaggggagtggggcctgggcggtggctggacaccctgagcagctgcctgggaagccgtaggaacaagcaggtggccacccgagcctgtgggccatgtgatcgtggagtcaggctcggggtgccactggagagtagcacgggactactgacggtcctgtcctgacaggaagtggagcgggagcaccgtccagcctccgtgcagccgtggcgtgcaggactcgggtggctctgaggtcgcctggggaccccagaaggtcagtgacaaacagtttctctctggtcccagtgaccactgagcgtgtgtgtgataattctgtcttttgtcacagttgacgaagtgtgtgattcctacccgcagaaagcccatcttcccacccgggtttcttgtcttttctgtctgaagccaactccttcctcgggtctgtacccccttttccctcccatgcctctcgtctcccatgagggtaactcaggaccaaagagcattgtgacccttggagaaactgaggttggccagcaggtcaacctgacgatgggtcagggccatcgtctcattctgcgtggagcacggggacctttgtccgggcaggagtcgtcagcgggccgccctgaatcctgggagatgcttccctccacactcgcatttgccctgctgtgtggactcttgtatgtgaggcactcttcacttagggtgttgtcttgttcttttttgttttctgagacagggtctcactctgtctacccaggctggagtgcagtggcacagtcatagcctactgaagcctcaacctcccaggctcaagtgatcctcctgcctcagccgccaagtagctgggaccacagatgcacaccaccacactggctaatctttaaaaaatattttgtagaggccaggcgcagtggctcacacctgtaatctcagcactttgggaggccgaggtgggtggatcacttgaggtcaggagtctgagaccagcctggccaacatggtgaaaccccatctctactaaaaataattagctgggcgtggttgtgcacgcctataatcccagccactcgagaggctgaggcaggagaattgcttgaacctgagaggcataggttgcagtgagctgagattgcatcactgcgctccagcctgggcaacagaaaaaaaaaaattttttagagacatggtctcactatgttgcccaggcttgtctcaaactcctgagctcaagcaatcttcccacttcccaaagtgctgggactataggtgtgggccactgcgcctggcccatttgtcttgttcttgaagcttccagtccagcaggccccaccgcatatccagtgctgcagagtgcagggtttgctctgcctgtcagaggagccagggcacagcaagggcactgcagttgggagtccactgggcgtcagtcactgcccccacccccacatcagccaaggtcggtctccgctggccttgcaccacgcacagagcactggctcatgccaagaagcagaattcaaactttgatgttgccgccaactagttttgtgatcctgggtaagtaagtggctttgaatctccaaatcctagaagaatgaccagagagtctgccacgggccagtccctgggctgcatgttgtaatggtatcattgtgtttcatgctccctcaagcctgttgctttgttttaaaggtgaggaactgaggcttgcagtttttgtgcagtcatggcaagttcagtggcaaagccaacgtcaagtttcagggccgcagagcctcttctgtactgcctgggtggcagtgctgcagggacccactctatcgctgctttcacattgcttttccctttgtaagcagcacaacccaactgttttttttttttttttttttgagtaggagtttcactcttgttcccctggctggagtgtaatggcacgatcttggctcactgcaacctccgcctcccaggttcaagcgattctcctgcctcagcctcctgagtagctgggattacaggcacccgccaccacgcctggctaatttttgtatttttagtagagacagggcttccccatgttggccaggctggtcttgaactcctgacctcaagtgatccacccgcctcggcctcccaaagtactgggattacaggcatgagccactgcacccagccttttgtttttgagatggggtgtcactctgtcacctaggctggagtgcaatggtacaatcacacctcatagcagcctccatctcccgggcttaagtgatcctcccgagcagctgggatcacaggcactcaccaccacagttggctaattttttgtagaagagggggtttcaccatgttgcccaaactggtgtcaaactcctgggctcaagcaatctgcctgcctcagcctcccaaagtgctgggattcaggcatgagccactgctcccagcctacaacccaactttcttttttttgagacagagttcgctctgttgcctaggctggagtggaatggcgtgatttcggctcactgcaacctctgcctcccaggttcaagtgattctcctgcctcagcctcccgagtagctgagattacaggcgcgtgccaccacgccaggttaatttttgtatttttagtagtgatagggtttcgccatgttggccaggttgatctcgaactcctggcctcaggtgatctacctgccttggcctcccaaagtgctgggattacaggcgtgagccactgcgcccggccgacacccaactttcagagcatctttggttcctggggtgagagaagccagaccccagcaccagtcctatcccacagggagctcggtgctgccacctctgcagctgcagaacccggcaggctctggagagctgccccccggtgggaggtagcagaatggagccagcgcacccctttcccgatgtctcgaggcccttctgctcaaaattcttttgtaggcaccggtaacctgattctaaggtccccaggagatggatcacctgatgacatgagaatgtcttgtttttggaaagcctggtcatgcaatttagcagaaggtttgcggtgaggtggaaggcatttatttgctttgtcttgctaaccctcaaaatcaaagcctgtcccagcctgacagcttccagcagaaagtgtcagaaccagaggcccagccaaggcccaggcagggcaggcggtcctcctgggccctggcattgttcttacamatggagggcatggccatcttctctttcagggacaggctggcctgacatggaaggtgaaacaaggcagcagcccctgcctccaggagaactctgcagactgcagtgccggggagctgaggggtcctgggaaggagctatggagtcccatccagcaggttacagccacatcctctaaatgggcgcratttgtcctgccacctagaaaaagttcacatgtggayagtgagcagccaaggtctcttcagaggraccccaggccagctggtccagcacaggctaagcaagggacccccagagcacaggcctcaagagaaggcctcagcaggcccactgccgctgtccagcttcctcgggccacacaccccgtcacatctgggtctgagaggccttgcgggaagacctcatgggacgcaaggactccctgggcagagggtgggcccctggtcctggaggcacagaatcctcgacccacacgactatgtgacctctttataactggggaagacttcgatgatgatgtgtgatctgggactggyaggttattaatcgagatacacttgttaggagggacagggttcccctaaggcacttttaaagatactctgtaagaaccattaacaataaacttactgtcaatcatttctctctatgcaaacrtcattggttaaartgctgatgccatttaattrgattgtttacaaatttaacaggatggctacaaagagatcttattttaaaagcagctgatggtttggaaatgaragaactacagtggtgaagrgmccaggaggcagctctcagtgaaaccaacattgcggrtgcccttcgtgagccttctcagtcccagcaggaagcccacaacactggcctccccagcctgcctgctgacaacacctaggcttactttatctaaaatcagagtgtaccaggtctgtagcagaaaataatcaactaaatgtcagggacctatgagtcatttaaaacaaaagagaaagtgaaagccattaggcaagctatgtgctgggctgctaacgtagcccctgcagggaggggtcaggagcgcgctgcagtgagccttgggtctcgcaggcccagccctgctgcaaggagccagggcacccaggaaacatcagcacacacacacacagggaccctcccttcatgtcacttgttttgctgccctaaatggcttcttgcaccctaacccctgatcctggaagaaggcagagaaactggccygtacagagacctgcaattctacgcaagcttaacacaactatgagacagaagaggggcacgcagaagaggtgggcaaaagtggtcacaacggcgggggatgctttgaatactggatggtgtccagagccgctccgatgtcatagttcttggtctgcaggagcctggtgagccagccgccttcatcagagaagcccatggacagcatctgggagagggactcaatcagccgcrggtcagcctctgccgaaacagtaaggaagccatgaggagtggtgctgagccctgtgagtgacccgaaacacataccctgctgccttggccagccaggaccagggtctgccagtgtccgagcctgcccagagctctcgtcctcacaggccacagtggacctgctttccctgtaaagggccaagcagtctttttcacactgctcaactctgccactgcgacaccaggcagccaggtggtgtgtaagcagaaccatcaatggacactgaaataggcatttcacctgtcacatcttttgattttaaaatgtaagaacaggccagttagccaattattacactcctccatgcaagagatgatggggcattgaaatagattgaagatggagagagatgaatggatacaagatacattttggaggtagaatgaacaggacttggaaatgtatgtggagaaggcaaaggagttaaagatgatatctggagcagcacaactcacaattgcaaagatgtggaaccaacctaactgcccatcaagcaatgagtggataaagaaaatgtggtatatatacaccatggaatactactcagccacaaaaaggaacgaaataataccttttgcagcaacttggacggagctggaggccattatcctaagtaaagtaattcaggaatggataccaaatatcatatgttctcacttatgagtagatgcyaagctatgatgatgcaaagacataagaatgatatagctttccctctccctctttctccacggtctccctctgatgccgagccaaagctggactgtactgctgccatctcggctcactgcaacctccctgcctgattctcttgcctcagcctgccgagtgcctgcgattgcaggtgcgcgccgccacgactgactggttttcgtgtttttttggtggagacggggtttcgctgtgttggcygggctggtctccagctcctaaccacgagtgatccgccagcctcggcctcccgaggtgccgggattgcagacggagtctggttcactcagtgctcaatggtgcccaggctggagtgcagtggcgtgatctcggctcgctacaacctccacctcccagcygcctgccttagcctcccaaagtgccgagattgcagcctctgccyggccgccaccccgtctgggaagtgaggagcgtctctgcctggccgcccatcgtctggratgtgaggagcccctctgcctggctgcccagtctggaaagtgaggagcgtctctgcccggccacccatcgtctgagatgtggggagcgcctctgccccgccgccctgtctgggatgtgaggagcrcctctgcctggccgygaccccatccgggaggtgaggagcgtctctgcccggccgccccgtctgagaagtgaggagaccctccgcccggcagccaccccgtccgggatgtgaggggcgcctctgcccggccgcccctactgggaagtgaggagcccctctgcccggccaccaccccgtctgggaggtgtacccaacagctcattgagaacgggccatgatgacaatggcggctttgtggaatagaaagcggggaaaggtggggaaaagattgagaaatcggatggttgccgtgtctgtgtggaaagaagtagacatgggagacttttcattttgttctgtactaagaaaaattcttatcctgttgatctgtgaccttacccccaaccccgtgctctctgaaacatgtgctgtgtccactcagggttmaatggattaagggyggtgcaagatgtgctttgttaaacagatgcttgaaggcagcattctcattaagagtcatcaccactccctaatctyaagtacccagggacacaaacgctgcggaaggccgcagggtcctctgcctaggaaaaccagagaccyttgttcacwtgtttatctgctgaccttccctccactattgtcctatgaccctgccaaatccccctctgcgagaaacacccaagaatgatcaataaaaataaataaataaataaayaaaaataagaactactcttggcccataggccatagctcgccatcccctgycctaaggcagagaagacacacagcggcggcccacagcaggttgtgcacacggaccttggtttacacacggctgccatgtgacaatgaggagtttstgtcagstgtccccaccccccacccccccactgctgcctgccacaccatccacttcaacggtggcttctgcctggctcctacagggatcttggctatgaccccccccccccyctcagaccagcactccctgaggcggcacttgagtgtgagtagtagggacacacccagtgctgccccctctctgtgtcacacctgccttaattcctggtctgcatgttaagttttagaaactcctacaaytaatattcctggctctggagtttgcytaaagaaaaacattttcagaactgcattagcagagcttactcgctattgctcagggtacacataataggacaaaaccaactcctaacctcccacacctacagacakccctgcagtggagaacatctcatccttctgtttgtgtcgctgaaatcagaggagggcaggatgctctaaagggaaaggtaggaatatgtacaaaacctcttggttcacttgcctggcgggagatgtgggtacaaggcagcttccttcagccctgtgggtccctcctgggaggggtccagagagcttggcccttcggattctggcatctgtagggactggagttcacctgtagacgggtccacttcttttgaagacagatgggtccagtcatcatctcctcctgaacagttatccgactccatctgttcctggaacaaaactcaccatgagcacacaggagacacgcgcaacaggccaagcctgaccrtggccctggctcctggcaracagtcggggagcaygcatgcacacgtgcasttaaggctgcaggggtctagggggaacagtggccactcacaaagaccaagtaactacaaagttctagcaggttcccagcgtgactttaatggcacagacatcactgcagcagcagcagctccctcgggtttgtaagtggggctgcasaggtgctgaggatgaggcggaggtgcaggccacagatcactaggctggcygtggtcccaggtggcgggaggggcacaggcttgcctcagggcgcccctyrgactccaaggcgatcttyctcatctgctccgccagagactgcgtggcrccctcaacattcccacccggcttgctgggrtcagagcagcagctgcttggctgtgagctgctcttctcctctgtgctggaactstctggagagacgggggtcaggcggcttcttttccctccgtgctccacatcgatatcaacttcaatgcctagaggcggaggaggaaagagyaagccgtgaagttcccccaaggatgcacctgcaagcaggagcttggcctgtggagactacagactcacgaagatctcaacrttcagtccccacaagcagctaagtgtctggatggtggcactcagcgtgtggatgcaggtgctaggttctacccagctcgaccccgsaatcacacagccagtatgggaccagacgatacaaacccatgagtcagaggcttctccccatatcccagctacaaatctctgtggcttctggaaacattcttggtgggcccatgatactggacctttctctttctccaattcagtaaaacattaacctcagctagcatctaaagtcagcttctgagccagaaagtcraaagagacctttttcctaaccatgcaggacacgggccacacggcaggtggggccaggccctaagtacagggagagccaataccacatgtggcaggcgcttccagccacagtgatggaaggccatgtgcctcctgacacctgcacacagaggctttgtgcgacgacacacacgcacacctcaacgccggagctctgctctgggaggtggatgggccgtgcaggcgctgcgtagggcccaacgctggccccacagggaacctgcacacctccaggctcacgtgactcaccagggacagaggggagaatcacctgcactatttttgaaattaaatgtgtcaaaagtctccacacccacagcttagagtcaccagttgccaaaggctgtggtgcacactccctgcccccatcccactccccaaactctccctgtgccctttcagctcacgctgctcttgcctgctgctggagttcacatctgcgcacttcctactctggaccagtacctgcctctccttccactaccctttccaagacgcaattttttgttaaaagaacattcagtaggccgagcgcagtggctcacgcctgtaatcccagcactttgggaggccgaggygggcggatcacgagatcaggagatcgagactaccctggctaatatggtgaaaccccgtctctactaaaaatacaaaaaatcagctgggcgtggtggcaatcgcctgtagtctcagttactcgggaggcygaggcagaagaatcgcttgaacctgggaggcggaggttgcagtgagccaagttggcgccactgcactccagcctggtgacagagcaagactccatctcaaaaaaaaaaaaagaacattcaatgtttcagctaggacctctatctaaatgttctttgctgggtcaagtagcagactatttctttgtatcgctttttgttttcctaccactgataatggcttctcttttcctttgttttgtagacagagtctcgctctgttgcccaggctggagcgcagtgccgcaatctctcggctcactgcagcctctgcccaccaggttcaagtgattctcctgcctcagcctcccgagtagctgggactataggcacgtgccaccatgcccagctaatttttatatttttagtagagacggggtttcaccatgttggccaggctggtcttgaactcctgacctcaggtgatctgcctgccttggcctcccaaagtgcttggattacaggcatgagccactgcacccagcctgccttctctttgcatttgctaactttccctatgttctcccacagcatctccatagttttctacaagggtgaagtggatcagagaccccactggttctggtgttttccatagagagtgccgcttgctgtgcagcctcctgttccagccaggactggcagctctctgggcagaggctgcgctgtgatgctgtgaccccctttacgttcaccctctgtcctgttaggtcccccgtttcctaatacctctgtgcttcattttgggtttctctcttcatgtggttcaaaccaaggttaaaataattaagactgtataccagaaagtaactttgttctgccctgatacttgatcgttttagctgggtatagaattctaggctggaccaggcacagtgactcatgcatgtaatcctaacactttgggagaacaacatgagaaatctcttgagcccaggagttcaaaatcggcctgggcagcatggcaagaccccatctctacaaaaaaattttaaaatagctgggcacggggctgggcacagtggctcatgcctgtaatcccagcactttgggagacgaaggcaggtagatcatgaggtcaggagttcaagaccagcctggccaagatggtgaaaccccatctctactaaaaatataaaaattagccaggcatggtggcgggtgcctgtaatcccagctactcgggaggctgaggcagaaaattgcttgaacccaggaggtggaaactgcagtgagctgagatcacgccgctgcactccagcctgggcgacagcgagactctgactcgggggtggggaaagaaaaagaaaaaaaaaaatatctaggcacagtggcacatgcctgtagtcccagctactggggaggctgaagcagaaggatcacttgagcccacgagatgaagacaactgtaccactgctctccagcccagatgacagtgagacccggtttcaaaaacaaaagaattctaggccgaaaagcctttttaactgatttctggagtcatcagttgttccattgtctcctagctgttcatgtttgtttgctctttgtattcccaagtatttacaataacctagagttttagaagcccctctttctttatcctcagggttctgacacttgacaatgataagctttgctgtggggtctttctcagtcattgtcagggccgctttcaatctagaagataatgkcctcattgccaagaaactatcttgcatttttgtttgttttttgttttgttttgttttgttttgtttgagacaaggtctgtttctgtctcccaggatggagtgcagtggtacaatccaggctcgttgcaccctctgccttccaggctcaagccatccccaacctcagcctcccacgtagctggggccataagtacacaactccatgcctggctaattttcatagtgtttgtagacacgggaagtgggggatggtgtctccctatgttgccaaggctggtctcaaactcgtgagctcaagtcatctgcctgccttggtctcccaaagtgttgggattacaggcatgagccaccatgcctggtgccaagaaactatcttgcattctatgttcatttcctcctttcagttttctattctttctggaattcctactcatcctatattgggcttctagacttgttcctacattagtttttttatctttcctctcctcctatctctattttgcttttggaatatctccttgagacaatagtagaatctaagccttcttttgaagttttttttctattttttaattttaagaactttcttattctgttccctttgttatcctttttctagtatcctgttcctttttcatgcagacaatgctcttttgtatctcactgaggacattaacattctcttccctttaagaccttttctcccatgtgtgggggctttcctcagatggctggtgacccaggggtctgatcccactgaagcactaaggttgacaggaagccttctgtggggccagcgccatcactaactttccctctgcagggtgcctgggggtctggcaggcaggagctgtaggacacttctctgggggcattcaacctccctcagcagggactccccacctcctgcctggccagggaactgactgctgggcccwttgctcattcgggatgcccagtttcaggctggtgcctcaccctggcctgtctctagtatcccatgctgaagcttccctgggtcaggtgctcctggaattaaacatgaggtctccttcaattgttggcaagagccatcatctggccaagtgggccctgaagtctctagctgacactccctagaggttttcaaccctccccccttgttcctgtcccccgatcactcccacctcttgcctttcctggtacctgaacagatggtcttscttctcaccaggatgccctgttctggcacagagatttctgaagcttccctcagcaggttgccaccctccctccatgtccatcttccaaaatctgatcacatctttgtcttttcctctattactttctttgtctatggtgttttcttttttgtgtaagccctttcctgttatttcaatagagtttaaggggggagcagaggtaaaagcaggcttaactacaagtacctccatctgtaatatttaaattatttttctcctttattcttcccaacttgtgattatgaaaaggttgaagctgccgggtacagtggctcacgcctgtaatcccagcattttgggaggccaaggcgggcagatcacctgaggtcgggagttcgagaccagcctgaccaacacagagaaacctcgtctctactaaaaatacaaaattagccaggcgtgatggtgcatgcctgtaatcccagctactgggaaaggctgaggcaggagaatcgcttgaacccgggaggcagaggttgtagtgagccaagatcacaccrttgcactccagcctggacaacaagagcaaaagtctgtctcaaaaaaaaaaaaaaaaaaaaagataagaaaaaaaaaaggttgaaacaaacagaaaagttgaaaagttgaaagaatagtacaatcaatacccatatgctttgtaaatgggtaatgagactcgcctgtaagcagatcagagaaattatagaattaggatctctccaacttggtgatgaaagcgtgagattttcaggccttgtcgtaagactggacaggctactttgtctacggagtagccattcttgtattcctttactttcttaagaaatgtgctttcacttaaaaaaaagactagacgatgctccgtgccctgctgcctcacaaagcctctgcgtgtcggtttatcaaagatcccacgaccaggaggggccctgtggcttcggggcctgtagcctcccagccaggagcagcctgggtctcagttgtggctccctcagcaggttctcagccccccaaccaaaaggccttggcacttcacatgaaagctgccgcttaccctacacacactgccaccgggaggcagctgttgactcgttcgttccccyttgggccctgctctgggaacagtcccttctaggcagttaacctgtgagtcatccagcttatagttcctcataaagaaagaaactagccctaacttccacaacagtctaagccgctcctccactggctctcctcagctgaaaccactcagtctattttactgaaatattccttgtttgtagagcttcaggctcctccctagttcggagaaagcaattctatccactttaagcctttagcttttagtgctcaaagacatctgagggccgggtgcagtggctcacgcctgtaatcccagcacttggggaggctgaggcgggtggatcacgaggtcaggatatcgagaccatcctggccaacaaggtgaaaccccgtctctactaaaaatacaaaaaactagccgggcgtggtggtgggcgcctgtggtcccagctactcgggaggctgagacaggagaatggcgtgaacccaggagccaagatcgtgccactgcactccagcctgggcgacagagcgagactccgtctcagaaaaaaaaagacatctgagcatctgcaagattattcctgtctgtgccaagtggggcgtccagttcagttccgagatgctgcaccagcacaggtgggtcttgagacagtgtgaccccaagcacctgggcagcctcccagacaaatcccaggccccaccaacactcactcaccaggatcaaaaaaggtaaggtctggggatctgcactgttttaaaagtctctacctgaacctagacttggttttgtgacttcccgggatgtctcctttgttctttgagtgaaggactcttgttcatatctccaaattcaccggcaatctctcagacctttactacgtccagagtgagtggcaggatttaggcacagccgatctctcaatcatgacctcggtgytccactgtttaccctccttggaaagcattaagaatactgattcttggccgrgctcggtggctcacacctgtaatcccagcactttgggaggccgaggcaggtgtcgagatcagcctggccaacacagtgaaaccccgtctctactaaaaatacaaaaaatagctaggcgttrtggtgggcacctataatcccagctacttgggaggctgaggcaggagaatygcttgaacctggaaggcagaggttgcagtgagccgagatcacaccactgcactccagcctaggcgacaagggtgaaagtctgtctcaaagaaaaaaaaaaaaaaacagactagcgattcttctttcctattctctgacttcrcctctaaactctagtacagaagccatgcgtgtttgggctgtttagttcagaagcaatgccaagatrtcactgccgcctcaaagtggaatgagcaaggccaggcgcagtggttcacacctgtaatcccagcactttgggaggccaagacgggtggatcacctgaggtcagaagttcaagaccagcctggccaacgtggcgaaaccccgtctctactaaaaaaatacaaaacttagctgggcgtggtggcgggtacctgtaatcccacttacccaggaggctgaagcaggagaatcacttgaacccaggagggggaggttgcagtgagcagagatggcaccactgcactccagcctccgtgacagagcaagactccatctcaaaaaaaaaaaaaaatcggaatgagcaaagttggagcagatggcagtcacgccctgtagccacaggaggcagcaggcatggttcggacgcccctcctagcagcattctttcagacactgaacacaacctttggacaggctgggtggacacagcctgccactgcagtcacaaaaacaagctcactcgtctagcgagagatgcaggtgtcccagcgatccatctgccatcacagatccaccgtcatcttgaactagaagttggcttcattcactgattctcactgccgcatgcctaaccctgcagcacccacccgagacccttagccagacgcaacaggcactttctaaagcccagcagggaggggtctcagagcctgagctcatgcctggggtcaggtggcaccttcacccaccccacagacccactgtgcaacctgaggcaccagaaccgggtgtcacccagagcacctgcctccaccttctccccgctctgaggcaggcccagcactcagaagcaccagaaaggtttgggggttgtaaactaaaagaaggaaaagataaatagcatgtcaactaactactacccaggtcctcaaaagtccaaatcccaaggcctggcttaggggaaattgcagactattgttcayccaaaggagggcagtcagaggtgacaggcaagacctgcaaccacagtctggtcaccctccctcactgggattatcccaaccaaatgccagctgattckacttcactccatgtagaaagctcgagaattttgtcagggaattcaaccttgagttgcccgtggtccagcactactaaargttgatttgaggcaacaaatcctcaccagtgtcaagggcatgtcaattacccattcctttgcagtattccaggtgaaagttacataaagtgcaggctgagttagggaagcactgggcaaggaggtgcactcacccagagggctaagggcagctgccacactctccccaacgttcttcaggaaattcacactcggatcctccgatggaccagaagctttgatttttacaaagataagataaagatatctttaatgccttggatacctgtcacagtcctgtcacctycttgccaaggtccctgtgttccygggtgacctttaacccggacatcttgtccagtgacccactcagcatccccctctccttcctcccactctgcaccccctggccctgcacagagagcatctccactctcccgtgccatctccccctcatctgtgaccctggtgctcagcaaccccacagaggctcaggctcagtacactgtgaatattgatcacctccttgagtaaatatgttatttactcaaagtcaagcaaacatccccatctttgtcccaaagggtgaggtgattcacaggacacagtaacattaataaaatcagaatccaaaaatctagactacaaagctaacggtaagtctttcacttataactatgtttcaaaggacttcagcaactttggctctgatcttcctgacaaccatcacaaaagagaacaaagtgcatcaaagacccctgggctggaagggcctccctgcctgcacctcagggtaccttgagagggcagcctcctgaggtaggaagggctgtgcaggtaaatttgtggcctcaggcacttaggcacctcagtttccccatttgggaaatggagagaatacaccccactttgcagggttcttgtgtgattgtagggcaccagraaggtggggggtatcctgaattcttgccttgcacacacgctttgcacaagggccctgcacacaggctgcctgactactgtcaccaatcagaagcaggttccaacacaagcctcacctgattctgccgtggggccagggcgggcctcccctgcacgaggaggacgtgggctccagtttcctggtggacccatttcccatcctggccacccraagtgtccgtgtttcaccttccggagccagcggctgtgcgagaagccctgggggaggaattagcagagcrgcaggcagtgagcgggtcaaggttcctgccaccctgagcccaccccaggcstgcacagagggcstgctcacctcagacaggtgcccgaaggggctggggaatgcgagcttggtgtgcccccggtgcaarccctttccctcgcagacgctacacaagtcgtagtctgggcagacgctgcacttgtagcgggttcctaccacaggcccattgcagccatcgcagatcacattggggtgcaccatgttgcggggcgcctcctgagcacacggtgggcggtggtcccgccggcactcttttttctctacaggaagggtaaagagagccgctagggtgggaccccctaaagtcctccccctctgtcgtcactgtggggctgtcactgccagcaaggcccccggccctgctctccagcatggaatccacacaaaattcagccacttaggtgagggcagcagagccaccaagaacctgctaggaggttcccagtccctgtgtctgtttggcccaggcagcagagcagcagcaaggagccctgtctgcacagctttggccttgcccttcacccaagcgccacggcaccagaccccatccctaacccaagcaccacggcaccagaccccatccctagagtgaacatggactcctctttctcaggtcaggcacagcacttaaaatgtcctttttttttttttttttttttttttttgtcgcctaggctggagtacagtcatgtgayttcggctcatggcaacctccgctctccaggtttaagtgattctcgtctcagcctcctgagtagctgggactagaagcatgtaccaccacacccggctaatttttgtatttttagtagcgacaaggtttcaccatgttggccaggctgttcttaaactcctgacctcaggtgacctgcccgcctcggcctcccaaagtgctggaattacaggcgtgagccacacctggcctatgtctctgtcttaaacagccctcaaattgctgaccccttcattggtggaacatcgagccctgttttttactcagcagggaactgagtacaarctgagctggcttcaggcagcccccagagcagccccttacctttaatgtagattcggaagatgtcatccttcacgtaggacatggccattgtcaattcctcgtcactggaaaaggcaaccaagtccccgtcctcatctagattgtttaaaagacagcacgtgagcacccaggggttctcagctggacatawgctgctggaatgggctgaggcaagtatgaaagggacactcacagggctataaacaaacacacctacttgagccacrgagggcaggagtgagaggcaagactacccccttgctctggcacctcctggaaggtgagtgctccgacctgggccctggaccacagccacatgcagggggcggagggcctgtgcacaggggcagcagctttggctgctgcacttatttagccttgggccagctgccttttcagaaacgtgccacctcattccccatccgaccaggcccatgtccgtcttcaactgtgggagatccctgcctgtgacctgctcctgaggggcccagccccacaaaggccttagacttctagtggcttgggagtaaaggagaagacaagggcatctgcctgcttccttccctaacaaagctgaaagacacgtatttgtatgtagtctccatttgtgacagatacatrtgagctgaaatggctttaaagcacagctgtgcagaccaaaccacgccatccaccgagggcacaggtgaggcacccaaagatgcaaacaacccaaatgtctgtcaactaakgaacaggtaaacaaaacatggcctgtccacacaacagaatattattcctccaaaaaaaactagttctgatatgtgccacaacactgaacacattacactaagtgaaagaaaccacttgcaagactacattgtctgattctatttacatgaaatgtccaggattgcaagatgaatagatacagaaaggaggttgctgggggcatgtggataagagggtgataaawggtatgtatggcgtttataaggtgakgaaaagctctcacactgaatatggtccacaaacctatgaaaatagtgaaaaccactgacttgtacactaaatgggtgaacccttatttcagttacagctcaataacatcacaatttttttttttttaagaataggagagggcctggtatgctggcagcgctccagagggaggtcctagcactgcaccctcccaggggccggccttggccacctcccgccctcctggccacaaccacctccctaaccccacccccagcagccactggtcacaccagcgcagcaggaaacagggcttctgkgccaacaccaacacttctgaagaacgttctcgtccacttgccaatgggaaaacatctgtactcgacctggctcggagcgttccgccggcgatccgtgcccttctcccaggcgctgtcgcggcgctcgcgagtcccccgcacccccgcgcttgtttacccgcgtcactccctcccctcgccggcgctcgcccggctcctccagggcattatctgaacccaccacctggcgcagcaaggtgtcagtgtaacccgagtgcccgcctgaccacccagtgcccgcggagagccagagcgttcgccccggcgcgtccttgccaaaatccccaacagcgcggggggtggagcggggcgtctgacgcccccaggctcgagcccccggccggcagggctccaccgccccagggggccgacgctgagcagcgggtcccggccttggtcaccactccagtcaccaggccggctcccatggccgaactggggacccatgcaggccaccgccatccagggagcagccagygcagaccccctcacggcccgccaggcgtcgccgagaagggagggggcagccaccccgcggcaggaggccgtgtccggcctgcgtcaccgcccccgccgctccccggcccgctcaccgcggtagtgcgcctggaagccgccaggccgcagcgcggggaacagggcggccacccggctcagcagccgctcgcagggtcccggacccgccgcagcctcggcttccgcctcaggctcggggctgcagcagaagctgaagcggcgaatctcgcgcgccgcgtcctccttgcccagaaggtaggccttcacggtgagcgacgccatagcgagcggcgagctggcggaaaacgggccgtcccggtcgcagccgccgcgcggcttttgtagcgaacgcggaggccccgccccgcctcgagaggggcggagtctctcgcgccctccccgcccccgccaccgtcgtcgcggcgcgagagccgccctgcagaggccccttcactactctccccttccccgytacccctcgctccaggtctcccggccccctcattgctgacccctctcttcattgccccggtgcaccaaggaccccaggaaaccggccctggcactcatacaggcctgggctccagcctctgcacctgggatcagggtactggcgggggtccagcccctcgcccctcccaggcttgggcctggccatgactcagcaatatcctcagttgggggtacccagtgcagggagagggggacacagcccccatatcaggaggctgctaggtcgcccagtgggcactgctggccagaacaagctggctctcaggttgctgttccgaccctgccatggtcagcctgccgcggtggcagccctcttacagcgcatggcatcctcggtgatgggcagcgcatagcatactcggtgacggaccccgactctggcctgagcaccagagaagttcccagtttagtaggagtggagttgagaggtgctggaggaccagctaaggtctcctgagtgtcagtggtcgccaagtgttcactgtggtccaagtgactccttatgggctcctcaattcagcaggtaatgcccatggccctgtgggggctcaggcccgttggccttgtgggcagccaagggggtcagccaacagcctcctcagctaggaaggaagaaacactgctttatgccaccagagtaacctgtccgccagaactggggcaaggagaggggcaggacgagtggtcaccctctggagcctcccaggcaaggtcctgtgagtaggaggtcagaacctgctgggtccaactcatgccatttcagcccagggcttgcaggagctggagaaacctcccaggggaggaaacccagagggaggcaagagtggctggatggggccagtcaggtgcgaaggtgatgtgtgggtgtgcgcacagcaggggctggtccacaggtgtgaatgatccttcccggagggctccgaagtgggcaaggcttccaccctgcccagagcagccctgtggagagggttcaggcctctccctgcatccggcggtggagagtggaaaatgccccagggcctgctggagccactgccttgcagacaggggcaggggacacagaggggcgtgctggcagaggctgtggcctacagacaggtgctggccaagcgtgactcagcagcccaggcgcctgagagccacgtggcccccgccgagggccggctttcctgccccagcccccggctatggcccggtctgagcagggtgagggacacaaggaaggcctgtggctctgggaacatagctttgaggaagcgctcaaggcgccccactcacccccaagaaggarctcctttgctttctcgccatttggcccgtttgggatcgcgggaagtttccgcgggggctaggggcatgtgaagagactgggggggggcggggaggggagaaggaagcacagaagagggagtctttgggaagctggggtggacacccggctctggcccttccccgcacgccttgcggccccagcggccgccctgcccccacgcgaggccgaggcctcccggaggtaaacaaggcgcggcgggaaccccctggcagggccctctcctcccgccgcggaggtcaggtggtctggccggcagtgagtcagcgtcccatgaccgctgtcgtaatagggggatccccggcccctgctgccacccatctcagtgacctcttacctggaggctgggctggggagtggctccggggtcaccgtgagtcccctgagcaggaagagcgtgcagcggctggagccaracagacactctcccccttctcgcctctgactccttcccctttcccgatgcagtcccaccccgcaggctccccgcgtccactggccccttcccaccctccagggcccggcgtgcatgcccagggaaggctcggcacctgagccgcgagacccactatggaccagcctctcatttcctcatctttcaaatggggctgaagtggaaggatttsggctgccctcccaggcgatgccccgtgggtgtgcgagttgtttagctgcttttggggctgtaagctggggggtcagggcaggacagagactgcaggggggctgaggtggaagagtggggagggcaggagaggcctgagccaagcgcccagtggtcccaggagaccagccggggcagccacaggggtggtctggttctgtctgttgctgcccagcatgttgtaaccacctcctcagttcccccttcccccctcccaaataatcctatgccttggcagtggtgttcccaggttcgcttcttttctttggggcgtggagtcaagtgtccgcgtgggtgctggggcagccagagacaaggccactgagggattcaggccgcactgctctgggccatctttagggagattgacaatcacagggracacaggggatgagttcctctacagaggtcctggtctgtgcgggggcctccaggccttctgcgctgcagccactcccttccactcacatgggagggccacagccctcccttgccrtcttcctaatcatgccagctcattctacctggtgacttttccctggctctccctctggtccaaaaccctttccactcctgccctacatggcaacttcccaccctaaatgtctcctcctcagcggggccttccttgaccactccctaggaaaaatccccaggcactggacatcacttttttttttttttttttttttttttttgagacagtctctctctgtcacccaggctgaagtgcagkggcacgatctcagctcactgcaacctctgcctcccaggttcaagcaattctcctgctcctgcctcagcctcccaagtagctgggactacaggtgcctgccaccaagccttgctaatttttgtatttttagtagagatgggtttcactatgttggccaggatggtcttgaactcctgacttcaggkgatccgcccacctcggcctcccaaagtgctgggactgcaggcgtgagccacccgcccggccaggcatcacccccttttagccctttcagacaagcccaaagcccaggcaagaggcacgggggccatgggaggggcacgcccacaaggggtttgcaaagatctttctaaaagaaaaggagttcaagtcatggacagacatggttagagaattcagtgatgccaagttgtcaggcctgagagccccagggaccctctcctactggaaggccagagctgcagaaagaggtcccctgggctgggcgaatttctccaaataaattcaaacatggcctgcctcgggacgggggcgagaccctgggccctcaggggcactgaggggtcgtccatgccgggggacatggccacttgggggcggccctcgtcaaccgcggagtggggaaaaggggggagggatggaggacgaacgcccggcggtgtctaaaggcacgacgcggagcaggaaccacagccctggtccccagaaagcgcgcgcggcccggggcagaacctgccgaagttccagctcggggcgcaagggatgtgggggtcactggaagacggggcgcgggccgcccgtggggaggagactggacccgaacccggcccaccccacccgagyggcgacgccagcgctgaccccaggcgtgtcccggcccccggcgcggctccggcccaaccgtgcacgcccgcggaaggcctcgcacccgcgtcagaagtggcctgcccggggccaccggcccgcaagtccccggtgttctcgaggtccctgccccgtcccgcgcggctgtagccggcgggaggggctgagaggcgggtcgcgctgggacctaaggcgccgccccctcgccagcctctccctccctccgtcacmgggtggccggagacccgggggcactgctggggtaccccaaagcatagggccagcctgagtgcgcaaggtcctgaaaagacggggrggcggcgacaaggagtagggaggggggctggaggaagacggcaaagtgaccccggaagggtccaggcgccccaagcccatcgaagacgggaggctctcagtggcgcctggggggactgtgggaaaagcagctcaagaaggggaatctggagcgaggtgggggagaggtcggcatggccttctctaggagcgccagcgccagacagagcggtgacaggccgcaccgggagtaccccgtctatactgaacgggtcaggagtgtgggatcccgtggaggggctgcccttgcagcaggagcgatggccctctcgctcccctccacctgctgccatcgaaaaccttctggaagaggccaggcgcggtggctcacacctgtagtcccagcactgggaggccgaggtgggcggatcacgaggtcaggagttcgagaccagcctggccaacagagtgaaaccccatctgtactaaaaattaaaaaaattagttgggcgtggcggcaggtgcctgtagtcccagctagtcgggaggctgaggcaagagaattgcttgagcctcggaggcggaggttgcagtgagctgacatggcgccactgcactccaatcttggtgcctcaacaaaacaaaacaaaacaaagaaaaccttctggaagaattatcctcctttgaggatctaacccttcttgctcccaatgcttcccagcagggcccgcaccccaggacgggtacttaccgcagtcccccacctccagctctgcacactcgcagcccagtgcccgctcttccccctcagcctccygacgagactcagctcttcgacctccctgcgagtccctgtgcacccactttgttctgtgcctgtccctgccctgactatgtgggctcaggtagttttgtggggtgtgtggatgttgcgtgggagtgtatgtgtgccccgtgtgtcccatgtgttataaccctgatgctctggagcagaaggcgtggggtcatctgtggataaaggctggtattgaagcagggtcccccacctgtgttaggccaccacatactcttgcgtaaaagtagggtgaggtaaaccccatggccaaagcttggccaaccagagcactgtagcaccctggtcagggatggacatgtgacccacgctggcggacgaaatgcacactggggtcatctggaagcaggagccttggggaggggggaatcctgagcagatcmaagcttgatctcagtatctgacccctggatccaggctggcctaatgctgggttataaaacsgcttaagccagttgattgtggttttcgtcaattgtatccaagagtagtgacccatgacgtataccccatgcctgctccaggttttcttttctttttttttttcgagacagagtcttgctctgttgcccaggctggggtacagtggcttgatctctgctcactgcaacctccacctctcggattcaagcaattcttgtgcctcagcctcccaagtagctgggattacaggcgcccaccaccatatctggctaatttttgtatttttagtagagacggggtttcaccatgttggccaggctggtcttgaactcttggcctcaagtgatccacccacctcagcctcccaaagtactgggattacaggcgtgagccaccacacccgacctgctctagggttcctgatggcagtgatggtcacaatacaggccagaaacagtcacaatacaagccagaaacctgggagtcagctatgaccatatgctccccctcaagccaccagcagttcctgttgattgtactttctggcaatagcaacagtaataatacacacgtagcacatcttttatgctaggaaacattctaaatattttaatttttagagacaaggtctcactttggtccccagtctggagtgccgtggtatgatcatggatcacggcaaccatgatcttcttgggctcaagcgatcctcccgcctcggcctcctaaagtgctgggattagaggcgtgagccacctcacccagcttgaatatttttctgcatttaactcacctgttcccttgaggtgagaccatgtgattaattctggccaaggacctgagccagaagagccatatatcacctatacgccaagcatttatttatttgccagtgctaaagcttctagagctctctttctctttgccaagaaagcctttgatttccacatggttatgcctgtagccagggcaggaactacaatgagcagagaccccaggggacccttgaagggtrtacagctttgagtatacttttattagatcagagaaatttggggttgttagagcagcataatccagcctatcctgactgattatccccacaggcatagaagggactaagttgctgttaaccgacggaagcagaattgtgaacccagaagggccattccctaggacatcttgacctcagtgatgtacawtctccaaagactgtcctgaatctatctacttctcctaactccattccctacccctctgaccctccattccagactttctcctggatggttatgtcagggaggaaaagcttttcctctgccctcttagattcagcatctggggcctgcaaattaaactgacaaaagacaaattagcaagagaaacggagttgtatagctttctgttttttgtttgagatggagtcagtattgcacaggctggtcaggaactcttatggtcagaggatcctcccacctctgcctctcaagtacctgggactacaggctcacgccaccaccccgatagacatttttattcgtgtactaggaggttagaattgagagctcgtaaaccaacaaaaggttgggggaaagggcacttggggaaaacaaaggacttctaggaaagakaatatgctagttttgtgacagtgtctgtttgcctgtggtgccatgtctggggatgagtcccttgtgctcccagggagggggcttatctctgtttcctcttattctctccagcccctttccatgcctgcccaaaaggttatattttattttatttwgagaaaaggtctcactctgtggcccaggctgaagtgcagtggyaattagagctcactgtaacccaggagtcaagtgatcctcccgcctcaccccctgagsagctaggactacaggtacatgccaacatgcctggcttttattattgttttttttttaatttctcacagagaggagggtctcgctgtgttaaccacgctggtctgaagctcctggctttgtgtggcaaatgctcattttaaaatacaaatacaaccycagcctccactcctcttcttgttttagactttatgcacagcttcaaaggtcaaaacccaaattcaattcccaacactgtgtactaggtcctgcaagctgtgctctgccctgcccaggtctgccccagggccagctttcctggtactcatgaaccacctcccgctacccaggcggcccctacaggcacggttaattttcccattacaagttgtcagagtcccatggactctgataaggtggctgtggatgggactatagtaagacagtgaggaggtcaatgtcagtgcacatgtgtttgtatcattagtgacatgtgtgtttggtacatggtgaatatacagaacatttgctatgaatgaaacacccagctgccaggtgaggtgaggctttagggcagggcttccaaacttttactgtgccagggacacccttggcatctgcagaagatgaaggacccctggttagaaacatgcttttttctttttcttttcttttttttttggggggggggggaccatgttttgaatgcattacattaccaaaaaaattaatattgaaatgcaaaagtcaaaatataaaaacacggccatttgctcttttcctagactagctatggctgggcctggtcaagctttgggaggctgaggctgtggagttccaaccctcaaccttggaagagctgtcttggaggcaggcaggtccagagccccacgtgccatgggacctaaaccgagagcaagcctgggcctgggcactggagaacttccctgtgctgagccgccactcctgccaatgccatcagctctacgggagcactgctgcgagctggctgctgcactgcacctctactgggcacggagcccttcccggatatgagaggggccaaaaatggcctcgacacttccatgtccagaagtcaatggctgaaaccatagacgggctccagtcacctcaagaagacgcagatgctaccgatggtgaggtccaaagcggcctgaagcagcctggagatgccagcgcctgcggaggtggaagtacacacgcccagggcgccttctgcagtccaggcggcctccggaagctgctgaaaacctaggattccatcaggaaggaaccgctgaaaacctaggattccatcaggaaggaacccgaaaaggagaggaaccccagcctttctgcaggcctgcagtacgacccgcttcaactgctgccctggaaggagcccgaggcacccagtgggggccctcatgccgtgcctgcggacatttgcactggaactgtgccctgcatgcataacagccttgaggtctgtgcggtggagatcattccttaatctgttctttctctcctgagcgtcctaaacatttttcatttagaaaaactttcttcatggaggggtgggcgcggtggctcacgcctgtaatcccagcactttgggaggccraggcgggcggatcaygargtcaggagatcgagaccatcctggctaacacggtgaaaccccgtctctactaaaaatacaaaaaatcagccgggcgtggtggcgggcgcctgtagtcccagctactcaggaggctgaggcaggagaatggtgtgaacccgggaggtggagcttgcagtgagccgagatggcgccactgcactccagcctgggcgacagagaaccgccgttcgcccatccgtccagaagtaaggaaaaggccatggagaccaagggggtggggtcacggtttcccctcccctccccctcagaagtccgaagataaataggcttagaaagagaggaaaaaaatttcttggtttgcatctcactcaccctttctcaagccccatgttgcacgccaaactgttgtaggactttctccttagttcagctaaaagccaggttcttgtgcagcggccatgagagattaatctcgcagacactttgaagagtgagaaaaatggaatttattgggcaagaaggaaaaaaagggaaacagggactctcagcaaagcgagagagagtcccgctagctggtttctcgcctcccagatagaatcccaagttccaccccgaacatgagaccaagctcctcccccctgcatagctcctccccctgcatagctcctccccctgcatgctcctccccctgcatagctcctccccctgcatagctcctccccctgcaaagctcctcccccctgcagagcttctgtggctctacccagttcttccagtgcttaggcaggtgtgggagtttctcctggacctctttttttttttgagacggagtctcgctctgtcgcccaggctggagtgcagtggtgcgatctcggctcactgaaagctccgcctcacaggttgaagctattctcctgcctcagcctcccgagtagctgggactacaggtgcccgccaccactcccggctaatttttagtagagacggggtttcaccgtgttagctaagatggyctcggtctcctgacctcgtgatccgcccgtctcggcctcccaaagcgggacccctttagacttggctgtctcacttggattacaggcgtaggccacagtgcccaactgagtcactttttttttttccttaaaaaaattgttggccygcagacacatgaaaaaatgctcagcatcactggccatcagagaaatgcaaatcaaaaccacattgagatagcatctcacaccagttagaatgccaatcattaaaaacccaggaaacaacaggtgctggagaggatgtggagaaataggaatgcttttacactgttggtgggactgtaaactagttcaaccattgtggaagtcagtgtagcgattcctcagggatctagaactagaaatgccatttgacccagcaatcccattactgggtatatacccaaaggattataaatcatgctgctataaagacacatgcacacgtatgtttattgcggcactattcacaatagcaaagacttggaaccaacccaaatgtccatcaatgatagactggattaagaaaatgtggcacatatacaccatggaatactatgcagccataaaaaagaatgagttcatgtcctttgtagggacacggatgaagctggaaaccattctgagcaaactatcacaaggacagaaaaccaaacaccgcatgttctcactcataggtgggaattgaacaatgagaacacttggacacagggtggggaacgtcacacactggggcctgtcgtggggtgggggaagaggggagggatagcattaggagatatatctaatgtaaatgatgagttaatgggtgcagcataccaaccgggcacatgtatacatatgtaacaaacctgcaaattgtgcacatgtaccctagaacttaaagtaaaataaaaaattaaaaaataaaaatttaaatttaaattaaaaaaaaattgttggcccggtgcgttggctcacgcctgtaatcccagcactctgaggggccaaagtgagcagatcacctgaggtcaggagttggagaccagcctggacaacatggtgaaaccccatctctactaaaaatacaaaaattaggctgggcgccgccggtggctcacacctgtaatcccagcactttgggaggctgaggcaggtggatcacctgaggtcaggagttcgaaaccagcctgaccaacatggtgaaaccccatctctactaaaaatataaaaattagccgggtgtggtagcacacgcctgtaatctcagctactcaggtggctgaggcaggagaatcgcttgaacccgggaagcggaggttgcagtgagcccagatcactcaactgcactccagcctgggccagggagcaagactccgtttcaaaaaaaaaaaaaaaaaaaaaaaagggccaggcgcagtggctcatgcctgtaatcccagcactttgggaggctgaagcaggtggatcacgaggtcaggagtttgagaccagcctgaccaacatggtgacaccctatctctactaaaaatacaaaaaaattagccgggcttggtgccgtgcacctgtaatcccagctactcaggaggatgaggcagcagaattgcttgtatccaggaggtggaagttgcagtaagccgagattctgccatcgcactccagcctgggcgacatagcgagactctgtctcaaaaaaaaaaaaaaaaaaaaaaaaaaaaattagccaggcgtggtggcgggcgcctataatcccagctactcgggaggctgaggcaggagaatcgcttgaacctgggaggctgaggttgcagtgagccgagatggtgccactgcactccaacctgggcgacagaccgagactccgtyttaaaaaaaaaaaaaaaaaaaaaggccggggtggtgactcacgcctgtaatcccagcattttgggaggccgaggcaggtagatcacgaggtcaggagatcgagaccatcctggctaacacggtgaaaccccgtctctaataaaaatacaaaaaatcagccgagcgtggtggtgggtgcctgtagtcccagctactcgggaggctgaggcaggagaatggggtgaaggtgggaggcggagcttgcagtgagcccagatagtgccactgcactccagcctgggcgacagagcaagactccgtctcaaaaaaaaaaataagataaactaaaaataaataaataaataaataaaattacaaaaaaatccaaaaaaatttgttttaaaatttttaatgagatgaggtgtcactatgttgcccaggctggtcttgaactgatgagctcaaatgatcctcctgccttagcctctcagagtgctgggattacaggcatgagccaccacacccggctaattttttgtattttttagtagagacggggtttcaccgtgttagccaggatggtctcgatctcctgacctcgtgattcgcctgcctcggcctcacaaagtgctgggattacaggcatgagccaccgcgcccggcctctgggtgactaagttttaacattaagtaactcattaacaatttctaaggccctttatgtcacaacctaagtgaaaagccattatcctttgccacaaatagaagacacctgtgaaaacacgacagtttcctctagaaggctcctataagtcccagtctctagttcggaaagttccaggagcactgagtggggagccctctcctttaacagggggcctcaggatccagcccacttcaacctctggctcggccacccccttcttggcatcaatctctctgtccagacccctcgaagctcccgattccactcagccccaggtgtgggccggggctgaactaggaagacaaagccgcattcaatctcagtctgagtccagcccctcgggcctcccccgggcgggtggggcagaggtccctgcagcctccaccaggaaccgggcccctaggtctgggaggtccaagccggcagcgggccaggcgctgcccaaagcctgcccagaggcggcgctgggccagtccctttataatttgcgcccttcctggttccacagaggattgaggaacgcctgaaattagaacgcaaatgggccgtgcgtggtggctcacgcctgtaatcccagcactttgtgaggccgaggcgggcggatcacaaggtcaggagttcgagaccagcctggccaatacggtgaaacctcgtgtctactaaaaatacaaaaattagccaggtgtggtggcggccgcctgtagtcccagctactcgggaggctggggcaggggaatcgcttgaacccgggaggcggagggtgcagtgagccgagattgcgccactgcactgcagcctgggcaacagagcgagactccgtctcaaaaacaaacaaacaaaaaacaacaaaaaacaacaacaacaaaaaaacaatgaaggcgtgggcccccatcaatatcgggctgggctgggcggggcgaggtggcccctacaccaccgggggcagggcccgttgctcccgttagcggcgckctcgggccgcccctgccccgggaagccggtacggttctgggctggtcactgctctgcatccacgagcatcggccctgataccgcctagaaaggcccatcgttcccgcctcccgggcccctgcgcgcctccgtccagaggcccagaggaagctcctgagcggggaagcgccctgggcggcagcgaaggcagcggtcgctcccggcttcaaccgcccagtcccccgcgccacccagagcccctcacgcccgggaaagagccccgagaacgtgcgaatggggtcggggtccgcgcgcggaggagatgttgctgagaagggtaccggggtcccggagcgccgcccccgccgcccgccccccgccccggctgcggtcgacctgcactcccactccagccttacctgaggccgactcgcacgagcccacgcggggctgcgggagccgatcgggatcccggccgccggcccccaccccaccccctcgcggcgccggcgacggcggtgctgcggcccctttaaatccgggccgccccgccctgcgccgtcgactccgcggcggccccagatccaggccccagatccaggccgggccgcggctctcgccgcccagcccagcccagcccggcccggcccggccctgccgcggaggcgaggccgccagtgtcccgcgcccctgatatctgcagtgagcctgatacctgcctctgcccttctgagcctgttcctcttccctgagtacagggcacaaagcttgcgccctgaggggcggccggcgcgctccctggcccggtccccgcccggccccgggccccccgcccctccccgacccggggccggggcccctgccgccgccgccgccgccttccgacccctgcgccccggccccggtcccccgggccatgcagcctcggccccgcgggcgcccgccgcgcacccgaggagatgaggctccgcaatggcaccttcctgacgctgctgctcttctgcctgtgcgccttcctctcgctgtcctggtacgcggcactcagcggccagaaaggtgagcgcgacccccgcccggcccgcacctggcgcacctgggcgtcggcggcgggagcgggcccggcggtggccgcggaaggcggccggaagccgacgcaggcgccccttccccgcccgggcggcgcgaggacgcccctcccaccctcccccacttgtttgctgctggagccgcggcgttctcctcgggcccgggccgcgcccgtgggtgctccggaccggactccgcgggcgcagctgtcccgacgctgagctggggacccgtggggttctcggagaggggcagagacccaaggtcacagaggtcccggaacgccagccacagccacctgggcaggagctggggcggcgtgagggacacaggcgcgagggcacccccccaccctgctgcctgctgccccgcgccggcctgggcgaccccggcgtgacacccggtcctgggactcccttcggcgcccagaacgcgtcggcagcatccggcctgtgggagggagggagggagggagggaggcgtcctgaggcagcccggcccctgctgccctgcgctcccgtgcggccccagcccgtcctccgcaccccgagcttcccgggctggcccccgccctccgcgtgcgcccagcgctcttgcaggcggagggtgcgggccgatccccccgcgccgccccgctggccggtcttggcgatggtggggccgagtagggcctgagccctcggaggcgctcttcccccggcctggaggttccgggagagtggcctcctgcctgcctgcctgctggaggcctaagcgggctgagtccagctgcccctcggcctccccgccacctgcttccctgtttccctgtcccggagcgccatcccagagaggctgcggaggagggcgagggaacctggacccttccggaccctccgagctccatctacccacgccgagctctgccagcacgcccgcctgccgcacttgttctgccagagcagaggcctgggctggccttggggctccagggccagagaggcatcacccagggactctgcggggagcctgcctgacacgggagggatggctgggcagaggccgtgctggcggggtatattatcaagggcaggcatggctggggcagaattctctgtaggtagggtgtgtcacctggggaaggacattctgggtccttggcagggtgactataaaagcacactggcatgaaggcctaggtggggccatatctgaagggctggggcatgctctttgagtcgtgggtagagccgtgagcccttgccctttgtcctgagccagtgtgtgcctcccgcagcagccacatgcccgcggattgatgtcaggagccacctctgcaagcctggcttaccacagggagccaggctccaggacagcagagtgagggagaggcactggctccatggcacccactgtgtctggggggcatccaggaggctggctctctgagggcctggggaacaggagagcaaagaaggggagcacttagattcacgagcccagcccctaggggatagaagcctaaggatcctgtgaggtatgagtatggggtgacataggcctcccttgtcgaggggctgtcactgtttctgtggtgacccagtagtaccaggtctttggaggcctcaagagaagctgggaatctgggctcttatgtgaacccatctcgttgtcacatgtagaaaatctgtcttaaacccctggtgaaaccagacgtagccagtcggaggccagattggaacctggcctccactttgcagccagcgggggtccaggaacttgagggaaggacccaggaagtggaatctgcagggaaggaaggaggtgggcagggaaccagagaggaagggcagcaggtgtgggcatcatcctggaaacgcaaggtcaagcccaggacggcctcttagaccaacgcaaaatggaccctggagaagggtttggggcccaatttcctatctagcccgtgcagcagctctgccagcgctcaaactgtggccctcggtcaagcacctgctgaggatctgcccagggaggcagacccttgggggcagcccggggtctcagccatgcagcgctcccagccttcaggctgtccgcctccccaggcctggacttcagcaatgatggacacccttactcctaggaggttgcagggtctggagaggaggcagacacctgccacacacatgcatggtgacagcagaccgttaacgggcctgatatctgcctatgcccctctgagcctgtcccttttccctgagtacaaggcacaaaggttgtgccccagcttggctctttaatctttccccaaccaagagggaagcagggggaactgtggtttgtgggccccaggatgtcctaatgactcgcctccaggggagggtgacacagcctccaggcctcattgctgctgctcttaacaacgtggtcctgaggcaagaaagtgtggcaggggctcccaggctggtccctctcctcacctgagctgcctccccagctcccgagggttatagggtgccagcatggcttggcagagccctggcatagggcctggcccatggggaggcagtcacagagttggacccacagtcagagaagctgagggcaaggcgggtggaggagctggcaggcgggggaggctgcccagggccagggcctgcagtgtgtagggaaatgacagaagggttggtgtgggcgggagcccgtggggccctttatctcctggtaaacaggacccgggggagaggggaggcccctaggaaggaagcgagggtaaggcgcaggctgttgccagggtgattcaggcagcatcacccaccactgcccacccagcctgtccatctgaggcagtcgtgtgggacagagaaagccagggtggggctcgggggtgggggtgggcagtggctgtaagtaggcaagcggggactggcatctaggcaggagggaggcgcacctgcaggtgcaggtggctctgaacccattcctgatggctctctaggcctctgcacctccagtcccatccctgtgggcgagtgctgcctacacctggtgtcacccagcaatgggtgagccctggggatagccagctctgcattcaaggggttaggtttccagggtaaccgagcccctgagcccagcgtggagcctggcagagccagtaatctgactcccctttccctcccgccaggggctgtccagaggctccgctttgcctcagcctttagccccagagaggcagggtgtggagggtgggggctggcttcttgggtaagagatgcctcagggaagatctacctggctccctgctccttaaacctttccctcctgcccaggtccaccccttcctcttccctggtcacttggcacttcgacctcctgcccgtttcggaaaggggtgtgccctgaggtgactgaactttgcctgatcatgaccttgatcatgcacagggctgctggtggggtgaggccatcccacgcaactctggggtctgtgaagccaccaaggatcaaggaatggaagagctgcctgagtgtagagggagttcggtcaggcttcttaaacttggagacttggaaacagaaggccttgtaggccacataggttttcagagactcgcctggcagaggcctggagcgtcctgctgcgtggactgtgggcaccgagccaccaggaggttgttgatctcattcttgctcactggtccctgccagactggtggtgcctctctactgtcgggcagccccacctctgtgctgccccatccacctacagccctcatgcctgggcccagctggaggttctgacaggggccccctggggtggcatgcggacccttcagggtgccccaggcgcagcacaggtctccagagacacaggcaccagggcgttcagagctagtcccctcgctgctgttgactgtccttgagcagccccagggccggtttctcaacctcatttgctcacctgagcaatgaagtgaggtgggctcctggaactgcagcagccaccccccggggccatcgtgaggctaagaatccagtgcagggtgagcaaccagcgaccgctacaaggacagtgaagagctagcaccaggaccttgggtagcccacccgctggagggagcgtgtgctgcaaaaagcaagagtgggctttggaggccaacggatggagcggattcagtctgaggctgttccagcccttgcttaggatccacctacctaggtctggaaatcgtatttccacttcagatgccttctcagaggataaaataacccccggtgggggagagtactggaagagggctaattcccctggttttctccccatgagcattagtgtcagtgtaattttagagtgaccccagctatgtcacgtgtggcaggcacaagaacagatgtcaatgagctattgcagaggtggacacccagatgtgtgcgctggcacactggaggggcccgtagggtggctctagaccgccccctcgtgacggcttgcctaccacctgcaggcgacgttgtggacgtttaccagcgggagttcctggcgctgcgcgatcggttgcacgcagctgagcaggagagcctcaagcgctccaaggagctcaacctggtgctggacgagatcaagagggccgtgtcagaaaggcaggcgctgcgagacggagacggcaatcgcacctggggccgcctaacaggtgaggtctggggcgggagggggaaaaggcgggggcgggctggttgtaggttccctggtctcagtcccgatccttcccgacccacccagaggacccccgattgaagccgtggaacggctcacaccggcacgtgctgcacctgcccaccgtcttccatcacctgccacacctgctggccaaggagagcagtctgcagcccgcggtgcgcgtgggccagggccgcaccggaggtatgggcgcagacagggaggagcacggggtggggggacgggtggcccccgcaccctttccagcgtcgggcctccgtcccccatagtgtcggtggtgatgggcatcccgagcgtgcggcgcgaggtgcactcgtacctgactgacactctgcactcgctcatctccgagctgagcccgcaggagaaggaggactcggtcatcgtggtgctgatcgccgaggcgagtgagccgggacgcggggttgggggacattcagaggagcccccgcggtgcagaactgacagcaggaaccattccgaggagaaagctgtcggaagttcagttgctagtttcattcgcaaatgctccgagatagaaagttgaaagggctttctggcaccctctacccctacccatcgcccccgccaccccctagtccttggccatgcgagtcccaaagggaaagggccgtctctgggggcccccttactccgccctcagcacagcaggctcactccctccacgtggggggcatctgaagcctgtgccccttctccaagcccttccaggccttttggggcagcagcagggctaagggagggtgcttggtctccccacagactgactcacagtacacttcggcagtgacagagaacatcaaggccttgtgagtactggcgaccccagagagctggtggcgggagagctcggtgcggggtgttgtgctggcaggttcctgcctccccatgagatagtgcctttcctatctcgtggggaggcagggacctggtgggggaggggtgggtgtgcagaagtggcccagcccctctggagctctgctacctcagttggctgggtgtagggggtggtggggggctggcactgggtgagcctcaagaaagggccacagtctggtgggctcggcccctctcagcccctggaggctgcatacggactaggccttcccgtcccccaggttccccacggagatccattctgggctcctggaggtcatctcaccctccccccacttctaccctgacttctcccgcctccgagagtcctttggggaccccaaggagagagtcaggtactagttactcccccataccctcagcaacccgcctgcctgtgctgagaacccatctactggtgtttgagtccagggtgtttccctgcagtgccctgaatt

SEQ ID NO: 96184 - DNA, 22481 bp, Homo sapiens
gcttgagttctgcatacctttcctcctctggcctccctgtgtccactgggactctggctgagcacaggcagaggcatgggcaggggtgagtgacattgctgtggcagacaccgtggaaagaagaggtcaagagggaactgtgtgaagccctcattcagagaatggcacaggaaaatctcagggactcagttacctatggtggttttaattctaggacacacctaatcccagtgtcaactcaggagctagccccttctgactcggactgcaaaatcaattttcagccctgaaagaaacttcctcaagtccgggcctctgggaagccccttagactgtatgttttcaataaacaaaaaccctcggccattcttcttttctctcctcggctgctgaggaggaatcctgtattgtgagacactaagagaggggagggaaagagggttcgcctagccatgaaagcatcttcacagcctgactcacaggtgggtcacaagcctggcgggtgatgtagtatagagaatggagaagcacaatcagagggataccaggcttctggggatccgtctgcgagtgaactgagggaagagagtgagatccacaggagactagaaaaggcgcactggctgggtgggaacgaggcagcaaagataggagtgaaaggaacaatgggaggaagagagacatagagggagtgtgtatatatgtggattcaagataatgtctgggtctacaactgtatttcgaggctccagattcacacctcttcctctctgcttctttagttccccaggttaggtgctttgcacacatccctgcctcatccaagagctgtccttcatttcccccaaggacagggctgctgtcttcccctagcgaccttgatgtagaggtacaccctgacggagactgtgaaatggccccacccccaccctctgttccttctctgggagtcacctgggtggtggtcctgcccctgctttgccgcctcagtcactctgagtctcggccccgccccgccgcccccgccttcagcactagggacagcgaccagagctgaggtctggaccccccgcccccttcagcgtccctatttttcctggtagtctgtcaagctgaactaggcaggtgctaaggagcgggtgtggggatgggagatggcggagctcggcttctccctcagactggccccgatacttagaatataatttcctagatctccagcaagcaggactggaggaggcaggggtcccaaactctggtagttcctttggtccggatggggtcccgggttcctgaaagaggaaatccaggtctctggagatcccctgatgtctgcttgccccttctggtgcccccagcctgtccaggcacggaggacctccggcaggggatacccgcccaggaattcccaggctagactggtgcaagtgactctcccgccccaccaagggaccccgggctggaaatgaagtgaccgtggagggtggggcgggccgggtcccggtgtcgctgcccgcgagggtgggattgatgtaccctgccctccccgccaagcccccaataccggaagtcgctgtaggggtggatgatccaggcccccgctgacttcacccgctcctgctcgatttccactgctttgtggctgccgaacacccgaagggagaacttgttgaccgtaggctggagcagcgtcccaaggtgcctcctcttaggctcaggcccagatttggggatcggacctgaggccgcggtcgcaggcgggggagcaacgggaggcaccgcctccagtccaggggtcgccccttcgctggcccccgccgccggccgctgctctgcctccatggcgcccaccccgcttacacgctcggcctcctagagccctctgtggccatcaggtacccgcaacccctccagagcaggagtcggcgcagccccgcgggctctagcggaggcgtcgtaggctcggaatcgccggcgcgcggggcggagggggtgtgtgctagactggcgggcggcgggcgggctgcgcggcgccccctggcgagggccgcgccaagaccgggcggggctgggacgccgggatcctggaggaactccgagaggggcgtggcttagcaaagaaggcggggagcgcagcctgagccagggagagggcgtggcctagcgttggcctttcatccactgagaaccagggaggaggagccccctgcagtggcgggaaaatcggacgcgggtttgtagcttgaaggacttgggagggagagggattggggaccaatggaagaagtggaaatggcttttgggattcttctccactctcgcccagggacttctgtcctgctcccgtcttctctcaacactgtcctaggcatattcttgtcttttggtctcctccgaactgcttcccctagtatttaatttcctaattcattctgtcagccttcaccaagtgcaactctgcctgtcattgagtggatgctgaggaaacaaaaatgaatacaaaagtcctagtcttagcatctccatgtagtaatggaaaacaacacaaaacaaaacaaaaacaaaggcctagccataaagccactgctcatctgtgcccaacgacagacaggtaaattgcagtgctatgcgaagtgctacaaattcctaaatatctcaaattctccccttcatctccaattcttattaccactgcctcatttcaagccctcagcattttttcacttaaattacttcggaaacctctaaaagagtcttcaacctcttccaggccaattcttcttccattccctgccagttaccttcctaaaatccaactatggctgtgtcacttgcttgaagcccatcaagctttcccatcttctacaggggtacatttaagctgcttagcatggtgtaccaggcccaaaaaatttggacctagtttcaacagtctctcttctgacagtccctctcttgaaagccacagccccaatcatgctgaaagactttgtgctgccttgtctctatgcttttgcaaatattttctctgcctggtattctcctccaattcactttcgaacagttggttcagatcttgctttctctaggaaacctaggaacacatttccaactctcctttcctcaggtagggtctattctagagcttttttacagcagccagggcaccactgttttgagcaactcatgtcacagggctaccattattattattattttagagatgaggtcacactatgttgcccaggctggttttgaactcagagctcaagtgatcttcctgccttggcttcccaaagtgctaggattacaggcatgagcatggtctcattatttatttacagattttctctcctgttagattgtgaaactctgagaaacaggaaccttgcacctggcataattctggacacatagtggacattcagtaaatgcttgttgaatgaattaataatctaggaaaatgttccaggaggtggaagtgaaatctttacttctctctccccgactccttcattgattgctctccatgttctattccagggaacttctctaaactatgtctggttatctgatctaacctccatctgaccatccttcatccagctcctctctaatatttcctgactttatttatttactcattctagagtcagggtcttgctctgttgctcaagctggagtgcagtggtgtgatcatgacccactgcagcctcaaagcaatcttcccacctcagtttcctgagtagctgggactacaggtgtgagccaccttgctcagctccctgactttaatatcgttattctcagattatattatttctctttcaattgacctttctgaccacttctcaattccttctgtaaagtctctaactctttctctttctcattttctttttttcttttcttttcttttttttttttttttttttttgagatagagtctcactctgtcgcccaagctggagtgcagtggcacgatcacgggtcactacagcctcaacctccccaggctcaggtgatcctcccacctcagcctcccgagtagctgggactacaggtgggagacaccatgaatggctaatttttattttttattttattttattttagacacagtctcactctgtcgcccaggctggagtgcaatggcaccatctcggctcactgcaacctccaccttctggattcaagcgattctcgtgcctcagccttccaaatagctgggattacaggcacctgccatcacacccggctaatttttgtatttttagtagagacagggtttcaccaggttggccaggctggtctcgaactcctgtgctcaagtgatccaccttcctgggcctccaaaactgttgggattacaggcatgagccaccgcgcttggcctaatttttggatttttttttttttttttttttttttttttgagacggagtctcgctgtcgcccaggctggagtgcagtggcgcaatctcggctcactgcaggctccgccccctggggttcacgccattctcctgcctcagcctcccgagtagctgggactacaggcgcccgccacctcgcccggctaattttttgtatttttagtagagacggggtttcaccgtgttagccaggatggtctcgatctcctgacctcgtgatccgcccgccttggcctcccaaagtgctgggattacaggcgtgagccaccgcgcccggccttgtatttttttaagagtctgggttttgccctgttgcccaggctgtctcaaactcctatgcttaagtgatccacccacgttggcctcccaaagtgttggtattacaggcgtgagccacctcgcccagccttcctgttcttttttaagatttagtaaactggccaagcgccgtggctgatgcttgtaatcccagcactttgggaggccgatgggggaggattgcttgagctcaggggttcaagactagcctgggtaacaaagtgaggcactatctctacaagaaaaaaaaaaatagctgggcgtggtgatgcgcgcttttttttttttttttttttttttttgagacagagtctcgctctgtcacccaggctgcagtgcaatggcccgatctcggctcactgcaacctccgcctcccgggttcaagcgattctcctacctcagcctcctgagtagctgggattacaggcgcccgccaccatgcccggctaatttttgtatttttagtagagacgggatttcaccatgttgatcaggctaatctcgaactcctgacctcgtgatccgcccgcctcggcttcccaaagtgttgggattataggcgagagccaccgcgcccggccctagtaaacttgtatttctcacacattatgtaagccaccttaggatacagttctcaagtaagtcccccttttcggcacccgattctccaaccctccattgctcaaacctttcctccatggctgtgtccccaccccgagtcgtgcataacttttgttgatgacaaaaggtggcagacttttgtcctggggataggtaggtgaagtgttttaagaaatggttattttcaggctatgcagaagaatgagacttcaccatcaagcctcactacagtcaggcttgcagagcagcgacactgtattgacaatgacaatcctttcttttaaactccaaacctaactaagccacacgtctccatgcaaagggtaaaagattgaagacggagtgggaaaggacaggaggcggggcatagcgggcctggaaggcttccagcttgtccctgtggaccctcctcgcccctatgaacttccgcccccagtacctccgaggctctgacaggcggatgcctgccaactacgtgagcacgtggtggcgcgcgcggtcctgggggcggagcccagggggtagctgggaagcgacgcaggacgtcggtccgtgcgtacgtgctcgctcacggcggcggcggcggagcggagaggccagagccggagaccgagctgggatcgggccccgggcgggggcggtgcgagcggcgccaagcagatcttaggggcggggacggatccggggccgcagtgtcgccgccatcacggacttcctgtgggacaagcgcacgggcctcgccgccagaacggtgagcgcgcgggttggctggccgcgcgaaaagatggcgaccgcggggcgggcggggttaggcttgggttgggggcaagggacgggggcgagatttggagaggaggagagttgagacctacgaagcgacggagtagggagatgagggggaaggaggtcggcctgcgttagatgtaccaagaagacctgtaggaagcttgggcggaaccagactagaagggatgatagagtaaggatgggagtggttccagagatgtgaaggagtggaatatcaaagttggactcgggtccaatcaaagctggaggggaggaatacatcaccgtgtcacttggaacatgcaggaagaatttgcctgtaggagttctggattttctgagtaagaaaggaaaaagcaaaagatttcaaacttgagaaaggtaggctagtgatgttttgaggggacagtgctgtgaggccgtttgatggtagtatgtggtgagatggcatttatgtggctatgctgattaggataactatgctgggaaaatcttgtgcttgcagcttggtatgctaccggccccagttacaccaagaatgcatcaaataccaccctcctcaatttggggaggttgggaagaagtgatacagaatggtggtcagacatcggaatcattaaaccttttgcatacgcgattctcatacacccccaccaagacttatgtccctgggcctgtttcattttattgtgccttcctattctcatcttcctggattgtgacagtgatttttctcttttttccttgaaggaaaaaaaggatttgtgaaccatcccattccaattccattaactggaaggtggccagctgtcagctaagtagggctgatattaattaaaaaccacttactggccaggcgcggtggctcacatctgtaatcccagcactttgggaggccaaggcgggcggatcacctgaggttgggagttcgagaccagcctgaccaacatggagaaaccctgtctctactaaaaatacaaaattagctgggcgtggcggcgcatgcctgtaatcccagctactcgggaggctgaggcaggagaatcgcttgaaccctgcaggcggaggttatggtgagccgagattgcgccattgcactccagcctgggcaacaagagcaaaactccgtttcaaaaaaaaaaaaaaaaacacaagaaacagttgttatctacgtcttaagcacaagagtggaggggccagatgggatgctgactgtattttgtggcctactacattaaaacctctcaagggagagttggccaaagatgtgagagatgattaagttaattcaaggggcccgacccagatccctggagctgatagtatttggcgtttacctggtatatgtagaaacctgggagactggattcctaccctcaggacactgatagtctacttgaggagatgagatgtactcttaatgagtgtacaacatttatcataactgtaaaccaaagctttactctattgacttgtgaggaactcagcatcacacagatctatatcttagatcctgaacggggatacactgtggcagtctccatcggtcgtcatacactttgctctgtagtgaactgtgtcctagacctgaaggtyttcatggagctgtgtttgaagaaaataaggatagaacacttgaactggctgggtgcggtggctcacgcctgtaatcccagcactttgggaggccgaggcaggaggatcacgaggtcaggagtttgagaccatcctggccaacatggtgaaaccccgtctctactaaaaatataaaaattagccaggagtggtggtgcgtgcctgtaatcccagctacacaggaggctgaggcaggagagttgcttgaacctgggaagyggaggttgcagtgagccgagattgtgccactgcactccagcctggccacacagcgagactctgtctcaagaataaaataagaacacttgaactgaggggtgggtaatgagggatgggtttgggggctttctagagtttcagccagagttagtaggtggctgtactccaataaggaggaattgtaagtacagaggaagactgaggaagttgtgcctggtaaaaagaggcagaaataagaggggaaagcagcttagcatctttggagcagccagtccttggaggagatttctgaaaactcgaaactttcctatttccgctttcccttgccttccagatgccgcatcctcgaaggtaccactcctcagagcgaggcagccgggggagttacmgtgaacactatcggagccgaaagcataagcgacgaagaagtcgctcctggtcaagtagtagtgaccggacacgacggcgtcggcgagaggacagctaccatgtycgttctcgaaggtgaggcctcaggaagagatactcaaacacagggtcactcgctcattcctttgttcaacaaatacttattggttatatgctaaaaccattgccttaagtagctggctgaaggtaatgtcgggatagataaccamagaagccatttgggctgcagtgttaagtgttagaatacataatgaggaactgaggacgtacccagtgcgtttggttggagtggggcaggatgtgtaattcagataaaacattgcagagaaagcaacatctgtatatgtctggaggacaagtagagtcaggtgggggaagtgtctttgggcagagggaaagcatgtgcaaaggactgggagctacaggtaactaataagctaacagataagacaaagttagatctttgtgtttttaattttttaaaaattttaaaatatcatttatttatttttgagacagagtttcactctgttgcccaggctggagtgcagtggcaagatctcagctcactgcaaactctatggccccaggttcaagtgattcttgtgcctcagcctcccaagtacctgggactacaggcatgcgccatcatgcctggctaattttttttttttttttttgtatttttagtagagacaggatttcaccatgttggcctcaaactcctgacctcaagtgctccacctgccttggcctcccaaagtgctgggattacaggcgtgagccactgtgcccggcccagttttaatattttagtggtatgttcagtggaaagaatgggttaaggatggtttagagcaaggggggatttcattcaggaaagcttgagaaaaaaatggctctttgtttctttgtatcactgcagcgggaaaaaggccccaatagggagtggttctgcagatgccttttcagaggttttggtgacatggcagatgtgcttgttacctcacttctctggtcccttggtcctctcagtgactcaacaagtgtytgagaacagttttctagcattactctttgtcctcactaaggcaggaccttgtcacagggtatggtagggaatgtgatctgaacagatacacctcattggtatttgttatccaacagcagttatgatgatcgttcgtccgaccggagggtgtatgaccggcgatactgtggcagctacagacgcaacgattatagccgggatcggggagatgcctactatgacacagactatcggcattcctatgaatatcagcgggagaacagcagttaccgcagccagcgcagcagccggaggaagcacagacggcggaggaggcgcagccggacatttagccgctcatcttcggtgagtgccagcccaggcccttcctctccccactcttctgcaggccctctaggactctggtaagtgagcagtatccttgttctcagctgaacattggggcatgaacactgaggtgggcactgagtttgcctactttcttggaagctctccgactcttgaagggccctggatctgctttggagatggatgggcacggagcatttgtgacccccagtgctctccctggcatgttgggcttattgtgttgggagcagcttctccgccccagcggcctccactctttaatggggaccttgcttgtgaactgcctttttcccccaagccctgggctctgtagcccccttggcaggcgggcttgggtgggggcaaggggagatctgtgtctgcccggaagggcattgtgtagagcatggggttgtgggtgacattggcaacaacaccacttctctgctctgcccatgcctctccctgttcctgttttgggtttggggacttgggattatgcgccgctctctcttctcacaccgatccaccttactgcatctgacgtgttcccttccactgtcccccatcatcgtctgtcccccctggctgggcgcctgtgaccggtgacccctctaccacccaccccgcctccctccggcccccgctccgacacykggcttgstycraccccccctgccccccgacagcagcacagcagccggagagccaagagtgtagaggacgacgctgagggccacctcatctaccacgtcggggactggctacaagagcgatgtacaagccaaatcgtaacaatcctatagcctgtaatggtcccatagccatcctaacgtcccaagccaacctgagtcacagcctcttgccttttctcagtggtgttgtttatctgggtggtttgagttgctgttgagaattgacctctgttgtccactcccagctctcacggcccctgggttaaaggtggtgggaatcacgcaggggttttcttcccctgtgaccatctgtatctgttccccttccttcatctccaccccaggttgctgtccccttttttcttccaactcagctcattccccaccttctctccctccctctccccgaccctgctctctttcatttcagatgaaatcgttagcaccttaggagaggggaccttcggccgagttgtacaatgtgttgaccatcgcaggtaactgtcagtccctccctactatgtggggctaaasagatggttggggttatatggggcttttttgctaattaacctgaggtagaatttcttagtccccctacagccctgttcattttgagacattcttgagaacccagcaaaagcctctcctgccaacttacaggggtggggctcgagttgccctgaagatcattaagaatgtggagaagtacaaggaagcagctcgacttgagatcaacgtgctagagaaaatcaatgagaaagaccctgacaacaagaagtaagcaagcaaggaagtrtgtagggaggctgagagccccaacccctacacgggagagaytyctagacctggtttaggcagacaggggagtcctagaccttctcatccattcatcttttgttcatcatcttagagtagtagaacatcagggtaggaaagggrgggggcccatgacattccttaatccactccccttgttttcagggaagttagattgctctgtcgtttgaccccagcctagaatggcttctgtagagatataccctggacatagccctaggactgagcatcaacctcatcgaacaatgaattaagcttttataagtagaactatgctgataaggccacagacatttatgcagtaatattttgttcacatacattcacagtccaaaaatagaataaggactttaagccaagatatgaggccagtaggtataaataggagcccagtggtagctagtggtgaatgaatatcaggagttgggctggggttgggatttaggatggacagtttgatgattcaggatctatactgtttggagcttggcactccacagctcttcagcaaatagtttttgaactatttaaaatgacgcaggaagatattttgaaacttgggctgggcatggtggctcacgcctgtaatcccagcactttggaggccgaggcgggtggatcacaatgtcaggagttcgagaccagcctggccaatatggtgaaaccccgtctgtactaaaaataaaaaaattagccgggcatggtggtggacaactgtagtcccagctacttggaaggctgaggcaggagaatcgcttgaacaggaggcagaggttgcagtgagccaagatcgcgccactgcactccagcctgggtgacagagtgagacgccatctcaaaaacaaaaaagaaaaaaacmtggcagatagtaccattcttcttgggtctggtagaggctactccttagctgaactgaattttggtgttagtactagctggcatggttttacacaagtatgtggaatcaacagctatgaagtacctccttgttggatggctgatgggcagatgggagctcatcagacaaycccccttcccccatctctcttctcagcctctgtgtccagatgtttgactggtttgactaccatggccacatgtgtatctcctttgagcttctgggccttagcaccttcgatttcctcaaagacaacaactacctgccctaccccatccaccaagtgcgccacatggccttccagctgtgccaggctgtcaagtgtgagtggggtgggccgaagtggactctggggcagtccctcccttcattggatctctctgtcggttgtgcactggtgaagcccctaaacagtcagctgtctgttatctgcagttctttgatttactgtcatcttgaaacgtcttctgacttaactccttgactgatgtctttatcgtcactgattgctcttactctacacctagcctagcagcagctagaagagaaagcctttggaatcaaagcacttaattaccctccccttttcctttctccctttcttgggaaagcatcagtcagacagcaaacataaagagacaaaaatacactccttagggtaaaggcttacatttgtctgggatgagatgttcattcacagcaaaggagatgggaacacagagtatgtagttcagctaaggggcaaggtggggaattcaaagaaatatatcattcctctggagtcatcaaaataatacagtttcacagaattgagttaacataatgccagctagacacatgtcaaagtgtgtacacactacaactcaaagcaaactttttttttttttacatcagttgagctacatatgtatcttacattagaaagagcagagcttcttagaccaggcattccatttagacgtagagcrgaaagcagccctagtgattctggacctgtctcctcactggctttgccctaggtaaccaggcctggggtcagctgataccagttagctctggccacctgcaccaagcctgacctggccttctcccctacagtcctccatgataacaagctgacacatacagacctcaagcctgaaaatattctgtttgtgaattcagactatgagctcacctacaacctagagaaggtaagatggatagggtctgcccttggttactgggggcaggcagctgcaccactttgccttctgccgagccctttgttttctcccttttatttcgtcctcccacattttctccctgwctggctccaactgggtaaaactaaataggttgaaagggagagatctcttaagaagacttaaattgggagataacttgtacaggggacttcagataactttccagtagagtgaaagtttttaaggttcttggtttggactttatttatttatatatttatttatttatttatttatttatttatttatttatttatttatttgagacagagtctcactctgttgcccagactgatgtgcagtggcataatctcggctcactgcaacctctacctcccaggtttaagtgattctcctgcctcagcctctggagtagctgggattacaggcacccgccaccacgcctggctagtttttgtgtttttagtagagatggggttttgccatgttggccaggctggtctcgaacccctaacctcaggtgatctgcctgtctcgggctcccagaatgctgggattacgggtgtgagccacagtgcctggcccggacttcttttttgagatgtgtatttctgtgaggtaggaaagctcggctcctttgactaactggagataatgragatctcagacctaaagaagctctccctcctttgacccctttgctacatgttacatatttttagagaaactcctttgctacatgttacattttttcagaaaaacccatttgctacatgttacattttttcagaaaaacccatttgctacatgttacatgttttcagaataactatatatcyggcacttgagtgtagtcttcagatgcttacagatgtgcacgctgttctataatcatttcttaatccttttgctcccctacttctaaaagtattatgctggatgtggtggaagctgtaaaacaggaatttcccagggcttgtaaggccaggcaggagatcacagtaccttttttaaggctcagaagcaatgtagagaatactggtggaatctcagtctgggtgcagaggttcatcctctttctcctctgctcctagaagcgagatgagcgcagtgtgaagagcacagctgtgcgggtggtagactttggcagtgccacctttgaccatgagcaccatagcaccattgtctccactcgccattaccgagcaccagaagtcatccttggtaagggagggcaaggctgtccaagtgtgtgagatgatgtgagggtggggccacctaagcctcataacaccttttccctcccattctcacccagagttgggctggtcacagccttgtgatgtgtggagtataggctgcatcatctttgaatactatgtgggattcaccctcttccaggtaagtgatgggatgtcttacttgactgcctggcattcttctacctggttcctttgttttctgctgaggacctgcctactcagttctccacattgcctgccttcctggcagctgatccttagcatgcccttttcagtcccatgctcagttctgtttttgtttcccagacccatgacaacagagagcatctagccatgatggaaaggatcttgggtcctatcccttcccggatgatccgaaagacaaggtgaaccttgagggggcactagttaactcttttccttttctctccacagaattggtctatttcacatcattttcttttttctttgatacctcctctccccccagttactttcagatggggaaataagggaattgtaacaagggtgaccttctgattcctcaacctccccttcccctctagaaagcagaaatatttttaccggggtcgcctggattgggatgagaacacatcagctgggcgctatgttcgtgagaactgcaaaccgctgcgggtgagctgggctcgggataaatagtgcccaccgtccagaagtcacttccttcttagggtggtttgccccctggaatgctcttcacaagcagagggttaggaaaggaggggwggaaagctgaaagaagacatctttggtcaacagaggaaacataagagggagtggttttgyggagggaaggaggttagacagcctaaccttgagacaaccagagatcaaagcaatgtcctggattctttaggtcagacagaaaagaataaactaccyttgaagagcttacattttaatgaggaactaaagaagattcatgaagttgacaaggatatacaagtagaaagaactttcaaagattatggagtaattgtgctagwgggaaggtaggttgagctataatatcagaaacgttggtcctggtgtggtcgtggttaggtagccttcaaattggttgcaagcagagccttggttctccaagaatgaaaggtagggtcttgaagaaggcagggtttgtaaggcatcctgcctcacctttttcctgccctcctccaccagcggtatctgacctcagaggcagaggaacaccaccagctcttcgatctgattgaaagcatgctagagtatgaaccagytaagcggctgaccttgggtgaagcccttcagcatcctttcttcgcccgccttcgggctgagccgcccaacaagttgtgggactccagtcgggatatcagtcggtgacgatcaggccctgggcccccctgcatcttttatagcagtgggtgtccagtccaggacactggtgcttttttatacaagagaacgagccagagttcactccttcctcctggctctctatatacctgtgaatatgtgaaatagtgtaaatatgaaagaacttgtacctatcacttcaacccctgccttgtacataatactattccatccacacagtttccaccctcacctgccccctcatacrgagttggatgggggccgagtgaggtaaccaggtggcatctaccccatgttttataaggaattttgtacagtctttgtgaaataaaataacgtgcttcatttgacccccatccctggagttggaggtttgggaatgctggggtggagggatgaaactattggcaaactttctgagtttgggtatgaagggagtcctccttaccctccaaaatgaagcacagccaggctaccagtttatttcccctgtccaccttatcatatgggagggtagtgatgggtggggcagcatttctttcagattaaaacagagaagtgttatgaggtggcacttctcggatgtggaattatgagagttgggaaagatctgactcctagagtcattaggccgcggcccagtatagagccagaaactcaggttgaaaacgtgctcaacctggctcctaggggggattgccacgaccggtcagaaggctcccgtcgtccatctcgggagactaggaaggccggattcctacgcgaggcctgctgggaagtgtagttcgttagtggaaggaagtcacatggaagaggggcggtagttggttgtgggcactgggttagaggtatcacgtgggggcactttcgtcttagcttttggacaagacgcaggcgcaacccacggctgctgcggggatccttgtggcccttccggtcggtggaaccaatccgtgcacagagaagcggggcgaactgaggcgagtgaagtggactctgagggctaccgctaccgccactgctgcggcaggggcgtggagggcagagggccgcggaggccgcagttgcaaacatggctcagagcagagacggcggaaacccgttcgccgagcccagcgagcttgacaacccctttcaggtgacttgcgccagtcggcctcttttgggcggtcaggttgattcttcccggttctgtagggtcgggctaacttgtatccccatttgtgacatttgatcctgggaagagccgccacgtggggtgacagtgactccagaccagtgagcactctggggggcgggccctgccccttaatgggctggtgctggcagtgttggatgatggatttgaggtaaatgttgtcccagtcctgggacaacggcgtggccccgaaggtgcagtacttggagccacaggcagtttgggaatggtccctgggaattcccctaggtggcactgggtgccagctgagacccgggtctctgccctcaggacccagctgtgatccagcaccgacccagccggcagtatgccacgcttgacgtctacaacccttttgagacccgggaggtgagctactggagagcataggagttcaaggaagggaagggtttgccagtgagacaagttagcttgggtacaggggacttttctgcatgcacaggaaggaagaggcactgtgatcttagttccctgagagaggctagtcagccatgggatgcctcatccttctagggccaccagggccaccaacccaaatggtttgagctctaaaagtcagtcctgggaagatctggaggctggcaaggccttaaccaatgttctgtatgggaaggctttcttgaagaaaataaaggttggggctggttggagtttaggttaggtgtgcagtttgaaagcaaggaatgaggaggactacacctgtttgtcccactggattagaagatggtgagttgtaagaatttaaggggttttcatggtacttaaaacttaaaaaaaaaagccaagcatggtgtgcatgcctgtaatcccacttgggaggctgaggtgggaggattgcttgagcccaggaatttgatggagaccatcctgggcaacagcgagacccccatctcttgaaacgttttaaaaattggctaggtgtagtggcacatgcctgtagtccttgctacttgggaggctgggatggaaagactgcttgggcccaggagtttgaggcttcgatgagtgatgattgcaccactgcactccagcctgggtggcagagagacaaccccacactccatccccagaagaaaagaaaaaaaaaaaacacagttaagtggggagatatggtaaatgagtgatttgagtcctcactaaggaattggatatgagggatgataaggctgctacaggtcatcatagagttctctgacagaaattcaacagaagaactagcttcctaacaaatgggggaaaggctgcttccttacatcatgagttctgggtctaaaggtattcaagcagactctagattcctgtgttatgagggactagatgatcactaaggtcttttcctcaacagccaccaccagcctatgagcctccagcccctgccccattgcctccaccctcagctccctccttgcagccctcgagaaagctcagccccacagaacctaagaactatggctcatacagcactcaggtacaggaggtgtgcaggtgagggctggggagaagggccagtcctggggcccagggctcacatctccgtctgctcacactgggcaggcctcagctgcagcagccacagctgagctgctgaagaaacaggaggagctcaaccggaaggcagaggagttggaccgaagggagcgagagctgcagcatgctgccctgggaggcacagctagtaagtaatagagtggggaagagcatctgagagtttgggaggagcaaaaacaggtcttaagggcctgggctcggctgggtgcggtggctcacacctataatcccagcactttgggaggctgaggtgggcggatcacgaggtcaagagatcgagaccatcctagccaacatggtgaaaccctgtatctactaaaaatacacacacaaaaaaattagctgggcatggtggcgcgcacctgtagtcccagctactcgggaggctgaggcaggagaatcgcttgaacccgggaggtggaggttgcagtgagccgagatagcgccactgcactccagcctggtgacagagtgagactccatctcaaaaaaaaaaaaaaacacaaacctgggctctggagtcagactgctgagtttgaattttagagatactgcttactaaccatgagcttttagggaagttacttaatcttgaatgcctcagtttccctatttataaaatgaaaaccacgtttgcatccgtttgacagggttgttgtgaaggttaaacaaaatatatgtgaagtacttggtacagtgcttagatgttttaaataataataaacagtattaatttttccactctcacttgtctccttggaccccaaattggagataaaagagaggatccagggctgggtatggtgcctcacgcctgtaattccaacactttgggaggccgaggcaggcaggttgcttgagctcaggagttagagaccaacctggacaacatagtgagatcctgcctccaaaacattaatgaaaaaaattagcagggcatgatggtacctgtctgtagtcctagctcctcaagaagctgaggtggacggccaggcgccggggctcatgcctgtaatcccagcactctgggaggccaaggcgggtggatcacctgaggtcaggagttcaggaccagccaacatggtgaaaccctgtctctactaaaaatacaaaaattagctgggcgtggtggcatgtgcccataatcccagctactcaggagactgaggcaggagaattacttgaacccgggaggcggagattgcactgagccaagatcacaccactgcactccaacctgggcaacaagagcgaaactctatctcaggagaaaaaaaaaaaaaaaaaaaagctgaggtgggagggttgcttgagcccaggaggttgaggctacagtgaaccatgatcataccactaccttccagcctgaacaacagagaccctatctcaaaaaaaaaaaaaaaaaaaaaagagaggatccagggatggagagaagggggagtgattcctttgttggtctctgttttacttctggggtccacctgtttttttgtgccttacagctcgacagaacaattggccccctctaccttctttttgtccagttcagccctgctttttccaggacatctccatggagatcccccaagaatttcagaagactgtatccaccatgtactacctctggatgtgtgagtagtgagaagccttttggaggaagttacaggtagatctcttaactgccctggggtccgctcaccaagaaccaaacacttcacctctatttagaactcaccagcctgctagcaaatgttcttgccctctccccactttttattgtccatatgcaggaatatattttgaattctttagatgtctttgggctgggtgcagtggtatacgcctgtaatcccagcactttgggaagctgaggtgggtggataacctgaggtcagaagtttgagactagcctgatcaacatggagaaaccccatctctactaaaaatacaaaattacctgggcgtggtggcacatgcctgtaatcctagctactcaggaggctgaagcaggagaatcacttgaacccgggaagtggaggttgcaatgagccaagatcatgccattgcactccagcctgggcaacaagagcaaaactccatctcaaaaaaaaaaaaggccgggcacggtggctcacacctgtaatcccagcactttgggaggcccaggtgggcagaacacgaggttaggagatcaagaccatcctggctaacacggtgaaaccccgtctctactacaaatacaaaaaattagccgggcgtggtggcgggtgcctgtagtcccagctacttaggaggctgaggtaggagaatgggcgtgaacccaggaggcagagcttgcagtgagccgagatcctgccactgcactccagcctgggcgacagagcgagattccatctcaaaaaaaaaaaaagaaaaaaaaaaattagctgggcgtggtggcgggcgcctgtagtcccagctactctggaggctgaggcaggagaatggcgtgaaccggggaggcggagcttgcagtaagctgagattgcgccactgcactccagcctgcgcgacagagccagactccgtctcaaaaaaaaaatgtctttgcaaggggatcacacattattgacatttgctttctccatctcccctgttgaggattccatgaaggcagcagctgccttcatttccttactctgccatgtttggtgaatattataggatgagcatagatgggaaggagccttcattgcagtccagaagggctcctcatcctgtccctctgccccttaggcagcacgctggctcttctcctgaacttcctcgcctgcctggccagcttctgtgtggaaaccaacaatggcgcaggctttgggctttctatcctctgggtcctccttttcactccctgctcctttgtctgctggtaccgccccatgtataaggctttccggtaagtgtgttagtggtgggagagtgatggagacctgggatgggccccacgtctgcccatccttcagctctaattcttctcccaccctccccatttttttcctctttgtaggagtgacagttcattcaatttcttcgttttcttcttcattttcttcgtccaggatgtgctctttgtcctccaggccattggtatcccaggttggggattcaggtttgtgaggctgttatccaccctcacctttccctctagatccagccagcactgggtgctgggataggagttgttcagaaaaaggaaatgtggttttaatccttgggaggtactagtttaatgagatacaagacatacttccaggatagagcgcagacagcactcttgacacatatagattgaagggaagaatgctgcatttggccaatctaaggtggcttcctggaggaggcatagaaccatggttgaaaggaggaagaagaatccccagatgagtgcctggaagagcttggagagctcagggctaatggttcagaaactggaattaaactatgaagagattagatacagtttgggattgtggtgcttggaatgctgctcgattgacagggagccactgctgatgggaagggtaggaacaggggatgctggtgac

SEQ ID NO: 96185 - DNA, 75531 bp, Homo sapiens
cgcatacccatgtaacaaacctgcatgttctgcacatgtatcctggaacttaaagtaataaataaataaattaattaattaataaaaatatccccagagggaaggataccattaaacttaccctaacaaaggtacaaattagtcttgaaagaatgaagcatcttaaccacttgctagaatgaagtccaacattctttaaaggaatacaacaaaatctagcattcaacaatgtaaatttattatgtaaatttatttaatatccaatcagatattaagatgtgaagatataggaaatgtgatgcctagctaagaaaaaaatcagataatgaaaatagaccaagaaattacaaatatggtggacttttaaaaatctattaaaatattagaactattcttgaagattgaaaggaaaggtgaggaatggaagataacttcatgtcagaaatgatgcaacccaaaacacagaggaatgaaagctttaaaaggcagaaagaaaaaacaaaattgttgatattgaattcaaaacccagaaaaaatattcaaaaatgaaggcaggccagacacagtggctcacacctgtaatcacagcactttgggaggatttaaagaaggattgcttgagtgaaggaattcaagactagcctgggcaacacagtgagaccccatatctacaaaaaatttaaaaagtagctgggtgtggtggtgcatccctgtagtcccagctattcaggaggctgaggtgggaggattgcttgagcccaggagttcaaaaccagcctgggcaacatagggagactgtttctacaaaaaattaaaatattagccaggcgtagtggtgcatgcttgtagtcccagctacttgggaggctgatgtgggaggattgcttgagcccaggaggtcaaggttgcagtaagccatggttgcaccactgcactccagcctgggcagcaaagtgagatgctgtcttaagaaaaagaaataaaccatgatcatctcaatggttgcaggaaaatcacttggaaagttaatatatattcatgaaagaaaataaacacctctcagtaaactaggaatagaagggaaattcctcagtctgttaaacagcagctacaaaaagccacagccaacatcatattaaatagtgaaaccctgaacgcttactctcaagctcattaattctattatttaaaaaaaatttttttagaaacagggggtcctgctttgttgaccaggcttgagtatagtggcatgatcactgtagcctccaattcctgggcctaagcgatcctcccacctcagcctcccaagtagctgggtctctctctgtggtgtgtgtgtgtgtgtgtgtgtgtgtgtgtgtgtgtgtgtagagacgggttctcactttgttgcccaggctaagctgggaatgtgtgtgtgtgtgtgtgtctgtgtgtgtctgtgtgtgtgtgtgtgtctgtgtgtgtctgtgtgtagagatgggttctcactttgttgcccaggctgagtctcaaactccttgcctcaagtgatcctcctgccttggcctcccaaagtgctgggtttacaggcatgagctaccatgcccagcctcaagctcattaattcttttctcagttgtatcaattctgctgataagcctggcattcctaagagttaaattgatgggtacccaaaaggtcagctatttaatattacaatcagaaaaaggaaagattcaaagagcaggtgtctgaggacaactacctcagtaaaatatgagtgttccttgctcagttcccagacctgagccaatcttcagatctagaaccatttgtctacagagttgtccatgtgcctcagaggaagaaccttagttttatggcaggcatagattataatgcttaccctagtctctccccaaagtaacctatggccatttatttgggtgactatacacttgggaaaggaaataccaagaaatttttaggactatcagaaacagctttcaaagttgacatcaatacacagacactgaaaccatcatcatggccctcctatcatgtggggacttaatgggtccaggcaataatggtgtcctggccaagatggtaaatttaaaacaatattgcactctaggggatgatagtgtcaccattaaagacctaaatgatggagtggtggttactattatatttctgtttaattaatcattctggccttttcaaaaaccagatagatcctacagaatgactgtagactatcgcaagctcaacgagaccaagtttaattttgcaaaagagaagtacagcccatgttaagcctccttgggatctaaaggtaacatatcacacgtctagaagtgcttctctggcccatataccaagtgatacagaaggctgccagctttgagtggggcctagagcaggaaaggctctacagtacacagtcttggtacacacagccttgttgcttagatcatatgatctggcagactttggggtggaggtgtcaggggtggaaaaaatgaagtgggagagcatccctgggattttggagcaaggccattaaatctgcaacagagaattatactacttttgagaaaccactccttgtgttaggcgccataaacctcattttgtcatgctgctccagtccatttactgactaacccacaaaattgccaattttcactgtggcccagagcaagaataacttttaaacagacctgatctgtcatgcacactgtctcttgggccatatgacctagcatatcatatggagctgacatgtctgtgccagatggaaatgttgtatgacacccttggaaagtccctgtgtgtcacagtacaatccattaggatttggaagctgtattaatccattttcatgctgctgataaagacagacccgagactgagcaatttacaaaacaaagaggtttaatggacttacagttccatgtggctggggaggcctcacaatcatagtggaaggcaaggaggaccaagtcacatcttacatggatggcagcaggcaaagagagagagcttgtgcagggaaactcccatttttaaaaccatcagatcttgtgagacttattcactatcacgagaatagcacgagaaagactggccccatgatataattacctcccactgggtccctcccacaacacatgggaattgtgggagatacaatttgaggtgagatttgggtggggacacagccaaagcatatcagaagcaaagcaatatcatcctctgcagataacttttctatagagaagtttctagcttgctatggagccagtaccttttctctaatccagtcccacccctcaaagttaataactatccagaattgtaatgccaaagaaaagggaagttccataaattagatggtatatttgagaccctagacaaacaagaaaataaactccaggaaaatttttaaataagcataaatgattattgaaaataattcacattttcttatgaatgttatatatttccttgaccatattattcaattattttagaatccatgattcatagcttttatatctgaaaggcctgtgggcctgcttctattgtccacttttttcttctgactctgggtatacctggcaatttttgattgaatgccattgtgcataagaaattgtagaagctctagatgagcttttgtttcttttgtttgtttagagacagtgtcttgctctgttggccaggctggagtacagtggcacaatcatagttcactgcagccttgaactcctgggctcaaacaatcctcccacctcagcctcctgagtaaatgggactacaggtgtgagccaccacacctggctacttttttatttattgtagagacaacgtttcactatattgtgaggctggtttcgaattcctggcctcaagtaattctcccaccttggcctcccaaagtgctgggattacaggcataagccaccacacacagccaagctttagtttctgaaggtaattatagcaggagcaaattacctgaattcagttagtgagctcattcaaggtgtggtatcaatcttaagatctggtctatgtttactccttcctaattcctaggtacagtccttcagagattccagctgaaagcctgtggtatttaacaaggcccatcatcactggtggaatctgaacttcaagtctgatttccttggcacataattttctactaaaagctctgcacctggctgctgtgaatttccaaatctatcccaagtccctgtgtgtcacagtacaatccattaggatttggaagctgtattaatccattttcatgctgctgataaagacagacccgagactgagcaatttacaaaacaaagaggtttaatggacttacagttccatgtggctggggaggcctcacaatcatagtggaaggcaaggaggaccaagtcacatcttacatgatcttgctgtctcagtggtggcacatatggaagaaaatccacatataagtggacatacacagttcaaacccatgttgttcaagggtcaactatgtacacactcaaacctgtaaactcaatcatatggaaaacaaataggcaatatgtatacatatgtgaaaatggggtcattttaagaagagaatgatgttacatattaaagacaaagctgagtggcaaaatggatgggaaaagaaaataagcatgcgtaatatacactttaaacgatatactttattggtgatttctggagactacaatcaaaaaaatttttacacatcaataatccccacattcaaatgccaatttacttaataatttggtgtatttctttcctagctttttccctccacactacacagatatacctaactttttgttccatgtgtttatctatacacacacactcacctatgaaataggtgaatacaaatttatacttaaataaatacaaatttatacttatatgtgcatataactttactcatcacaaaatttttatatgtcaaccacccagaatcactgatataatggttcatatacttcctgtttgtacaatattaatcatatggttattgttttataatattttttacctaatgatttaccacgaacattttcccaaatttgccagtagtcttaattggtgcatgttatttcacctgacataccaatttttaatcatctatcattggatattaaattgtcttattttttcactactttaaataatactgctgttatggaagatactctgaaaattttaaatcttatattgcttcaccataaaattattactctttattaaaacatggagaattttaagttctaagcactgttcctaaggaaagtatgtaaaagcttactatgtgccctttctgtaatggctttgcatttttgcactgaagatattgatgaataatatacgtaaggtctcctgtttgagatctttgtttcagggatcctgatgactcatcctctcttaccctatttcaggaagcattttttctatttgtttaggaaaataatctgggagtttgccccacatgggatattttatgctttatactgttcttttaaaaatgtcatactcactgagcgtggtggctctcgcctataatcccagcactttgggaggctgaggcgggcggattacctgaggtcaggagttcgagaccagcctgcccaacatggcaaaactgcgtctctactaaaaaaaaaaaaaaaaaaaaagaattagccgggtgtggtggtgggtgcctgtaatcccagctacttgggaggctgaggcaggagaatcacttgaacctggaaggcagaggctgcagtgagccaagatcgtgccactgcactccagcctgggcgagaagagcgaaactccatctctaaataaataaataatcatactctactccacagtgaacatatcttaaatttataattgtttgccacctctacacctcttccacaaaatgtttggtaaagaacatggtaagtgtggtggctcatatctataatacaagtgctttgggaggcaaaggtgggaggatcaattaacgctacgagttcaagaccagcctgggcaacatagcaagaccctgtctctattaataaaagaatatagagcatgattcctctcatttataccatgggtttgtttatttatttatttgacaaggtctggctataatgcccaggctggagtgcagtggcacgatctcagttcactgcaacctctgcctcctgggctcaagccaccctcctacttcaacctcctgagtagctgggactaaaggtatgcaccactacactcagataacttttgtattttttgtagagacagagttttgccatgttgcccaggctggtctcaaacttgtgagctcaagcaatctgcccacctcagcctcccaaaagtgctaggattacaggtgtgagctacgtaccacgcctggctaccatggttttataagctcactaaattcttagttttcctcggcatacatactctgataaacagtgccatttaaattatttctgaaggctttcccacataactacattcagttttgccccttttgaattatttgacatacagttcttcactcctgggtgaagaattctgggtgaaaaaactgatcacatttattgacacctctggaattatacttttgkactttgtattaagttaaatgaacattaacatatgaagaatttccaatattctggacatttataagattactcgccatgattatttgacaaataatgagactagtaatagtcaaatgacaaataactactagtataattatcccactctcaagtataatcataggtttttatctcctgtgtgacttctctgatgtttaatgagagttgacttcccactgaatgctttcccacagtctctgcattcataaggtttctctcctgtatgagttctgtgatgcacaatgagagttgatttcacactgaaggccttcccacattcactacatttgtaaggtttttctcctgtatgaattctctgatgtttgatgagagttgacttcctactgaaggcttttttacagtcagtgcattcatagggtctctctcctgtatgaattctctgatgtttaatcagtggtgacttctcactaaaggctttcccacattcgttgcatttatagggtttctctcctgtatgcattctctgatgtacaataagggttgacttctccccaaaggctttcccacatcttctgcattcataaggtttctctcctgtatgagttctatgatggacagagaggtgtgactttccactgaaagtcttcccacatatactacattcatagggtttctctcctgtatgaattctctgatgaacagagaggtgtgactttcctctgaagcttttcccacatttactacactcataaatgttctcttttgtatgagttctccaatgtttagtgggactgggcttctcatcagaggctttcccatgttcactgcactgaggtttctcacttgtgtgaattctttgatatataaggctggacrtagtacatttaatacctttataaaatgcttgtctaatgtgtgttttttcatgtctaataagatgatatgaactcttaaaggcttttggacatttgtcacatacaaatggtttctctcctgtatgagttcgttgatgtttaatcagagttgacttctggataaaggtttttccacattcactgcattcatagggcttctcccctgtgtgagttctctggtgtgctatgagggttgacttctggctgaaggcttttgcacattcgcagcattcataaggtttctctccggtgtgagttctttgatgtacaactaagtttgctttctggataaacacttttccacattcagtacatttgtagagtttctccccagtttgacttctctgactttttctaagggcttgcttttggtggagggctttccctcgttgattagggtcaaaaaatctctctgcaggttgagctttatgaagattataatggargcatactttccaatatgcyttacatccatcatctttctttcttacatagcttctattttgaccaagaaagtttaaatgatgttttgaacacctttcccatgaataatatttagggagtctttgttttacagaaacaaagtctgtgttgagataaatgatttttctacatattttacattcttgaccactttcatccttcagtgtttccttgcctatgaatgcagcttgccacagaaatttgtcttggctttccttgtagtgatctatctgctcgtcaacttcccagacttctagaagaaaatgcaatgaatcatcaaacttgtcttcccactataatttatgaaataactaatccctaaatgcccaagcagtgaactcctatcaacatgacttgagctgatgtggatggaggacccttcccatgtcccaggctcaaaatcaagaaaagaaatgtattaggtatcaaaatgaagtgggaatttaaagtgagagagtaaacagaacagcttgaggatttgaaggggaccataaggcacaaatgttcaggaattcagcaaagtcagagtgtaattttggcttaaagcttatatatatatatacatataattgtatatatatgtgtgtgtgtgtgtgtgtgtgtgtatacatatatgaaaggttgccactgctatgaacctaccaataacaagaccaactttaaaaatttttcagtttataggctctgtactatgcttgtaatcatttggattgagttacagaattaggcttttgatgtcttatatataacatccttcttgccaatttctctggctagtggggaatccttctagttcctgtttaacaagcatgggagcccttgcagttatatatatatatatatacacatacacacactcatgtctttatagctgaagacatcacagaacttctagggaaaaccaactctcattgaggagttcacagtagaaaatttaaaacctggctgggcgcggtggctcacgcctgtaatcccagcactttgggaggccgaggtgggtggatcacgaggtcaggagttcaagaccagactggccaacatggtgaaaccctgtctctactaaaaatacaaaaattagctgggcgtggtggcaggtgcctgtaatcccagctattcaggaggctgaggcaggagaattgcttgaagctgggaggcggaggttgcagtgagctgagatcccaccactgcaccccagcctaggtgacagagcaagactccgtctcaaaaaaaaaaaaagaaaagaaaatttaaaaccttagaaggagctgatccatcattagaaagaattgaccgatacatttaaatatactcacattcctagaactgtagataatagaacaatctgtactttaaaataagtatatttcaaatgtacaaagataaggtaagaactagactatgaaggaaatagcaggaaattttgaaaaaagacagatgagtatttttaaggtaggcattatttaaaaaaaaaactctaaataggttgaacagtagactagccacagataagacagatttaataaattagatgacagatcttgggaaatcacttagtctctaataggcttcccttggcataaacatcacacatgttggtgcatctttgatactggagttagagtgtgctctgtgttcatgataggcagacagcataaggaagttagagtgtgctctgtattcatgacaggcagacagcataaggaagcctgcacatggatgcctccagattctgcctgtgcctttttcccttataatccagttgtttatcattactacatcactgtaataaatcttacccatgattacaactatatgctgagttccatgaatttctctagagaatatctgagtatgggagtcgtcttggggacccctgatctaggcagtatttgaagatacaatgactgattcttttctaaaatggaagaaaggcatgtatcctaccactgaatgtccaaagtccttgagtgtggaaaataaacaagtctgcacttagacaaagttcagtgtagccacaaggctttcaagtcagaaagaaaatattgtaagctaccatgaataagtaaaaatatcccctataaagaaataattatatcaacatcagacttcttcaaaaaagaaggcagaagattaaagaataatatcttctctgtcccgagacaagctttcatcttagaactctatacccagataaattatcataaagaaagatgacaaagacatttttggacaagaaaagacaaagaatttgccatacacaaaacctggctaagaataatgcttgatacttcagtaattcagaaagataatgactaaagaggaaaaagcgggtaaggaaaatccagcaaaggcaagaaaaaagaagtaatgaaaagcaggctatgtagaaaatatactaaaagaagaaatacaaatatagtaatttcacaataactatatattaaccctattagttaaatgccaaccatatcaaattgcattttaaaaaaatcagctccatgttttcagaagacaattagggcaaaatgacagagatgtgttgaaaataaaattacgggaaaagctacatctggcacttagtaaccaaaataaaattggcaagataatgcttatatgccaaaagcaaagaaggataaaagacgagaatattataaagcaattttcacttacaaagatgtgaaactcttaaatatacatggcaaattgattccacttatgacggataagaggtaatacatttagtattattgaaaatatacagcctgggcaacatggcaaaacccgtctccacaaaaaaatacaaaaaattagctgggcatggtggcgcacacctatagtcccagctacttaggaggctgaggcaagaggactgcttgagcccaggaggtcaaggttgcagtgagccatgtacacaacactacactctagcctgggtgacaaagtaagaccctgtctcaaaaaaaaaatacacacatgtgcacacatgcacacatatacacacatacacacacatgccttactacctattccacttgtagttcataccatagggaaattatggcaaattttaacatgtacaagaatgacaacaaaattttagaaaccaccaaatatccaccaataaaggtatggaaagtgaactatgacactcatatttccgctagcacagcagttaaaataaatgatctaaatctaaagtatcagcataaagctcaaaaggtaatactgaacacagaaagcaagttgcagaaagatccctataattttttttttttttgagatggagtctcgctgttgtcacccaggctggagtacagtagcgtgatcttggctcactgcaacctctgcctcctgggttcaagcaattctcctgcctcagccccctgagtagctgggattacaggcacctgctaccacgcctggctaatttttgtatttttagtagagacgggatttcaccatgttggccaggctggtctcaaacacctgacctcatgcgatccacccgcctcggccccgcaaagtgctgggattacaggcgtgagctaccgtgcctggccaagattcctataatttgagtgtaacaatctggtaattttacaaaaagaattctrtattgattacaggtacaaatatatgtagcaaaagtataaaaacatagtttagaaggatactcacaaaattcatgatactgtttacctggggaggagataagaggaataggcctcaggaggggaaaaatgggacttcaactttatttgtaaacctctgtttcttttcttttctttttattttttwaattttatttatttatttatttattttgagatggagtctccctctgtcgcccaggctggagtgcagtggtgggatctcggctcactgcaacctccgcctcccgagttcaagagattctcctacctcagcctcctgagtagctgggattacaggtgcacaccaccacacctggctaatttttgtatttttagtagagacggggtttcaccgttttggtcaggcttgtcttgaactcctgaccttgtgatatgaccgcctcggcctcccaaagtgctgggattacaggcgtgagccaccgtgcctggcctgtttcttttatttttaaaaaaatgacaaaatgttaatatttgctaatactgggaaggaagtacaagagtgtttgttaaaattatgattttctgtacttttttgcagttttaaaagaaaggcttttaggctggacttctgaaatgacagagtgagaggaaggacctcagtaaatcctcttcccccaaaaagtaatgaaaatactggcaaaatcaaaaattatcaaaatcaatcatttcacgactttagaaattaaccaaaggcaaacaatcaattaaaaatcatttattcaagaaaaactatgccagacgtggtgactcatgcctataatcccagcgctttggggggccgaggcggatgtatcacctgaggtcaggagttcaggaccagcctggccaacatggtgaaaccctgtctctactaaaaatacaaaaattagcaaggcatgatgacaggcgcctataatccgagctacttaggaggctgaggcaggaaaaccgcttgaacctgggacacagaggttgtagtgagccaagattgtgccattgcactctagcctgggctaaaagagcaaaactctgtcacacacacacacacacacacacacacgaaaaaaaaaactagtaaacctcactaagaacagccaggtcatggttcacttggcactactactactcttcctgctctcccactggctccccagctccatgaaaactggtagcctcacagctacccaaggggatgaactgttttggagctctaccaaaagccctatccccagacagctgttgctatttgatctaacttaaagctcagctccaagaaaataaaggacactctatggtaactcaaatccacacaaagaaataaagagcaccagtaaaggtaacctgtaggaaagtgttaacacagcagaactgatctttagaaggacctgctcacagggctggctcctggctaaagtctgggaacttggcttgtgaaatattccctatgttgatatgatggttttgcctgcctagggcactgaacacctgtttttcttctgggagtctggatgcccgaacactagaggctgatgattttctggtatgatgtgcctatttttagtgggtcaaactggacttgcccacagacaaagtgaaaggagcttaacaaaaaaggcctagcttgccacttggatgtgcagtgcagctgtctggccctgtagcatcttggctttgcatgggaaaaaaaaaaaaaaaactatccctgtggggatttatttcctatcaggcacccagaactactggtggcagtgatcccatatggggatatgtcagagcacctgagataaagggggtaaaatcttataagctgaaacagagaaaaaaattatatcaagtatcaataatcagaatagctttacactgaaaattagatgacaatggagcaatgccttcaaaagtctaagggaaagacatttccatcctagaactctacttcaagccaaactctccattaggagtcaaacacttgtagacatccaaaaatctcaaaacttcatctcccatggacctacatcctttcttacgaaagtacttgaagactgtgctccaaccaatgaggaagggggcatggcataaagaaaatatggaacccagcaatgcagagggtgaagggaatccccagagtgacactgaagagcaatgtcaggatggtagctgtacaagaaggaatgagggtaatccacccagatgagagcaggtcagaaggctctagaaaaactcagggatatgacactgaggaaacccttgatatctccagaagcgctcagagtcactctagacaactggtgataagtatatggagaaagaaacaaatgaaagaaacaaaacaagccaggagaagtggttcactcctgtaatcccagcactttgggaggctgaggcaagagaatgacttgagtccaggagtttgagaccagcctagactctcagtccagtgagaccccgtctctatgaaaaacttaaaaaattagctgagtgtggtagtgcacagctatagtcccagctactcgggagcctgaggtgggaagatcgcttgagcccaggagtttgtagctgcaggctgcagtaagccaagaccataccactgcactccagcctgggcaacacagcaagattctgtctcaaaaaaaataattattaaccaaaggaacacagttatgcagggaaggtaaattaatcatagattactatgtggcttggctgtgtatagtatttatatatacagttagccctctgtatccatgggttttacgtctgtggattcaaccaaccaaggatcaaaacccacaaatacggagggccaattataccatgccattttatatcagggatttgagtatcaatggattctggtatccatggaggttctggaacaaatcccttgcagatacagagagctaactgtatagtcatattgtaaaaaatagtactgatggaaaacaaatttatggtataatcacattgggactattgggaaacaagaagtctatgtacatacgcatgcctttgggtgggtgacaggagcagcgtggtgagttcaatcttaaccttccacagtgaaacatttcaaataagttttgtaaaatatatgtaagttataaagaatagtaataccaaaaataatacctgggtatccaccacccattaaaactaattatagttatctttgaagttcttcatatgcccgtttcattttctttcttttcagataatcaatatcctaaattttatgtttatcatgcccttcactttctttacagtttcaccacatttattttattctttaaacctcaggcatgacctacgttaataaaactaagagtttttttttttaaatcaagagaatactgccttaggttggtaaatcggacatctcagatgaaacataatggtctagaaaaatgaccagaattgacagaaaatacaagaagcttgaataattcaataattgtttttttaaatgataaaaactgactccataatcaagtcttgccatatccagatggttttgaaaatgactagtatcaaactctcatgaaactaaatttcagtcacagtttcaaaaattacaagaaggaaaagtactcagtttattttatgcagctagtataaccttggataccagaataagagaagaaagtacaaaaaaagaaaatctaagatctattttacttctaaacattaatgcaaaattcataggttaaatactagtaaaatcaattctaaattaattttttaaagtagtttttttccaattctgtgaagaaagtcattggtagcttgatggggatggcattgaatctataaattaccttgggcagtatggccattttcacgwtattgattcttcctacccatgagcatggaatgttcttccatttgtttgtatcctcttttatctcattgagcagtggtttgtagttctccttgaagaggtccttcacgtcccttgtaagttggattcctaggtattttattctctttgaagcaattgtgaatgggagttcactcgtgatttggttctctgtttgtctgttattggtgtataagaatgcttgtgatttttgtacattgattttgtatcctgagactttgctgaagttgcttatcagcttaaggagattttgggctgagacaatggggttttctagatatacaatcatgtcatctgcaaacagggacaatttgacttaccaaaacagagatatagatcaatggaacagaacagagccctcagaaataatgccgcatatcgacaactatctgatctttgacaaacctgagaaaaacaagcaatggggaaaggattccctatttaataaatggtgctgggaaaactgcctagccatatgtagaaagctgaaactggatcccttccttacaccttatacaaaaattaattcaagatggattaaagacttaaatgttagacctaaaaccataaaaaccctagaagaaaacctaggcattaccattcaggacataggcatgggcaaggacttcatgtctaaaacaccaaaagcaatggcaacaaaagccaaaattgacaaatgggatctaattaaactaaagagcttctgcacagcaaaagaaactaccatcagagtgaacaggaaacctacaaaatgggagaacattttcgcaacctacccatctgacaaagggctaatatccagaatctacaatgaattcaaacaaatttacaagaaaaaaacaaacaaccccatcaaaaagtgggcgaaggacatgaacagacacttctcaaaagaagacatttatgcagccaaaaaacacatgaaaaaatgctcaccatcactggccatcagagaaatgcaaatcaaaaccacaatgagataccatctcacaccagttagaatggcaatcattaaaaagtcaggaaacaacagatgctggagaggatgtggagaaataggaacacttttacactgttggtgggactgtaaactagttcaaccattgtggaagtcagtgtggcgattcctcagggatctagaactagaaataccatttgacccagccatcccattactgggtatatacccaaaggactataaatcatgctgctataaagacacatgcacacgtatgtttattgcgtcattattcacaatagcaaagacttggaaccaacgcaaatgtccaacaacgatagactggattaagaaaatgtggcacatatacaccatggaatactatgcagccataaaaaacgatgagttcatgtcctttgtagggacatggatgaaactggaaatcatcattgtcagtaaactatcacaagaacaaaaaaccaaacaccgcatgttctcactcataggtgggaattgaacaatgagaacacatggacacaggaaggggaacatcacactctggggactgttgtggggtggggggaggggggagggatagcattgggagatatacctaatgctaaatgacgagttgatgggtgcagcacaccagcatggcacatgtatacatatgtaactaacctgcacattgtgcacatgtaccctaaaacttaaagtataataattaaaaaataataaatttattaattttttaaaatgcttcacaattaagtagagtttagcacaggaacacaagaacacttcaatatcagaaatttattcacgtaatctaccacattaatagattaaaggaggaaaaactgtcttctcaacatatgcagaaaataagcattcaagaaaatacaacactcattagtgattttttaaaaagtcttattaggccgggtgtggtggctcacgcctgtaatcccagcattttgggaggccgaagtgggtggatcacctgaggccaggagttcaagaccagcctggccaacacggtgaaaccccatctctactaaaaaatataaaaaattagccaggcatggtggtggatgcctataatcccagatacttgggaggctgaggcaggagaattgcttgaacccaggaggcggaggttgcagtgagccgagatcgtgccattgcactccagcccgggtaacagagcgagactctgtctcaaaacaaaaacaaaaacaaaacaaaacaaaagtcttattaacaaaataggactaataaaaggggctcttgatgaaagatatctttcaaaataccacagcagatatcatatttaatagtgaaagctatagaagttacatcatttctgtgcctcagtttttttcatatataaaacagggataacaaccagcctactttacagggtcattgggaggattcaactatttaatatgtgcaaagcatacagaacaatgcatttgtggcacatggcaagcattcaaatgctgcttattattttattacaatcattgtcttcatgattatttccactaaaatcagaaacaaagaatgcaatatcattgtatctattaaacattgtactacaggtcctaattcattgagagaagaaaaagaaataaaatgtataattggaaaagacaattgcctttataaagataattattcacatagaagaccgaagagaattaaaaaagattagtattaataaaagccttcagaaagatttctgtacacatgattttatgaatatcactagcattctcatatactaatattaaccaattagaagatgtgataggaaagaagatcccaatcacaaatgcaacaataactcagaggtatctaggaagaaattcaacaaaaaatgcacaagatcttcctgagaaaaaatttgaaacattattaaatgacataaaaggataactgagtaagagttcactgaaaggaaaattcaatagtataaagatgccaattcccaacccactcccaactcatttctaaacacakgcaattgcaattggaatcccagagttttccttggaactcaacaaacgaatcctaaaattcctatgggagaccaaaggatcaaaagagataaggggactaaagcctattagctcttaacagcattaattgataagaatggtacaacaggccgggcgcaatggctcatgcctataatcccagcactttgggaggccgaggcaggtggatcacctgaggtcggagttcaagaccggcctagccaagatggcgaaaccctgtctctactaaaaatacaaaaatttgctgggcagggtggtatgtgcctgtaatcccagctactcaggaggctgagacaggagaattggttgaacccaagaggtggaggctgcaataagccaagataacaccattgcactccagcctgggcaacaagagtgaaactccatctcaaaaaaaaaaaaaaagggtgcttgcctgggcacagcagagcaactgggttttggccgggcgccacagtggctcacgcctgtaatcccagcactttgggaggccgaggcgggaggatcacctgaggttaggtgtttgagaccagcctggccaacaaggtgaaaccccatctctactaaaaatacacaaaattagccggccgtggtggcacatgcctgtaatcccagctacgcaggaggctgaggcaggagaatcatctgaacctgggaggtggcagttgcggtgagccgagatcacgccattgcactccagcctgggtctctaaataaataagtacataaattccaggcaggttttaagaaaataaacagcaaatatttaaatttttaaaaaattatataaaaatatttttatgtgctcagccccccaaaaaaaatacttaaaattacacaaaaagggtygggcatggtggctcatgcctgtaatcccagcactttgggaggccgaggcaggaggataacctgaggtcaggagttcgagttcagcctggccaacatggtgaaaccccatctctaacaaaaatataaaaaaaattagttgggcatggtggcacatgcctgtagtcccagctactcaggaggctgaggcaagagaatcacttgaacccgggaggcagaggttgcagtgagccgagatggcaccactgcactccagcctgggtgacagagtgagactccatctcacaaaaaaaaaaaaaattacacaaaaagcaaactaaaaattgatacatttgattattttacaattaaaacttctactcaaaaagacaccataaacaacctagactaaggaaagatattgactatacacaaaattgaaatctagaatatacaaagaattcatataaagcaataagaagagacaaactcaacaaaaacatgaataaagaatatgaacaggtggctgggcacagtggctcatgtctgtaatcccagcactttgggaggccgaggcaggcagatcacgaggtcaagagatcgagaccatcctggccaacatggcgaaactctgtctctactaaaaatacaaaaattagctgggcgtggtggcacacacctgtagtctcagctactcaggaggctgaggcaggagaatcacttgaacccgggaggcagaggttgcagtgatctgacatcgcgccactgcactccagcctggcaacgagtgagactacgtctcaaaaaaaaaacaaaaacaaaaacaaaaaaagaatatgaacaggtaagccacagaagaggaaatctaactagtcaataacatatgaaatgataaatactttcaatagtaatcagggaagtgaaaattacaataatataccaatttacccttgccatattaccaaaattcaaaatctataattctgtgtgtgtgtgtacacgagtctaaatcacacactatctgtaacattaattttgccacataaggtcatagagctttgcattttaacattgatgattcctattcaaaagctgaattccatacatttcacgaagctgtatctgcccacctggctgcaatccatgcttttaggggattaatttgacatgatgttaaaaccagctctttttatttcaaagactggtaataaaatactatcaagtattttcccagtccgcaggcctttacgggactcaaaaggaataggtcaaaaccacttaatgtcctttatctctaacataccctttaaaagcataagagtgttggccgggtgtggtggctcacatctgtcatcccagcactttgggaagtggaggcaggcagatcacttgagtccaggagttcaagagcagcctgggcaatatggcaaaaccctgtctctaccaaacaaacaaacttagccaggtgtcgtggcatgtgcctgtagtctcagctattctgaaggctgaggcagaaggatcaattgggcccaggaggttgaggctgcaatgagccaagatggcgccattgctctccagcctaggcaacagagagagaccctctctcaaaaaattttaaaaagaagaaaaacaaagtataagagtgttaaggttaaagacgctaaggaaaataatttctttagagatagccattggaaagctgcggcattttctctctccaataggtgagtgaggagtgtgttcaccccaccccaatctgatgagaaggatttcaaagagatgacctgttcgatgtacatccactagactttaggggacacagagaacttggcacctgtctttcatgtagaaaaactataaatgacaggctgaggcagtctgtggtagtagagaagaggttgcgtgggggtgaactgtgggtcttactcccacaatcacacacactccacaagccagatgtggaccctctggacatgaacaggctgggttactttagaaagagggctttttgctagcatcaaggtgacctcagcaaaaggagactgaaggtacaccatggggcccggggatatattaaataactggttgggaaagtggcccttcctgcatcaaggaaattgcagtcaggggactccagctaggacatctccaaggaaaccataaagtgtcaagaacaggaagaatcagtctttggaatctgcaacatagagagggcatcagtattagattacaactttgttagttaggtcaaactttttttgcccattgtatctccttccttccttcctcacccactacactcaagggccagagatggcctaggtgttgagtgggggagaaagggaagggagaagagctagctggaagagtaaagaaagaaaacactgagcatgttctttttgccactaaaatctttcagcctgaagcaggtatttgctgggagagagcttttcctttaaatgaactttattgttttcaatactatatgtgattagacttactttaaaactaaaataagactaccactgaccctcagaaattgaaaggataagggaatattaagaacaactttatactaataaatttgacagacgaaactgataaactccttgaaagacacaaattattggctaggcgtgatggtgcatgcgtataatcccaacactctgggaggcctaagtgggcggatcacatgaggtcacgagttcaagactagcctggccaacatggcaaaaccccatctctactaaaaatacaaaaattagccaggcatggtggtgtacgcctgtaatcccagctactcgggaggctgagacacgagaatcacttgaacctgggaggcagagattgcagtgagctgagttggtgccattgcatcctagcctgggtgacagagcgagactctctcaaaaaaaaaaaaaaaaggagaaaagaaagacacaaattatgaaagctcattcaacaagaaatagatcatctgaataacccagtatctatcaaacttttaaggaagaaagaatacaattctacataaactcttccaaagaattggaaagaggagggaatacttcccagcttgttctgtgatcttattatcttgattgtggtgatgtgatcctgggtatatacatgtcaacacttaccaaactgtttgctttattttttattttttggagacagggycttgctctatcacccaggctagagtagaacaatcatagctcactgtaacctcaaactcctaggctcaagtgatcctcccaccttagcttcctgagtagctacgactacaggcatgtgccaccatgcccagctaatgttttttatttttggtagagatggggtcttgctatgttgcttaggctggtcttgaacttctggtctcaagcaatcccccccacctcagcctccccaagtgctagaattacaggtgttagccactgtgcccatccctgtttaagtacgtataatttcttgtatgccaaattaaaccacagtaaagggtttaaaatagctaaatcagtacttagagatagttatggcattcacaatgcttatattagaaaagaagggtctcaaatgatgacctaagcatccaccttatgaaactagaaaaagagcaaattaaattcaaactagcagaaagacagaaataaaaaagataaaagcaagaatgaatgaaatcgaggtttccatttctagccacaatagagtaagtctactacagcctctcctactgattattgcaacaaaaatctctgaacaaaatacataaagtaactacccgaggactctgacaagtcaacaaaaccaggaagactacggaggtgagccaaaaagtagagaagcaactcatacatcagtgggttccccttttatccctcatattctctctcaagactctgacccaaatacaggtcccagtgacttatgaacatacagaagtcctgagttcatccaggaactcttcactcaagagaaagcaaagctacataccaagccttgagaactgaactaagatttaagccacagctcaagtctgagactaacacctgagtgacaaatgtaagcagggcagtgaaggctttgaacactgcacaaagactgaacccaccactcgagtctctaatccctaaatggcacatgcacacgacagatcaaaaggctttgaaaactgaactggttggaactgacacccatagaaggtgagacagacctagtggtttattacctgataaagatgaaaagcaataatggactgggcgcggtggctcttgcctgtaatcccagcactttgggaggccaaggcgggtggatcacttgaggtcaggagttcaggaccaacctggccaacatggcgaaacccgtctctactaaaaacacaaaaaattagccgggcatggtggcaggcacctgtaatcttagctactcgggagactgaggcaggagaattgcttgaaccygggaggcagaggttacagattgcagtgagctgagattgtgccactgcactccagcctgggcaacagagtgaaactctgtctcaaaaaaaaaaaaagaaaaagaaaaaagaaaagcaataacgacacagtccaccactatccaggatggaatccaaaattattcaacataaaaaccaatcacaaagatgtgaccaattctccagggaaaaagacaataacagatgccaatcctgaaataacctaggtgctggaaatatcaaagacatttaagtagttatgacatctaagctccatgaggtaatggcaaacacctgaaatgaatggataaatagaagttctcaacagagaaacagaaactgtaaaaataaaaaaattataaaaatgattggaaaaaaaaacagggtctctggggacctgcaggacaataccaaaaggtccaatgttcatgttattagagtcctcaaagaaggagaagaagagactactgtagaaaaaaaattgcaaaaaataataaccaaaaacttcccatatttggaaaaagacatatatttacagactcaagaagcacagcacaccagaatcaatataaactcaaaagaaacaccagaaacattataatcgaaagcctggaaagccaacttaaaacatttctaatgcagccagaggaaaaaaaggtacactgcctacaaggaaacaaggattcaaggactgcaaaattctcatcagaaacagtggaggtcagaaaacaatggaacatcttaaaaatactaaaggaaaagaaatatcaatccataattctacatccagcaaaaacacccttcaagaatgaagacaagtgctcactgtctaaaattggaacatatactaaaattggaacaatacagagaagattagcatggctcctgtgtaaggatgacgtgcaaatttgtcaagggtttcattttttttataacacaaaggataaatgcttgaggggatggataccccattcactctgatatgattattacacatcatatgcctgtatcaaaatatctgatgtaccccataaacatatatacctactatttacccataaaaataaaaattaaaaaaaaaagaagacgaaatgtaaaaattatcaggtaaaggaaaattaagagatttttgtcaacagcagacttcttctaagagaaatgctgtaggttcttcttcaggtgaagggagatgatatcagagggaaacatggaactttgggaataaatgaggagcaacagaaatggcaaaatatatgggtaaatgtaatgtataatttttctccttttgaattctttaagatatatatgatagttgaaagcaaaaaaatataacactgtctgagggatttaaaatgttattagatgtaatatgttcgaaaactgtaacatgaaagaaattaaagatatctatactgttgtaaagcttctacatattacttgaagtattaaactataagtagaatgtgaaaggttgtgtgtgactatcttagtatctacagcagccactgattttaaaaaataacaaccaggcatgacatcacacttctgtagtccaagctacttgggagagtgaggcaagaggattgcttgtgcccaggagctcaagatcagcctgggcaacatagtgagaccccatcttaaaaaataaataaataggccaggcacggtggctcatgcttgtaatcccagcactttgagaggctgaggcgggcggatcacgaggtcaggagatggagaccatcctggctaacatggtgaaaccccgtctctactaaaaatacaaaaaaaaaaaaaaaaattagctgggcattgtggtgggtggctgtagtcccagctactcgggaggctgaggctggagaatggtgtgaacccggaaggcggagtttgcagtgagctgagatcgcatcacgccactgcactccagcctgggtgacagagcgagactccgtctctaaataaataaataaataaataaataaatagggcaggacacagtggttcacgcctgtaatcccagcactttgggaggctgaggtgggtggatcacctgaggtcagaattcaagatcagcctgaccaatatggtgaaacctcgtgtatactaaaaatacaaaacttagctgggcgtggtggtgtgtgcctgtagtcccagctactcgggaggctgagaaaggagaaacgcttgaacctaggaggcagaggttgcagtgagccaagattgcaccactgcactccagcctgggcaacagagcgagacaccatctcagatagattatagatagatagatagatagatagatagatagatagatagatagatarakawagatagatgatagatagatagatagatagatagatagatagatagatagatagatagataggccaggtgtggtggctcatgcctggaatcccagcactttgggaggctgaggcgggtggatcacttgaggtcaggagttcgagaccagcctggccaacatggtgaaaccccgtctctactaaaaatacaaaaattagctgggtatggcagtgtgcatgtgtagtcccagctacttgggaggctggggcaggagaatcgcttgaaccaggatggtggagcttgcagtgagccaagattgtgccactgcactccagcctgggcgacagagcgagactcgctctcaaaaaaawaaaaaataaataaataaaaataaatacatacatacataaaaatttaatttaaaaacaaggagacagtgacaaacagtaaagaggtatgtttaaaatataatatttaaattataattgcactactggaaattcatcccagggaaataaaaacttattacaaaaacctacagagaaatgtttgtagcaaatttattcgtaatagcccaacactggatacaacctagatgtccttcaacaggtgaacggttaaacaaacatgcataccatggaatgctactcagcaataaaaagaatcaagcttgatacatacaacaacctgaacgaatctctggaggattatgctgagtgaaaaagaactaatcccttaaggttacatacagtatgattccattatataacatttttcaaatgacaaaattatagaaacagagaacatattagtagttaccaggctataagaggagatgggctgggagaaaatcggtatgactataaaagagtgacggtcaggtgtggtggctcgcgcctgtaatcccagcactttgggaggccaagttgggcagatcacttgaggtcaggagttcgagaccagcctggccaacatggtgaaaccccatctctactaaaatacaaaacttagccaggtggtggcgggtgcctgtaatcccagctactcgggaggctgagacaggagaattgcttgaacccaggaggcagaggttgcagtgagaccagatcgcaccattgcactccagcctgggccacagagcgagaatccatctcaaaaataaataaataaataataaaaagagtgacatgagggatccttgcagtgacagaaatgttccatatttgatctgtatagatgtcaatatcctggttgggatactgtactacagttctgcaagatgttacctaccaatggggggaattggataaagggtacattacgatctctttgtattacttcttacaagtgcatgagaatgtataatgatctcaaaacaaaaagtttaagaaaatattcaaatgttccaaagaagagaggaatgggaaaatagaataacaacaatcagcaaaagggggacaaagaagaaagaaataataaaatggtagacctacatccaacaatatcaataattacaaaaacacaccaattaaaaggcagattgtcagttgagattaaacacacaagattcaactatatcatgtctacaagaaacgcaatttaaatataaagaatctgtgttcaacaagagacacaagaaagacagtgaaaagacaatctagactgggcgcagtggctcacgactctaatcccagcactttgggaggccgaggtgggtgtattgcctgagctcaggagtttgagaccagcctgggaaacatggtgaaatcccatctctactaaaatacaaaaaattagctgggcatggtggtgcatgcctctaatcccagctacttgggagactgaggcggaagaatcgcttgagcccgggaggtggaggttgctcaggaggtggaggttgcagtgagccaagatcacaccactgcactccagcctgggtgacaaagcaagactctrtctcaaaaaaaaaaaaaaaaaaagacaatctaacaaagggacagtatgcttgcaataaagcattgattaatatgtactctaccgaaaatagtgccactaggcatggtgtctcatgcctgtaatcctaacactttgggagactgaggcaggtggatcgcttgagcccaggagtttgagaccagtctaggcaacacggcaaaaccccatctctacaaaaaaatacaaatattagctaggtgtggtggtgcatgcctgtagtaccagctactcaggatgctgatgaggaagtaggatcacctgagcccaaggaggttgaggctgcagtgagccatgatttcctgggcaacaaagtgagacactgtctcgaaaaaaagaaagaaaatagtactatgggccgggcgcagtggttcacacctgtcatcccagtactttgggaggccaaggcgggggaggggggggaggtggatcacctgaggccaggagttcaagaccagcctggctgacatggcaaaaccccatctctactaaaaatacaaaaattagccgggtatggtggcacatgcctgcaatcccagctactcgggaggctgaggcaggagaattgcttcaacccaggaggcagaggctgcagtgagctgagatctccccactgcactctaccctgggcgacagagcaagactctgtctcaaaaaaaaagaaaagaatagaatagaatagaaaagaaaagaaaagagtgctatgaataagtaggaggaaggcacataccataagaaataaatgagttgaagacttacgcaggcaccgtgtaagatttacacaagtcactcaagttctctataaaatatgaaatgaggatcaattacattactaatcaaggaaatgaaagtttcaatcacaataagatactaatacacacctaccagaatgggaacaaataaaagtctgacaagcagaagtggcacggagggagcatctacaaatgttttacaaaccaacaacatttggccttatctataaattattcacacctccagaacccagacaccacaacctaggtatatacataggaaagctctcacagcaaatgttcctagcaaacatgtaaaataatggcagtattatcattaactatactagccttaaaccggaaacaacccaaacaccatcaagagagtaaatactggctgagtgcagtggctaatacctgtaatcccacactttaggaggccaagacaggaggactgcttgaggccaagagttcaaaaccagcctaggtgacataacgagaccccatctctatatgaaaaacaagaatagctgagcacagtggcacatgcctatagtactgtctactcaggaggctgaggcaggaggattgcttaagcccaggagttcaagcctgcaatgagctatgatcacaccactgcactccagcctaggtagcagagtgagaccctgtctctaaaaaataaataaataacttaaaagagagaagagtaggtacttttaattgtgtgatacccaaactagaacactatcctgcaatgaaaataaacatcatggctgaatctcacaactatagtagtgaataaaagaaataagtcacaaaataattcatatggatgattctgtttttacaaagctcaaaaaagaaaagttcaaactaaacaatatattgcctgtgtatacaaatatagatagcagaagctctaacaaaaatcttaaaaataattacccccgaatttgggatacaggttacatccaggagagaggtaggaggatgccatctggaaggggtagagtcgtagttctcaacctgagtggtgattatccaggtgttagctatatatttcttctgaaaagtacgcacgtgttctaaatgctcttctgtatgcaagatatagtaatcaataaggatttctttctatctcaaagaaatagaaaatgaaaaacacaaaaataaacacaatcaaaagctggttctgtgaaaagatcaatacaatggataaatcttaagtcagactgatcaagaaaaaacatacattatcaatatcaggagaacaacattacagatcctacaaatattaaaaaataataaggaaatcttatgaaaaaaactttattttattttatttctttatttttttgagatgaagtctcactctgttgcccaagctagagtgcagtggcacgatcttggctcactgcaacctccgcctcccggtttcaagcgattctcctgcctcagcctcccgagtagccggtactacaggcacgtgtcaccatgcccggctaatttttgtatttttagtagagacagggtttcactatgttggccaggctggtcttgaactcctgacctcgagatccgtctgcctaggcctcccaaagtgctgggattacaggcgtgagccaccccacctggccaaaaaaaactttatatcaaaaacttggtagtttagatgagacaaattccttccaggccacaaaccaccaaagcttgctcaagaagaaaagagttatctgaatatacctataattataaaaaaacaaatttgtagccgggtgcagtggctcacacctgtaatcctagcactttgagaagccgaggctggtagatcacctgacatcaggagtctgagaccaccctggccaacatggtgaaaccctgtgtctactaaaaacacaaaaattagctgggcatggtggcgtttgcctgtattcccagttactcaggaggctgaagcaagagaattgctcgaaccaagaggtagaggttgtggtgagccgagatcgtgccattgcactccagcctgggcgacaagagcaaaactccatctcaaaaaaaaaaaaaaagaatttgtagttcaaaacttaccctccaagaaaactctaggcccagatgttttcactgatgaagtctacagaacatttaagaaataatgctagtcctatataaatttcagaaaacagaagaggaggaaacacttcccaactcattttatgaggccagcataaccctgacgtcaaaaccagacacaaacagtgtaagtgaagaaaactacaaatgattatgacacatagcatagatgcaaaataacaaaatatgagcaaaaataaataggagcatatcaaaggaatgataggtcattatcaagaggggtttacacaggtaatgaaaggctggttcagtatctgcaaattggctaggcatggtggctcacacctgtaaccccagcactttgtgaggccaaagcgggtggatcacctgaggtcaggggagttcgagaccagcctgaccaacacgaagaaaccccgtctctatatatatacacacaaaaaaaattagccaggcatggtggcaggtgcctgtaatcccagggatgctgaggtgggagaaacgcttgaacttgggaggtggaggttgcagtgagctgagatcgtgccactgcactccagcctgggcaacagagattccgtctcgaaaagaaaaaaagaaaaaaaaaaaaaagaaaaatctgcaaattgactaggcatggtagctcacacctgtaatcccagcactttgggaggctgagatggaggatcacttgaggccaggagttcaagaccagtctgggcaacacaacaagacctcatctttacaaaaaatttaaaaaatagctgggcatggtggtacatgcctgtagtcccagctactctggaggctaaggcaggaagatcacttcagcacaggcgttcgaggctgcaatgagctatgaccataccactgcactccagccttgggaacagaacgagactccatctctaaatataataataattaattaatttaaaaataaaggagaagaagtatgatcatattcattgatgcagaaaaagcatttgcaacattcagcatcaattcatgataaaaattcaaaaaactaagattaaaaggaataatcctcaagcattgtcagcccaccaatggaaaactctacaaataaaaaattatacttaatgatgagaaagtgagtacttttgccctaaaatcaggaataaagcaaagaagtcattctcactatgcctattcaacacaatactaaagatcctagccagtaaaaaatggcaaaaagaggccgggcatggtggctcatacctgtaatcccagcactttgggaggccgaggcaggcagatcacctgaggctgggagttcgagaccagcctgatgaacatggagaaaccccatctctactaaaaatacaaaaaaaaaaaaaaaaattagctgggcatggtggtgcatgcctgtaatcccagctacttgggaggctgaggcagaagaatcgcttgaacccaggaggcggaggttgtggtaagccaagatcataccattgcactccagcctgggcaacaaaagcgaaactccttctcaaaaaaaaaaaagagggcaaaaaaagaagtaaaggacatccagattggaagggaagaaataaaactgtctttatttacaactacatgattgtttacataggaaatgtcaagctatctacaaaaaagttacaagctatctacaaaaaagttacaagttttaatatgtacacttagaaaggtcccagggtacaagatcaatatacaaaaatcaatggcatttctataagatagtactggccaatgggaaattgaaattaaacaaaataccacttatagtatcttataagaacaaaaaaagctggtattaattaaacaaaatgtgaaagacttatgcattcaaaactacaaaacattgagataaaatttaagaagatctaaatagagatacatgctattcattaattggaagactcaatattgtcagtatatcaatgatccacagattcagtgtaatcccatacaaaaatccctgcgggcttttgtgtacaaattcacaagctgattctaagatttatataaaaataccaaggacctagaataggcaaaacattaggaaaggaagaacaaagttggaaaactcatacttcctgatttgaacacttaatgttaggctacagtaattaaacagtgtattaatgatgtatagacagacacatctctgttcaactgtttggttttttttgagacagggtcttgctataccccaggctggagtggcagtggcgtgatcacggctcactgcagcctcgtcctctcgtgctcaagcaatcctcccacctcaacctcccaagtagtggggagtacaagtgcatgccatcatggttggcaaattttttaaatattttatacacgggggctcactatgttgcctaggctagtctcaagctcctaggctcaactgatcctcccacctcagcctcccaaagtgcttggattacaagtctgagtcactgtgcccggccattcaaaggttatcagcaacgatggcaaagtaagtcaacaacaacaacaacaacgaagagtattttcaaaactgctgctggaaaaattggatatacatatgcaaaaagccccctgaccctcacctcatgtcagatttacaaacttaactcattctttgtcataggtctaaatttaagagctaaaattataaatcttctgaaagaaggcataggagaaaaatctccattgctctgagtcagagatttgttagataggatacaaaaggcatgaaccataaaagaacttgataaactcagccttatcaaaattaaaaacgtctactctacaaagcacagttaagaaaaaaagaagccataatctgggagtacatacttaaaggacttgcatcaagaatatataaagaacctgctgggcacagtggctcacacctgtaatcccagccctccaggaggccaaggcaggtgaatcacctgaggtcagttcgagaccagcctggccaacatggcaaaacctcgtctctactaaaaatacaaaaattagctgggcatggtggcgggtgcctgtaatcccagctactcgggaggctgaggcaggagacttgcttgaacccaggaggcgaggttgcagtgagctgagattgcaccactgcactccagcctgggcaacagagcaagactccatctcaaaaaaaaaaaaaagatatataaagaaccttacaatttaatagcaaagaaaaatggcaaaagattacaacaaatacttccacaaagaagatataaagatagcaaataagggctcaacaatattcatcattagaaaaatgcaaaattaaatcacaatgagatccccctacacacctactagaaaaaaggactaacactaacaataccaagtgctggcaaggatgtgaaacacgtggaactcacatacattgctagcggaaaaaaaaagtggtatagccatgttggaaaacagtttagcagtgttttataaagtattccaacctgggaataatgttctctcaagtttatttttgaataaataaagagataatataaaaaacaagagttgagtgggaggaaggtactgaaaacaggaggaatctgaaaacaggtggcatcaagtcagatttgtaagagtctgggaaggaatacaaagagaaaatagaaaacagtgtgaggtttacagtgtttaccacaaaataagagcaggcaagaacatggtgggtaccaggctgggtagagtaaaggtcaccagcaaagctttgttgcctataccaactccaaaaaataatgtatgataatttccttgagtctaaaaaaaaaaaaaagactccaactttcagcctgaaagggcccacagtatgcccaataaagaggaaatgctgacatttgcatctagtctggtaaaaatacataagcacaagaagggagaaaaagttctaaaagcttccagaaaggacagggtgagaggaatgagaaggggcttggcacttctcactaacaagccaggaggctggaaggtagaaatgggatctcagaacaagagtggccacaatctatgtgaatgccaagcaaagaacacagagcctgtaaccggcggccaggcagaagcctcatttggacatgacaacagttctgctcatcagagcctaggcatgtccacaagtccgaggctctgagaagagctcctgagcacatcccagaggccaagctctcaccaaccaacctggtcccttttccctggcctgactcacctggcctgtcctcacctgcacaggtccgtaccggggtccctccatctgccatccaggactcgtcacctggtcccaacctgaagatcacatctggcttcccaactagatgccctgtttaggggacatgacataggactttgttattaatgctraggaattccagaacctaggcccacccctgcaggctgaaggtggcacggcctcggtgatggccccatgcacacagctatctgcccctcagtacagaacattcacatagcaagcaagggcaccaatatgctctccagtgtccaaaggagactacaaatactacacagtgggcagtaacccaaactcactgagggtggtaacccacactcattgttcctaggccccagagcttggagcagctgagaaagaaacacagtactggaggcattctgcatcaccctgtggcgcggtccctcacccacggacaccaggtggctgtagttctcaagcatgacatccctgtagaggttcttctgggcagagtccagttgctgccactcctccagggtgaagtccacaaacacgtccttgaaggtcaatgattcctgtaacggcacattcctctttagcaccccaggaccagcctggggcactgggacatggcacctcacacacacggagggcttactctgtgccctttgargtcctttacatgtackaaagatttcagtcttcgccgccaccctagaaggaacttgacagatgaagagtgtgaggcacacagagcctaaataaccagtccaggtcacacagccaggaatgagggattcgaatccacgcagtctggctcccgcatccacgctggcctttctttatataactgttcttatgccagtcactagtcagtttggcatagyatattacatagagtatatgactaaaatcattttgaactttataggagaaagagatagagtatgagaaatatcttaccctggaaattcattcattcaacacatgtttactgaatagaggccaggctggtaagtcctgtgacataaagattgatacaaaatgacaccttggccgggcgtgatggctcacgcctgtaatcccagcactttgggaggcctaggcgggcggatcacaaggtcaggagttcaagaccagcctggccaatatggtaaaaccgcatctctactaaaaatacaaaaaatagctgggcatggtggcgggcacctgtaatcccagctactcgggaggctggcgtaggagaatcgtttgaacccaggaggcggaggatgcagtgagccaagatcacgccattgcactccagcctgggcaacagggcgagactccatctcaaaaaaaaaaaaaaaaagacacctcttaaactcaaggagcttcagtttagtggagggagaaaagcgacacttagacactcatagaagaaacagaggcagcgaggaagcctgcctcacagggacagtgacagatgtaggacggggtccgggttgtccacaaaggaagaagtcaattctgcttagcgctgacagagcaggccttgcaggggacacagagctacaacaaacagttctaaacatagctaatcaatcatgacaaaccgttctaaccttcactcatcaatcatgaaacaaagaacaggaagccagaggtttgtggcctgggcagctgactgaagcaaaaggggaaaggtctgtgcttggccttgtcaccaccaaacaagaactcacttctacaagtgcccccaattccttgcaaagactaataacccgcctgtttctgctccagatcctatcctgtaacgcccacacttggtggccttcaattcaagccactcgctgcacccataaggcccaaatcagccacagtggcaccagtttacccagctgtgcaggagaggggcaggaaagccagtgtgccagagggyggggacaggcaggtttctccagcaggagggcttctcagagcaatccaggagctgttagcccaatctgcccctccctcgtgatagctccggtgctggggaacaaaaccacactgctgagtgctaggatgatgttgcttggaagccctaacctgttccatagaccagtatctcttgtaatggtcccagtggcatggcttcgaggatcccagcaaaagatgggcccagttacatatcactgagtgacaatgtgctcagaaaaccccaatccatggcttcctaccagccagtcatagtttactcagtcctccagtccagatgcagtttgtttaaccaatccagagtcaattttatctggagtaatgtcacctggtttgatattgtgaaatatatatttggtttttgtcctgtctcctggcaagaagctcctgcaacccttggaatagcctctgaagtgatcaaagtgtcttttatatgctaatgagatgactgttagctggctgcccctaggtagcttctggatggaagctggtcaccagaaaaccagacaggattagaaggttgggaatttcatctccatcctcaaaactcctgggaggggagaggagatgaaggttgagttgatcaccaagggccaatgatgatcatgcctctgtgatgaagcctccgaaaaaccccactgtggctgggtgtggtggctggctcctgtgatcccagcactaagggtggctgagaagggaggatcacttgaggccaggaggttgggcctgcagtgagccaagactgcaccactgttctccagcmtgggggacagagcaagaccttgtttctcaaaaacaacaacaasgacaacaaccaaagggctgggtgggttcagacagcttccacacagctgaacacttggtggttcccggatggtagtgagtccagagagggcatgaaaggtctgtggaccttcccacatcccttgccctatgcatctcttccatctggcggttcatctgtatcttctgtaatatcctttataacaaataggggaaattcagtttccgttagttctgtgactcactctagcaaattaatcaaacaccaggagggagtcaagggaacccctgatttgtgtcccatcaatcagatgtatagatgataccctactcgagactggcatctcaggtgggggtagtcttgtgggactaagcctcaacctgtgggagctgacgctaactccaggtagatggtgtcagaatggaattgacttagaggagacccagctggtgtccactggagaatgacttggtatttgggtaaacagcctggggcctgggattacatctcgtgtcaggagtgttgtgtcaagtgagagtagacagtaggaaaaacttgggtttccttccttatctctcagacccagtaaaacagccatcattccactgtcacgtttctagtcacacacagctaaatatgacaatgatgatgaaagttaataaccactaacagatcctctgagtagagtgtcagaggttacttcataaaaatgatactgcctgtgcacatgtaccctagaacttaaagtataataaaaaataataaaataaaataaaataaattaaaaaaaataaaacatatgtatgtggccaggcgcggtggctcacgcctgtgatcccagcactttgggaagccgaggcaggcraatcacgaggtcaggagttcgagaccagcctggccaacatgatgaaactccgtctttactaaaaatacaaaaattagccaggcgtggtggcgggcgcctgtaatcccagctactcaggcggctgaggcaggggaatcgcttgaaaccagaaggtggaggttgcagtgatgagccgagatcacgccactgcactccagcctgggcaacaagagcaaaactccgtctcaaaaaaacaaaaaacaaaacaaaacaaagtatgtatgtgactctcttaacaactaaacctcctctattaggaatcttactactgtgttacttcatctcaaatcttttaatagtctcctggtgactttgagaagtatcatgcagaaaacctctgcattttcactccactttgaaactggtcatgtcttgggaactgactcattctactaatcatatagcaaagagaaaaaacatagttcttagtttaaaacatgagcaattcattgtgtcacatatctttgtgttttggtaaattcatcattagagagagagaaaaaacatcaatggagtttaaaccctttgtctcgttaagtcgcaaaaaaaattattggactaaataaaccacgcagtgtcaagttcaaaaaagaatgatactgccttyacaaaaattgtaagagtgagaaaattatgacattgaaagagatctgatctaaccaacccctatcttgcctttaacctccaaattacccttaatcattcctcggcctggcccaagaaaactttgagagacatttgttttatagtttaaaagataatagaccacaggtgtccaatcttttggctttcctgggccatattggaagaattgtcttgggccacatataaaatacaccaacactaaagatagccgatgagctaaaaaataaaaatcacaaaaaaagtcacaataagtctcataatgttttaagaaagtttacaaatttgtattgggccgcattcaaagccatcctgggccgcatgtggctcatgggctgtgggttggacaagcttataatagccttctgcaaaactcaaccacctttgtaaagctgagaggccacaaggttaggaggatatgaggaggctaaaatctgctaacatgtagacataaaagatttccagctattattccggaggtcacaagatttggaactccccaattactcccgcagataatatcaccattatagaacctaagattggccttttgaggcattttttcaagtttttgcatttctgacgaccagtggctccaccaggactggccaacctccaccaaccggtcctatggccccacccagaagctgaatccatggcctaccaaactatccttgaaaaaccctaccctccaaattttcggagattgatttgagtaataactccatctcccatgtggcatggccagacttacatcaattaaactctttattgcaatgccgtggtctcagtgaattggttttgactgtgcagtgggtgggaataacccactggctggttacagcaaaaataaatcagccagacacggtggctcacacctgaaatcccagcactttgggagtccgaggcgagtggatcacttgaggtcaggagttcgagaccagcctggccaacatggagaaaccctgtctctactaaaaatacaaaaattagccaggtgtggtggtgcacgcctataatcccagctactcgggaggctgaggcaggagaatcacctataatcccagctactcaggaggctgaggcaggagaatcgcttgtacccgggaggtggaggttgcagtgagccgagatcatgccactgcactccagtcctccagcctgggtgatagagtgagaccctgtctcaaaaaaaaaaaaaaaaaaatatatatatatatatatatatatayacacacacacacataaaatctatgcagaaaagatgacattaggaaaatctggtggattagtccgttctcatgctgttgataaagacatacctgagactggctgatttataaaggaaagaggtttaattgactcagttcagcatggctggggaggcctcagaaaatttacactcatggcggaaggtgaaggggaagcaagacaccttctttacaaggtggcaggaaggagatgtgcaagcaggggaaatgccagaagcttataaaaccatcagctctcatgagactcacttattatcatgagaacagcatgggggaaaccgcccccatgacccattaccttcacctggtcccgcccttgacacgtggggattacaattcaagatgagattttgggtggggacacagccaaaccatatcttctggctaggtatttatggaggaaaataactcaataaaactgaattacccatctcactctgaaccctcaaataaattacacagggatgagacaggtctccctctgtcatccaggccggagtgcagtggtgagattatggctcactgcagcctcaacctcccgggctcaagcgatcctcctgaactcaagtgatcctcctgcctcagccccgcaaagtatctgggactccaggcacacgccacctcacccagctaatttttgtattttttgtagaaacgaggtttcaccatattgccaggctggtctcgaacttctgagctcaaatgatccacccgtgtcagcttcccaaattgctggaattactggtgtgagccaccgcacccagccttagagatttaaatgtgtacaagataaccataaaatagatcaaagtttttataattttacagtggctaaaagcctttcttttctgtgttttttttttcaagacatagtctcactctgttgcccaggctggagtgcagtgttgtgatctcagctcactgcaacctctgcctcctgggttcgagtgattttcctgcctcagcctcccaagtagctgggactacaggcacccgccaccatacccaactaatttttgtatttttagtagagacggtgtttcaccatgttggccaggctggtctcgaactcctaacctcaagtgatccaccaacctcaacctcccaaagtgctgggattacaggtgtgagccaccgcttccagccggctaaaagcctttctaagcaatccccaaattcagaagacatacagtcacagactgatcaacatgactgcctagacattagaaatttctaaatagcagaatgaattttttttctttttttttggagacagggttttgctgttgttgcccaggctggaatgcagtggcatgctcacagatcactgcagcctcgacctcctgggctcaagcgatcctcccacctcagcttccctcgtagctggaactataggcacgcaccaccacgtccagctaatttttgtattttttgtagagacaaggttttgccatgttgcccaggctagtctcaaattcccgagcttaagcaattctcctgcctcagccttccaagtgctggggttacaggcatgagccacagcacttggccaaaaattatattatgaaacatcaatatcaaagtgagaaaagtattagaaatatacaaaacaatgggctaatttcctttatacactaaaattctaacaaatcattatgaaaaagaccacaacctaacatataactgaatgaatataaaataaatatataacttaccatgtatccctttcatagtcttaaaaactaaaaaggttaataatacttagtacagtcaagtatgtagaaaaaacaccaaagaagttataaactatttacagcatttttgggaggaataattggttaatatatatcaaattttacattgcaaataccgtttaacaaagcaatgacctttctaggattttaccctatacctttaacacatcagtaagaagagacagcccaacagtatgaataaaatgctcatagcaacagaaatgttagaggcctagaaacacaaaaagattataagcctcactaaaagtcacatatatgctcattaaataataagatattgtcttttatccataagagtcactgctgatgaagagtattagaaattaaatactctcatataaaggctgattgatacataatttggytatacctattaaaggtatttgtttcttactttaaccagcagttgcatttacaggactctattctagtgaaatatttatgtgtacataaggatgtccaaggcagtcctattcgtattaacaaaaagtagaagaaagctctaaaaggtctggcacagtggctcacacctgtaatctcagcactttgggaggccaaggcaggtggatcgcttgagctcaggagtttgaaaccagcctgggcaacatggtgaaaccccatctctacaaaaataaaaaagggctaggcgcagtggctcactcctataatcccagcactttgggaggctgaggcaggcggatcacgaggtcaagagatcgagaccatcctggccaacatggtgaaaccctgtctctactaagaatacaaaaattagctgggcatggtggcacgcacctgtagtcccagctactcaggaggatgaggcaggagaatcgcttgaacctaggaggcagaggttgcagtgagctgagatcgtgccattgcactccagcctggcaacagcaagactccgtctcaaaaaaaaaaaaaaaaaaaagttagacgggcatggtggtttgtgcctgtagtcccagctactcaggaagctaaagtggaagaactgcatgagcccaggaggctgaggttgcagtgaaccaaaatcatgccactgcacttcagcctgggcaacagagtgagactctgtctcaaaaaaaaggaaaaagaaaaaaataaaagaaaaagaaagaaaacccaaatgtcctgtgttcctgggaaccccaaaatggtagaacaacagctgtattaccaggtgacattgcttatgagaaaaatgacccctgattggtaaataatctgcatgtggactaggactagagcgtagttaaataaattgctccatctatactctggaactgtcatgataaaaattgactcacacaggacgggtgtggtggctcacgcctgtaatcctaggactttgggaggccgaggcaggtggatcaactgaggtcaggagtttgagaccagcctggccaacatggcaaaaccccatctctactaaaaatacaaaaattagctgggcctggtggcgtgagcctgtaatcccagctactcaggaggctgagaaaggagaatctcttgaactcgggaggtggaggttgcagtgatccgagatcgcaccactgtactccagcctgtagagcaagattctgtctcaaaaaaaaaattgactcacacataaggatgcctgggatacttttgtctaaatgaaaaaaaaaaaagcaaatttcagaaaagcacagtaggagcatattttcattaaaaacaacccatgcaaaatgttgtggttttgtatatatataaaacaaaaaaattctgaaaggcaaacagtagaagggctgagactgggttcatttgttggaatgcaacagaaagggaggaatgaaaattggccctgttttcctggcttgaaaactggaaaaagtaaatatcctttcaaatggcatcatatttttttcttataaattgcctgccttatctttttgactcctttctaccacatttttttgttttttaatcattgttcatattacatacataaatcctctgtgtattatatgcattgcaggtattttctctcagcttcaaatatgtcttctgactctacaggttttaacattttaatacagtctaatctgacaatatttccctttatgatttctgggttttccatcttcattaaaaatgtttcttgcagggccaggcgtggtggctcacgcctgtaatcccagcactttgggagattgaggcaggcagttcagttgaggtcaggaattcaagatcggcctggccagcagggtgaaaccccgtctctactaaaaatacaaaaattagccaggtatggtggcacatacctgtagtctgagctacctgggtggctgaggtgggagaactgcttgaacccgggaggcggaggttgcagtgagccgagatcgtgccactgcactccagcctgggccacagagggagactccatctcaaaaaaaaaaaaaagtttcttgcactgcataaagttatccatatatcctcctaaatttttacccaatttttcaaatatatatttaggtctacaaccaatctagaattcacttttatatgatatagaagagtctttgtttccatacagatactcaactgtgccaccatcattcagtaaccactttttccacataactgaaataccatttttataatcttgactcacagaatcctatataagcaataaaagaaatctagaagtcacaaaagattgtgaaattagaccacattaacaaaatgtaagtgtccactccccaaaattaataagacaagtcaaagcaaatgaagtatgaaaaaatatttgcaacatatatgatagagatcttatttacttgagttaacataaagggctaccatccagcaatcaaattaattccacacccaagagaaaaggaggcaaatgactagaataaataattgaaataaggaagtacaaatgatggttaaaaaaaatgaaaagaagactgggcacagtggctcacacctgtaatctcaccatactggaaggcgagggtaggagaattgcttgaattcaggcattggagaacaacctggccaacacagtaagactccagctctacaaaaaattgaaaaattagccaggtgtggtggcatgtacctgtattcctggctacttgggaggctgaggtggaaggactgcttgagcctgggaggttgaggctgcagtgagccatgatcacaccactgcactccagcctgggcaacacagcaagactctgtctcaaaaaacaaatagcccagtgcaatggctcccacctgtaatcccagcactttgggagaccaagacaggtagatcacttgagctcaggagttagagaccagcctgggcaacatggcaaaatcctatctctacaaaaaatacaaaaattagccaggtgtggtggcacacgcctgtggtcccagctattcaggaggctgaggcaggaggatcacctgagcctaggaggtcgaagctgcagtgagctgtgatcgtgccaccatactgtagcctgggtgacagactgagaccctgtctccaaaaaacaaacaaacaaaaaatatgaaaagacactaatttcaggaaatgtgaattaaaatgcaccattcttatatgctgcatcatggcaaaaatcaaagcattggataatgcactgtgattgcccacttacgtgaaaaggcatatactgccgctaggagtacacatcagtatattctatttggagggcaaattgacagttctgaatcaaaattcatgatgcacatgaatctgacctagaaatctcacatctgacatactcacatgcaggcaacggaatgtactgtacattgctatgctgtttatagcagcaaaagactagaaatgtcctaaatgttcatcactaggagaaaggtaaatgaatattggtgttcccatgcaatgaaataccaagcagttgcttttgcaaacaaggtagaccactggttttaaacattggataattctctcccctaggggatatttggcaatgactacagatactttggttgccaaaacttggggagggattctactggcacctagtagagatagaggccagggaccctgctacacatacaatgcacaagaaagcagccacaacaaataatgatcagaaccataatgacaatagtgccgcagtaagaaaccctagggacaactaaatacaagtaaagtggaatgatcatgaagacaagaccagaaggaccagaatgagctctaatttgttagagaaaaagcgtgtcagagtgagaactagcacacacaggagtgagcagacaaagagattcatacatcctggccgggtgcgggggctcacgcctgtaatcccagcactctgggaggccgaggagggcggatcacgaggtcaggagatcgagaccatcctggataacatggtgaaaccccgtctctactaaaaatacaaaaaattagccgggcgtggttgcaggcgcctgtagtcccagctactcgggaggctgaggcaggagaatggcgggaacccaggaggcggagctcgcagtgagccgagattttgccactgcactccagcctgggcgacagagcgagactctgtctcaaaaaaaaaaaaagaaagattcatacatccagacagataagcatacatattctctgaaagactgtaccaaaaaatgaaggaatcttgaggatgggagaattattttttgccttttcttgaacaaaactttcatttgaatttttactatgtgtatgcattacttttaaatgttcaattttttaatgctctattcagaatacttttacattttgacatccatgttcttaagggaaactggtctataattttcttttttgtagtatcctcttcaaatttcaggttaagtggcttcacaaaatgaactgggtaccttttcatctttaatagcctggaaaaatggaacgcagaaattatctagtctttacatttagtgaaaggagtaattatgaaggatttcggagggcaaatttaagtctcactaccttttagtcaaaacccgacttccaggtataacctccataaacactggtactacagagcaagtagatacagagaaaattgttcatgaggtactgtatacaatagtaaaaaraaattaggccaggtgcagtggctcatgcctgtaatcccagcactttgggaggacgaggtgggtagatcacctgaggtcaggagttcgagaccagcctggccaacatggtaaagccccgtctctactaaaaatacaaatattagccgggtgtggtggcacgtgcacgtaatcccagctacttggaaggctgagataggagaatcgcttgaacctgggaggcagaggttgcagtgagccgagatcacgccactgcaccgcagcctgggcgacaagagcaaaactccatttaaaaaaaaaaaaaaaaggccaggcacggtggctcacacctgtaatcccagcactttgggaggctgaggtggacagatcacctgaggtcgggagttcgagaccagcctgaccaacatggagaaacctcatctctagtaaaaatacaaaattggctgggcatggtggcacatgcctgtaatcccaggtactcggttggctgaggcaggaaaatcgcttgaacctggaaggcggaggttgcagtgagccgatatcgcaccattgcactctagcctgggcaacaagagtgaaactccgtcacaaaaaaaaaaaaaaaagaaaaagaaattaaaaacctaaatatctgtgaatagaaaaatagttacatgatacatccatactatgaaataggaattaaaacaatctttatatattgacaaggaacaccacccaggatataatcaggttcagaaagcaagatgggtatgggaatatgatgccatttgtgtaaaagcataaaaaaaatatatacgtgtacgtttttagttcattaaactgacataaatgcatctaccccacagtttcacccaactgttaacagtggacatctctaaggaggaacgtggtactggggggagaagaaatagaaactttattggctactagtttcttctatgtacattaaaacattatacacaaacttattctcttaaacacagtaaaaaagaccaagcgatctagaagtgaagaaagaggaaaaagcaaggtgaatctatgtatttaaacaattcttctctgagaagaagaagaaaagatgaggtacagtttctggaagaacaagtagagagaggtatctttttgtttttcctctctcctggtgaggggaaggattagagaaaccagaggctgaggacaagttgaacagaaaacagccagagaagaggggataattggtattttcaagtttattatatagattccaaactttgcctcaatttcactggaaaaaaagtaggggtacattagaactcacctgggacatggccatcttgttgtgctcctgcaaaggatggagatctacaaatacagaattagaagggttgagttcagtgggtatagacataagatcatcatcaccaccctaataataattacctttgcaccctgggaagaatcatctaaaaataaggcctggtagcttcagcctattccatgggacgctactaagatcatgtgggttttgcacatgaaactttgtctcccttactggacagatgtatgacttgtgtccaaagccatctacatgtcagaaaccagtaacaacttaacatctcctttatctcaagagttctattcctagcacaaagatgcaaaatgttcaccattgtcatttccactatgaaaaatctgcctataatccctgcatgcggggggcgctgaaggaggattgattgaggccaggagttcaagaccagcctagacaatatagcaaggccttgtctctacaaaaccgaaaattaaaaaaattagctggcgtggtggtgcatgcctgtagtcccagctactcaaaaggctgagatgggagggtctcttgagcccaggagtgcgaggttagtgagccatgatcacgtccctgcactccagcctgtgtgacaacgtcagagcctggctcaaaaataaacaaaaaaataaaaaaatcttcgaagcaactaaatgtgcagcaaaggggacttagtaaaaaaatatgacacgtgcaaaacaagcatactacacaggctttaaagatggtttctgaactttgttttcagttcctgggtgtttaaagggaggttccaacaaagcaactgcagtgtaatctcatttttgttaagcaatatgtacaaatatgaagtctcaaacagcatttattcttttttttgtttttttttgagatgcagttttgctcttgttgcccaggctggagtgcagtggcatgatctcagctcactgcaacctccacctcccgggttcaagcgattctcctgcctcagcatcccaagtagctggaattataggcatgcaccaacatgcccagctaattatttttgtatttttagtagagacggggtttcaycatgttggtcaggctggcctcaaactcctgacctcaggtgatccatccgcctcagcctcccaaagtgctgggattacaggcatgagccaccgcgcctgacctcaaacagcatttattcaaatgctgacattggttacattgttcggtgattttaattttcttgtttatttgcatttttgacaaggaatattaattactaatgaaacaaaaattaaaatttattaaaaaatcacttcttatcaaacagagccctagaggtgaaaagacactctccaagtgtgtatgagtaagatctcttcatgtggtttggaggaaggagcccaaccagggctcaaagggccgcagggaaggagaggtgtggggctgggtgggtaacagccaagcactgtcagttctgtgaggggctgaaaaccactgtgcctgcttccctgcatccacctctctaactggccacctaccctgctcccaccccaccacttcctcctttcccatgatttgcattttgattgccatgctcctccttctttggcagattttcaaaagaaagttccagcaaggagattctgtgcagagtaaccatttcatactgcagcaatcactgtgataccatcaggacaacagggttcagctccgtgtagcttagcaggtcatgtcccctggcccactttcattaagcattgaaataaggcagcagagctggatgacagcatacctagagactactctgaaattctataaactaaaaatatattttctgcactttggtcaggatgaacggacactcagcatttcccctggaagcaggtgcctggttgatggtgtggggctgactcaaattcagaaatagccaatggcaagagaaggaagcatgggggtgcacaaataggtgtgctaggagaggccaatcctctgtggctggctgtgatccttcccagcctcatcccgcctttgcaggtactacagcagggcacctgcccccatgggggacatccatgcctccatccacctgtgactttcacctgtccctcctccagcaggaatcaaactgcactgtcacatggtcctccatggcacctggaagtagagccagctttgctctgtctcagctgaagtgagggacaaaggccactacgggtccagctcttctaggacctgctgtcccgtgagcctcctttgctctgaggatctgggtctgggctcttgctgaggcttctcctccaactcgcctcagctcagcgtacctctcttgtgtccaaggcggcaggaccaagggattcagagacaaacacaccccagttggggccatcactatagcactagatctctgcctgtgacccagggaactcacctcttcctggggcctcagcctaagtcttctgcgactaagtggggaagccgaggcacagataaactggagtctgaaatcggtgagcagtggtctcaggtctgcactctgaccctggaaacacaatgaccacaggagattcaattagcaacacctatgctcccttccatgcagtgaagttgagtgaaacccaaaggtttttacccaacagaagagggacaacccctcattctagttttaagagttaacattcatgcacagctcaattatcctcagtgagcgaaaccctgccttcctgagtccgggctttggaatcaactgactggctgctgtgccacttttattcactgaagaaatgattgccttccatgagccggttctccgtgttgcaaatccatcagtgaacaaaatctcaaattcccagctccagatttctagtctggaggaagagacacactggaaacaataaacatgataaacaaagtacaggaaaagaaaaagaaaaaggattcctcgggtttgctacctacgggactttggacaggttgccaagccacactgtaccgttttctctctataacatgaaaataatcatcgtaacacctcacagggctcctgctaatgtgaaacatttgcaagagtgtctggcagttaccaccgggtgaggatacaagcgctgagtgactcaatcaattagtcactcgctggccccgaacctcgcccccaacactcacgcccaccgcctgtgtcactcaatccccacaaggacgctcacccgtggccccatgaccccacggccccgtaaactcccgtcattcctcccgtccccccttcccccgatcaaaaccatcaccacctcaccctcccgcttacttcactgccgacagcctgaaacctcaggggcggatgacaacagccagtgtgaacgaagcgccaccctccgggtcagccgagcatttccgcttcccacagccccctgggaacgtgaagtcaaagcaatgcgcacgcgcagtggctttgaaggcggggcaacaaagcctgtggccgatgtggcgctcctcggcccgcgcttcagtggttatgacagtgttcgctctaaggggagaaggaatgtgtgaccatttccaacggtaagtcgtacaaaaggtccggggaggcgtacctgggcggcgagaggcgagagaactccgcgcgggctttccagtgcccaggcccctgccggctccgaagccgaaatcccttcttccacttcgttctcttgcagtggacgtggggtgttcccacccctctgtccccaaggccactgtttctgtcttccgctcctaggaataggaaaaagagtcgcgcctctggcatctgtggcagctccagagcgcggccctctagggtccaggcaggccacatggagcggggccctaggcctggctcagagcgtcctaagagcaacaggtctggctcagtcggggaagtggcctggaagaggggctttggagccgggcttcagagccagcaacctcccgaagtgagggaagaaagcctcattctgattgttctctacccagtggtggggctccggttcctaggatcttagacaccctgggagaatctggattttactttttagcggagaggtgttttctctgagaatgccagccagtggcaacatggcccgctaaaaaggcctgtagtaaacttgaggaaagttttctgtttcctgtctgggtctgggagaaagagaacaagtgttgttctccatgcttactatgcctgcctggtcaccaagcgggcctctttgggtcaagtatgacagagtctccctcaggtacacagcaaacccttctgtgctagagccagctggtgccagacactgttcatagatgtgtccaagacatttgtgtaatctatcagacacgtatttaatttccatttgaacatgagtgtttttcctctttctctttctcctctcaggttaacttgcattccccagatagtttggatgagttacaacctaaatctgcaaactcaatacagccagaccctgggaagtgactctctccaagcctcctgtacaagtcccaggaaaagagcctgttttcccttggacatgtgagcagtgaattactgctcattcagaatttcatgtgtatgtgttactgatggccaggtttagagataccaacctatttatttctagaggagaggtgatttgataaccttttcagatatcactatcagtaggcagaaaagggttaatagtatgatagggttaatatgtcctgaggagagtaaagaaattgcaaactgcagaagcacctgatctgtggccctggccagcatctctccatatcctgattctgtaagatcaagtgtttatgcagaaagagaagggactgatgatttgaatgtgaccagatgcagggcatgcccttattgccatgccagcatttgctattcatgatgttagtattcaaaaatcaagaaacacccttcctgggccattggtgtctactaatccattggaagaaaagactggaatccaccacttactagcttcttgggcctcagtcccctcttttctgccatagctaaggaccacctaacctagatggctgttgttattgttcaaagggacatctttagagcctcaagcccaggaatagcccgtggcaggcacctggtaaatgttagttttcattgtcctatcccaacactatgaaacatgcagcactctctgcaactgcccctgtggatttccataggcaggagagtatccagtgttgagtggagctggtattctcagaaacgaagcccctttcctcattttgcgccaatctcttcagtcatttttaccctagtagtataatgctttgtcaaagtcactgtcatctgatgttaacagttgttttcgccagatgacttttcaaaaggtaacttcaccataataccggttaatgtgataaaaacactgcatgtagccaattttttttttttttgagatggagttattggctcttgttgcccaggctagagtgcagcggcgtgatcttggctcactgcaacctccatctcgtgggttcaggtaattctcctgcctcagcctcccgagtggctgggattacaggcacacgccaccatgcccagctaatttttttgtatttttagtagagtcggggtttcactatatgttggccaggctggtctcgaactcctgacctcaggtgatccgcctgcctcagccttccaaagtgctggggttacaggtgtgagccactgcgcccagccaaatattttcttatttatttatttattttagagacaggatgccattatgttgcctagtttggaatgcagtgtctatttagaggcgtgatcatggcatactatagcctcggctcaaaggaccctggtctcaaaggaccctgccaccttagcctcctgagtagctgggacaagtgtgcgccaccacacctggctaattttttaaattttttgtagagatagtgtctcgctatgttgcccacgctggtctggaattcctggactcaaggcctcttcctgccctcagacttccaaagtgttaggattacagggtgagtcaccacgcccagccagtgtgaattttctaatgctgagtaagttgtgatccagaagtaaatgtatctgcaagctgatttaaattgtagattttctcttcattgcatattttctgatgttgaataaagtctgagtattaactaaagtttttgcttcttaaatatgtaagaattgtcctcaaaatctctattcttgagcacagtagtaaaaatatttttacatacattgtatttcaagggttctgcataagcaaccttgttttattgtgacaatttatttgggaattgtatcaaatatataatactgagatgttctcattccttttgtgaaaatacttttgtttaaaaaccactgccttcaaatgaaaaccactaggtttgttatgcttgcctcatcttttctcggtgtttttctttcattttttaaaaatacatgtctttcttttttatacctaaaacagtgggtttttaaaatgtgatatgtgtatgcgttgtataatggttaccacaatcaactaatacatccatcaccatccatactgtaccttagatctgcagaacttgttcatcgtagaatgtttttaccttttaggtcagacgtggtggctcacgtctgtaatccttgcactttgggaggccaaggtgggtggattgccagagctcgggagttcaagaccatcctgggaaacatagtgaaaccctgtctctactaaaaatacaaaaaattacccacgtgtggtggygcgcacctgtagtcccagttacttgggaggcagaggcacgagaatcatttgaacctgggaggcagaggttgcagtgagctgagatcgtgccgctgcactccagcctgggcgacagagcaagactctgtctccaaaaaaaaaaaagagtgtttttattttttgaccaacatctctccatttcctgtctcccactcctgcatccccagtccttggtaaccactgttctactctctgtttctatgagttcaactttttaagatttcacctttaagtgagataatgcagtatttgtcattctgtgtctagtttatttcatttagcatactatcttccaggttcctttttccctctgtgtctcaagtccacctttgcattgtcactttcttttctgaaatgaaaatggtattgtggctattacctagctagataccaactatgggctttgtagtatctggattagctgtaatgtacatgtgaatgatgactagtaaaatatatatagtaggaaaaatgatgcaattcaaaaagcaagaacacaagtataaataagcctaagaaggttggacatcatctatataaaggaaaataaactgtactccttagtgaagacttaatactgtaaaacctggccgggcacggtggctcacgcctgtaatcccagcactttgggaggccgaggcgggcagatcatgtcaggagatcgagaccaacctggctgacatggtgaaaccccgtctctactaaaaatataaaaaaattagccgggcatggtagcgggtgcctgtagtcccagctactcgggaggctgaggcaggagaatggcatgaacccaggaggcagagcttgcagtgagccgagatcacgccactgcactctagcctgggcaagagcgagactccgtctcaaaaaaaaaaaaaccgaaattgtccctaagcctaattgatagatttaaggcaatttaaccaatatgctaaatgggatcaggggcctatagtacaattatacttcattttaattggcagaaaaaatatatgaacaactaagagtatttggtggatagaggtaacatgggaagactcatcttacaagatattagagggcattataaactaaagtaaataatgtggcatagagcagaattagatcactgaaacaaaaaaatccagaatcagaatatatggaatgtggagtcctgataagtaagcaacaagaaggaaggggtcccaggtgagagagaacaattgttctatagatggctaattgcagacaacctgctggcacacatcctgttcccagataccttgttttgcatgtggcctttccagcacaaccttataaaacttaaaacctccagcccctgcctctcagacagcctcttctctgctgtgctgcccattgaacccttacaacgtatcttcaaactttctctgataaatctgcctttctttacctatgactgttttggcaaaattcctttactgtccacaacaccatccccactcagttgtacccaagacagggaagactaaatgtctgacgtttaccttaaaaagtatgaaaaaataagttgagaggggccaagcatggtggctcacgcctataatcccaacactttgggaggctgaggtgggaggatggcttgaacctaggagtttgagaccagcctgggcaacatagtaagacctcatcactaccaaaaaaaaaaaaaaaaatctgggcatggtggtgtgtgcctgtagtcccagctacttaggaagctaaggtgggagagtcacttgagcgccagagctttgaggctgcagtgaggcttgatcatgccactgcactccagcctgggcaacagggtgagaccctgctgcaaaaaaaaattattataaacctacttatgctaagttataatggttgacaaaaacgtcagtagaaggcagagttccaatgtatatccatgtatgtattgaaaattaaaggtgttttcagtttgtgaaaattgacaggattgatgtgatataaatctgtaaggaaaaaatcctggacccctacatattatatataatgacaaattccaagtggattaaaattaaatatgaaaaataataaaatatatacgggctgggtgtggtggctcacgcctataatcccagcactttgagaggccgaggcaggtggatcacgaggtcaggagattgagaccaacctggccaacatggtgaacccctgtctctactaaaaatacaaaaattagctgggcgtggtggcacctgcctgtagtcccagctactcgggaggctgaggcagaagaatcgcttgaacccgggaggtggaggttgcagtgagccgagatgatgccactacactccagcctggtgacagagtgagactctgtctcaaaaataaataaattatatatatatgaatattatataacatcatgatggagcataaaccagaaggacaaccctgaagccataaagtaaatcctagacttcatttaaaaatgtatatatattggagacagtgtcactctgtcacccaggctggattgcagtggcatgatctcagctcactgcaacctctgcctcccaggttcaagggattctcctgcctcagccttctgagtagctgggattacaggcatgtgccaccacacccagataattttgtatttttagtagaggtggggattctccatgttggtcaggctggtctggaactcccgacctcaggtgatccgcctgctttggcctcccaaagtgctgggattacaggcgtgagtcaccgcgaccggccggttttaggtattctttagatgacagttggttgagagagttaagctgttgtctgaagacatgaagtcagtagaaaggaatgcttgagttaagataagggggttatgggggctgaggaccttgttatgtagatgaaggttcctaagtagcagccctcagagagaatagatggtaaatgtctctttcagaccttaaagacatcagactggcagttaatctctcctagatctggaaaaggcctagaaagggaaggcctgggtgcattaatggagattctctaccaatgcaaatttccactgcaaaaggcagctttgcagagtcacttcaatgtgttggccctgtggcagccattttaaaatatgtcaaagaaatatattttgggataaaataatttggtttccttcagtgtctgctatctatcatgtgatgctataccagagtcaggttggaaagtaagccacattgtgtcaggttaattttaaaaatcgaattagatttttatagtttgtagggcatgactccccagaccccttagataggaatttcaagatcagagtttagtcctcatgccataggaaatcaaaagacaagttatagactgggaagaatatttgcaacacttaagaagagaggtgatattgaaactgcctttgcaaaaattttaacagtgagaaaattataacagtgaaagagatctgatccaaccaacccccatcttgcctttaaactctaaactgcccttggtcatccctgggcatgggccaagctaactgggggaaatgcagtttgcagtttagatgataatagcccttccccaaaactaaagcacctttgtaaaactaatgaggccgggcacagtggctcacccctgtaatcccagcactttgggaggccaaggtgggtggatcacctgaagtcaggcattcaagaccagcctgaccaatatggtgaaaccccgtctctactaaaattacaaaaattagccgggcgtggtggccggtgcctgtagtcccagctactcaggaggctgaggcaggagaatcgcttgaaccagggaggcagaggttgcagtgagccgagatagtgccactgcactccagcctgggcaacagagcaagactcaatctcaaaaaaaaaaaaaagaaagatgaaaggggcctgaattttgctaagatgtaggtggagttaaatgattaatggccattgttccagagaccacaagatttgcaacttcccctgttaatcctgtaaataacatcactattgtagaacctaagattggccttttgagatgtcttttcaggtttttgcatttatggtgaccggatggctccactccggactggcaagatggactcatgactcaactggtcttgtggcccccacccagaagcagacttggcacacaaggaccattttccacacccctataattgcacttccaaccaatcagccccctgtctgacaaactatccttgaaaaaccctaacttctgagttttcagggagattgatttgagtaataattcatctcccacgtggcgtggccagcctcatgtcaattaaactctttctttcttttcgagatggagtctcactccatcacccaggctggagtgcagtggcatgatcttggctcactgcaacctccacctcccaggttcaaatggttctcctacctcagcctcctgagtagctaggactacaggcatgcgccaccatgcctggctattttttttgagactgagtctcgctctgtcacccaggctagagtgtaatggcatgatcttggattactgcaacctctgcctcctgggttcaagcgattctcccacctcagcctcccaagtagctgggattacaggcacatgccatcatgcccagctaatttttgtatttttgtagagacaggatttcaccatattggccaggctggtcttgaactcctgacctcaggtgatccacttgccttggcctctgacattgctgggattacaggcatgagccaccatgtccggccttaattttttgtatttttagtagagacggagtttcaccatgttggccaggctggtcttgaactcctggcctcaagtgatccacctgtctcagcctcccaaagtgttgggattacagatgtgagccaccacacccagccaaactctttattgcaatgccatggtctcagtaaactgattttgtctgtgcagtgggcaggaagtgttaccagcagcaaatccaacgggtctatacagcaaactcgattcttgcccccttggaggaaagaacttggccaaggggcagaaggcagagtgagagaccaaggcaagttttagaacaggagtgagagtttatttaaaagttttagagcaggaactaaaggaagtaaagtacacttggaagagggtcaagtgggcaacttgagagatccaagtgtgctgttcagcccttgacttgttttatacgctggcatggttctgagatttccatttctcctctgtttttccttggagtgggctgtctgcatgcaccatggcctgccagcacttggatgaggctgcacgcacagtgtgtttactgaagttaggcacatgctcatttgaggcatttttcccttaccagtcaagcgttcctagaggaatgtcatacaccagttaaactccgccattttgcctcttagtgcacatacttgagcccgtttgcctaactcctgatatcttatttggaagttgctcattaccagcttcaggtgtttctatccattgagagattgcctttctctggtgccagctgcgaccaattattattttagcaagacagtttaacaaccacctgaccatcacctgatggttgcctggggatttgggggccttctcctgccctgttcatgtctgcctagctacctattctaacagaaggacccactggatgattacaatgtctctaataaaaaaatatccccacaaactgctatttgtaaaatatgtaaaagtgtttatgtaaaagtgtacgtatgtaaaagtgaacatatgaatagaaaatggaaaaggagtctgggcgaggtggctcatgcctgtaatcccagcactttgggaggccaaggcaggaggatcacttgaggtcaggagttcaagatcagcctggccaacatgatgaaaccccatctctacaaaaatacaaaaattagctgggcatgatggtgtgtgcctgtaatcccagctactcaggaggctgaggcggaggttgcagtgagccgagatcgcaccattgcactccagcctgggcgacagagcgagactcaaaaaacaaacaaacaaaaagtgctacttgttaaaacattttaaaggataattgatctgaattgcccattggagaaagaatatcctcaaacaaagcacagtggtgaatagtatttgcctatgtgttctggtaatttttcaccagctgagctagtgtaatcatcttgctaaagaaaagttctacagttctaagtaatcatgttgatttgaaataccacttacgcaacaaagttgaattgtacatcttttcttcccccagcagatggtgacattttatagaatatggaaaaattatccaaatggatgagtgagctatataactgaaatataatcgtctctatttcatttctcatttatctacatcttgaattcatttacaaaaaggcattcatcaggaagtaacatttaaagactatgctttcaggggtcatttgtttttcttttcttttctttctttctttttttttttttttttgacagggcctcactctgtcagccaggctggagtgtaatagtgccatcatggctcactgcagccttgacatcccaggttcaagcaatcttcccacctcagcctcctgagtagctgggactacaggcacacagcatcacactgggctatttttaaaatttttctgtagagacagggtctcactgtcttgcccaggctggtctcaaactcctgggctcaagcaatccttcctcagcctcccaaaattctgggattacaggtgtgggcccccatgcccagcaagggatcgtttctatagttccttcctaggaaagtttctctgaacatgtagagcatgttttttaaaaagtaacatttatgaaaagaagactaagaacaattaaaaaataacatatagaaagtagaatttttcaggccaggcatgtcatgccagcactgtacacctgtaatcccagcactttggaggctgaggtgggcagattacttgaggtcaggagttcgaggccagcctggccaacatggtgaaaccctatctctactaaaaaaatacaaaaattagccgggcatggtggcaggtgcctgtaatcccagctacttgggagactgaggcaggagaaccgcttgaacctgggaggtggaggttgcagtgagccgagatcgcaccactgcactccagtctgggcgacagagcaagactatgtctcaaaaaaaaaaaaaaaagaatttttcaatgtcttcaattcttagtttgcacagtgtttttactagatattttctcatcaggtcacatcagcctacctatttacaaaaataaaatagtaaggacaaaatgctaaagagggcaaatctgtctttaattaatgtccatctcaggccaggcatggtggcttacacatgtcatcccggcactttgggaggctgaggtgggagggtagcttgagcccaggagttcaagaccagcctggacagcatagtgagaccctgtctctaagaaaatgtccacctttgatttctcttcactccttttttccatgcagggccttcactcttctgtttctcaaattccttctttagtattatttcttccttcctttaagcttcacacagtaaagtttgcttccctactttctaaccgagagtatagcatataattaaaattcattcttaggtatatgtaattagtattctcagcttaatgtgccaattataccagggatatttcattcactagttcaaacggaacatcaattggagatctctcatctttcagatattcttgctgagctcacagtccatccagaaagagaaacaaattcataacactaatgtaagaggttttctttctttttgagacggagtctcactctgtcccccaggctggagtgcagtggtgcaatctcagcctgccgcaacctctgcctcctgggttcaagcgattctcctgcctcagcctcccgagtagctgggattataggcacccaccaccaagcctggctaatttttttatatttctaatagagatggggtttcaccatgttggccaggctggtcttgaactccttacctcaagtaatccacccacctcagcctcccaaagtgctggcattacaggcatgagccactgtgcctggccataggagatgttttaatgcagctgtgtacaaggtggaaacctagaaaatgaatcattaattctgttgaatgaactttatatgtgagcttcaaatttaagtgagatatgacagactgaaatgtgaacaaaaggtattttaggcagatggaacaacttgagctcagatatagaagcatcaaactgttcagcatttttgtgaaacccagaaaattctgactagaactcacagtattaaacagtcagtgtgccaacagaattgggatacaggacggaggaggaagagagaggaagcagtggaaagagactgcagaggtagatgagagccagactgggaaaatccttagaaggcaggccaaggaataaggacagcactgtaaaaacccttatgaggtgtcctaaggagtgtggacttgattctgctggccccagatagccttcttaagaaggtgtggagatggtagaggatggaagcagaaagaccaattaagagatgatggatcacacaaagctagagaggaaaagcacaatgtggattgatgaatggtggcgtcttgttggggggagagttaatgayggaggcatatttaagagatatttgcatggtagacttatggggctaggatgtctgattggatgtggtgcccgagaaagggagaggcatgcccaaagatgactgtggggtttctaattctggcatcttgctgtgtaataataacattcaaaacagaaattcatgaggaatagcagatttgtagaggatttgcttggggacaagatgaatgtggggcacctgggttggggggacatcaggtagaggtgctgagacagaattgaaaacatgagactaactggagttcaggagataaatctggagatgatttttctttgggtgggggagggacagagtttcactcttgtcacccaggccagagtgcaatggcgtgatcttggctcactgcaacctccgcctcctgggttcaggcgattctcctgcttcagcctctcgagtagctgggattacaggcaggcaccaccacgcccagctaatttttgtatttttagtggaaacggggtttcaccatgttggccaggctggtctcgaactcgtgacctcaggtgatccacctgcctcggcctctcaaagtgctgagattacaggcatgagccaccatgcccagcctggagatgatatttaagagtgaataatgtaaacttgttgggagaagccatgggaattgaaaatctcaggtggttgagtacaagaagagggggcccaacatggaaccttggattcccaatattttaggttaggtagaggctatgaagaggattaaggaggagcaagaaatgaagcgatgtttaagtacaaaagatggtgagaaactcctctcacagcacaacttgtatactcatgggagatggagtggtatacagtgatatcctaacaatctctctagagtaatccttgccccactttgaccagagcttggaagcctgtccagtcttcacattagaaagtcaacattttaagaatgtgaagaagtaagagtgttataaaagatgcctgacctacaccatgtaattaattttcctttttgttaagaaaatgttgaaattagcaaacgtggctgggggcggtggcgcacacctgtaatcccagcactttgggaagctaaggcaggaggattgcttaagcccaggagttcaagaccagcctgggcaacatagtgagacccgcatctctacaaaaataaacaaaattagccgggtgtgttggcacatgcctgtggtcccagctacttgggaggctgaggtgggaggatcgcttgagccccagagattgggggctgcagtgagctatgattgccgccactgcactccagtctgggcttcagaatgagtacccatctcttaaaaaaaaaatactaaaactaagttctattacaatttatgttttacttctcataaaataaattatacatattatcacaaggaagaaaaatgtgtaaaattagaaaaaattcctgtgagaagccactctttgcccagaaaatatgtttgtttattgatttatgtttttattagaaaactcaaaaggacctggtaagtgttctgccactggatttcaacaggaaatcaccatttctgccctctgggaggtagtaaaaaagattggaatacctcctcttttgaagaggtcaggaagtgtggtagatgctgtccagattctccttctggaataaaggaagtattctccagctgctgggagcggtgcccacagaaaaccctcagctgtcagcaacttcagtgattgccttggctaaaaagagctgcctcacccaaagttgcatccttctaggggtcagcctgcatctaatagctgaaaaacagggggcccagccctctcccctcaacaagcgacaactccgaataaccacctcatcttcaaagatcaccatgtggtagaccaagagagacaatgttgggcttgtgctgccacctgacttgcccctctgcccaatcctacatccttcccttcccttcaatagatgttgatctcaagggccctctctaataaatctcctgggtgcagagtttgaaaccagcctagccaacatggtgaaacctcatctctactaaaaatacaaaaattagccaggtgtggtggtgggtgcctataatcccagctacttgggaggctgaggcaggagaatcactcaagcctgggaggcggaggtttcagtgaacagagatcgtgccattgcactctagcctgggtgacagagcgagactccatctcaaaaaaaaaacaaaacaaaaagatatcctgggtgctaatctccaactcagagtctgcttcccagagaactcaacctataatgtgagtgaaatcacagggcttggacaaggcttgcaggcaaaccctatatccatccaccttttcatccattagagctcagaagctcaaggcagcttgggcattggaagtagagccatgaatacctggggtttattttattttattttaaaatgtatctttcagtaaatttcattctttttggtgtatagttctacgaattttgacaaactcaccaagccatgtaactactaccacagtcacgatgcagaagaattctaattccccccaaagaactacctaatgctgtcctgttatggttgattcctctactctgtgcttaatccctggaaagactaatctgttctctgtcaatatacttatgcatattccagaatgtcatataaatggaataatacagaatgtagacttttgagccggcttctttctcacagaataatgtatttgagattcagccacacgtgtcattgtgtgtatcaatagtctgttcctttttattgctgagtagcgttccattgtatggttgatcacaatttgtttctccattcaccagttgcttccagtttttagcaattacgactgaagctgctatcaacatttgcatataggattttgtgtgaacataagttttcatttcttttaaggaaatatgtaggcatggaattggtggaacatgtggtaaatatatttttaactttattttaaaaacctgccaaactgtttttccaaagtggctgaaccatttttgcattcccactagcaatgtatgaatgttccagttgttctacagcctggccagcaattggtattgtcagtttttttaagccattgtaataggtgcatcagtggtatttcattatggctttaatttgcattttactgttgatgttcagcagcttgttcatttccttatagacatctgcatatcttctttggtgaaatggctgttcaaatattttgccctttttgtttgtttgtttatcacaaaactagctttattatatttttcccagttagatttctttgttaaatgtcttcactgtcccagtgacttctggttcttattttcttgacgcacacaatgtcctcagccttctttttttttttttttttttttttgagatggagtctcgctctgttgcccaggctggagtgcagtggcgcgatctcggctcactgcaagctccgcctcccgggttcacgccattctcctgcctcagccttccaagtagctgggattacaggcgcccgccaccacgccgggctaattttttgtatttttagtacagacgcggtttcaccatgttagccaggatggtctcgatctcctgacctcgtgatccgcccgcctcagcctcccaaagtgctgggattacaggcgtgagccaccgcacccagccctcagccttctttggattttctgcacgcctcttgacattccacgttactctgtgcatattcactctccaaagtgcttgctgcagactggcttttcatctttcttgctctcaaacacatggagtctgaatttcctgcttctcctttcccttcctgattctgcacgagaacccccgcactcttctgccctctgctctcctctgccactttaggctgggagctcttattctgtctaacagacctcaagcaccttttgttttcactgactttgcccctaggtatgggtttctgggctccatcatctggattttgaatgtccatgtcttgggaggtcttcatgggcttgttttcatttcagtttatttgaattctttctgctaatacaatgaccttagttatttgctgttctacatcagtcttactttggcgtctggagagcagggacattcccttattttcagggactgagtcttgtaattcgtattcctctttgttggttttcatgttattgctgttcagatcttctgcaggttcaattctttttgcagaagtcctcagacttctyttcatgatgaccaagggttcgggtgatttgcctctcaccctgggagcaaccctctctgcttcttgctggctggcagctcctctatgatttcctctggtgcaggcatgcagtgcggcctcttggttcctgtgacacttccatcttttccacatcccctcttgaagggcagtgggggcagggaggtgttgcttttgctttgtgattttacagtctctggtgcctaccaggtctcccacgggttctactttaggggcctgaagaactcttctggatatttttagaggttttccactgtcaggtgcttgctttggagcacttgtaaagctatcagcaccatttgccagttcctcagtgtggcctggtgtttgagagagctcttggaagctggccagatcttctaggggttgggccttttccttgggcactcttggcaatctcctgctgccagttacattttctgggtccagcttctgctttgcaggttgcttaaatgctttcatgcctttgccctcaccttctggttctttattggtgtgcgtggtctcccctgatgtttgtgtgagcttgccgactgctaatagctcttctttcacttctactttctggccacaagccctgggccatttctttgagcttgttgcagtgtctactagttctggtggtgatttgcagggtattttggtggttttgtcatgagtcattgattcttcagtatgacctggtgctgggtctttgaagccagccaggtcttctagggcttgcgccttttccctgggtgctcttggccatctcctgctgccacttacacttgctgctggagccagtgtctgctttgcagattccttaaatgctctgatgcctttatcttcacctactggtcctttgcttccacggtttattgcccatttttatattggattgtttgtttcctcattgtttggagagctctttgtatattctggatacaagtcctttgttagatatgttatttataaatagtttctcccagtatattgttttttcatcctcttagcatcttttgcagagcaacagctcataattttcatgaagtccaacttatcaaatttttctgttatggatagtgcttttggtgtcatatctaagaattattggcctaacaccagaaaacaaagactttcttctgtgttttcttctaaaagttatacatcttatatttaggtctatgattgatttttttttttttaaacagggtgtcgctctgtcacccaggctggagtgcagtggtgtgatcgctgctgactgcaacctctgcctcccaggttcaagccatcctcccacctcagcctcccaagtagctcccaggcatgtgccaccatgcctggctaattttgtttttaattttattttttgtagagacagagtttcaccatgttgcccagactggtctcaaacacctggattcaagcaatccactcgccttggcctcccaaagtgctgggattacaggtatgagccaccaggcccagccaggtctatgattaattttaagtgaatttttgtaaaaagtatgggtaaatttctgcactctctattctattacattgacctacgtatccatccttgcatcaataccacactgtcttgagtactgtggctttatagtaagtctcaaaattaagtagcatgaatcttccaattttgttcttatttttaaaaaatgttttgaatattctaatttctttgcctctccatgtaaattttagagtcaccatgctgatatctataaagaatcctgctgggatttggactggaattgtgttgaatctatagataaatttttagagtattgacatcttcacaatattgagtcttccaatccatgaacacagttctccatacatttctaaatctccatatatttagctctcttttatttccttcatcattgttttgtagttttcagcacatagatctaggacatatttgtgaaatgtacacctaaatatttcatttttctggttttattttattttattttatttttagattgaatcttgctctgttgcccaggctggagtgcggtggcacgacctcagctcactgaaacctctgcctcctgggtttaagcaattctcgtgcctcagcctcctgagtagctgggattacaggcgcctgccactatgcctggctaatttttgtatttttagtagagacagagtttcaccatgttgcccaggctggtcttgaattcctgaccgcaagtgatccggctgccttggcctcccaaagtgctgggattacaggcgtgagccgctgcacctggccttctttggtattattgtaaatagtacttgtgcggagaagaatgatggcccctaaagatatccatgtcctgatccttggaacctctgtttatgttctcttacataaatggtggctctcacagataggtcaagtcaatatcatgaagatgtcaattctccttcctatgttatgttataaacttaccaactttcagtaagaataccaataagcttttattctggacctaaacaagttgatactaaagttcatatgaaaaaataaatatgcaagaatagctacatggtctaagtttcttgaacccatcatgttccatttccacctcattcagtcaggtccttctccaccttcagatctctgctcaagcatcccctgtgggaagtctttactacacacacacacacacacagagaagacagagagagagagagagtgagagagagagagacagagagagagagacagagagagagtgtgtgtgggcagatgtttttttgagtctcgctctgttgcccagtctggagtgcggtggcacaatctcggctcactgcaacctccgcctcccaggttgaagcaattctcctgcctcagcctcccgagtatctgggactacaggcgcccgccaccacacctggaaaatttgtattttttagtagagacagggtttcaccatgttggccaggcttgtctcgaactcctgacctcaagtgatctacccaccttggcctcccaaagtgctgggattacaggcgtgagccactgcgcccagccctggggcagacctttatgttatacactctcacagaactgcgttcctctccttcaagcacttggttcagtttggggttattcacacattaggagactgatttggttaaagttggtctcctctcttaggctggaagggacaacagggtcagggactgttttgctcattgtgtacctcctctgcccagcacaaccccagatacatgattgcacttgatacatatttttgaataaatatttgaatacataagaaaaagtctggtctctaggtccattgttttgaaagtagtaaagatgtgattttagcacccctatttataatgttggaaacctcatgaaaaacagaaaaggagattgtagaggtagattagagccagactgtgaaaatccttagaaggcatgttggccaggagcagtggctcacacctgtaatccccacgctttgagaggccagggcaggagaatcgcttaagcttaggagtttgagaccagcctgggcaacatagtgagaccccatctccacaaaatattaaaaaattatccaggcccggtgacacacagctgtggtcccagctactcaggaggctgaggtgagaagatcctttgagcctgggaggttgaggctttagtgagccatgatcatacccctgcactccagcctgggtgacagagcaagatcctgtcagagagagagagagagaaggagagagagagagagagagagaggatagcagaaaaaacgaatcaaaagaaatctttttttctttttctcagtctaaaatgctagtcttatttttttctcagccaagcaggcagattctgccttcccaatctctattcatctttttctttccaactgccatctatttcaaattctctgctctttcattctgtcccaataggtcttcctctctcaatcccaatctatgggatcccagcaagactatttttggaaagtcatttctgctaacgttacttactccctcaatacaaatcatcagtagtttgctatcaaagctcaaatgtaaagtgcttcttcccagcagtcaatcagacaacaaatgcttgttgagcacctactatgtgcttgacaccatgataaggtctggcattcaagacctctaacaacataattttcaaaccttaatgatttgcatcattatccaaagaccaattggaagccaagacagattctgagcagagaaatggcattgaccgaaatctatcactgattaaaaattaggccgggtgcagtggctcatgcctttaatctcagcactttggaaggtcgaaacaggcagaccgcttgagcccaggagttcaagaccagcctgggccacatggtgaaatcttgtctctacaaaaaaagtagccaggcgtggtggtgtgcgcctgtaatcccagctactcgggaggctgaggagagaggatcacttgagcctgagaggcagaggtttcagtgagctgagatcacaccactgcgctccatgcttggcgacagagtgagtcacagtctcaaaaaaaaaaaaaaaaattaaaagagggcaaaatagaaacagagactggctaggcagtttctacagtgctctaggggacagttggtcctctgagctagggtagtagcaatggcaatgaagataagtgaatgatttgaaaggacatttaggaggtaaaacccacctgacttgatgatagattggattgaagaagagggactgaggaagagggagatacccagaatggctcctaagtttctgactgcataatagaatagatagttttatcattcacatattaaaattgatatgccattgaggcaaccaagagggaatgtcaagtgggcaactggatttctaggtgtggagccccaaggagaggctggggctggaaatgtcaatttggagtcattgaagagatcataaagtgaaaaggaagagggcctggggaatcagcttcccacagcagcaacaatgtaccgactcataagacttaaagcttactctatgggatacactgttctgggattatacacacacacacacacacacacacacacacacacacaccacacccagttgtgcattgtttaatgatggggatgcattccaaggaatgcgttgttaggcgatttcatcattgtgcaaacatcataaagtgtacttacataaacctagatgggatagcctattacacacctaggctatatgtacagcatgttactgtactgaatactgtagacagttgtaacatgagatcatatttgcgcatctaaacatatcatctaatcatagaaaaggtacaataaaaataaggtattagaatcttatgggacctcccttgtatatgcagctcatcattgacaaaacatcaggtggcacatgactgcatatatatatatatatatatatatatatatatatatatatatataatttaattcttacaacaaccctgcaggataggggaggataggtactattagaactaatgtttgataaatgaggcacagagaggttcacttacttgcccaaggccatagagctgaagtggtggagctggcctatgaacttgggtggcctcactccaaaggataaaggatatcaacttgggtggcctgactccaaaggtcaatctctcaaatgctatgctctgaaggtgtagctatgaactaggagaacagttcacatgtgatgtcatagaagttggcagaagagatgatttgaaggtgggaactgtcaacagtgttaaatgttattgatacatatgtacacttacaatgtgtcagttaaaaatgttattgaaaggtcaagtaaggtgagccatgaaagtgtcctggattcagtaacatggcaccaggcatggtggctcacatttgttatcccagcactttgagaggccaacataggaggactgcttgagcccaggaattggagaccagtctggaatacataggaagactccgtatctacacaaattaaaaataaaaaagttagctgggagtggtggtgtgaatctgtgatcctagctaaactcaaaaaaaaaaaaaaaaccatggaagccattgataagcttagaaagaactgatgatgtggcaatatgggggcagaactcagattggagtgtgctgaggaattgttcctggaccaagccgagggtcggactgcttattctctcagcccaattacaagatgcaggtgaactgggaaagaagagagtttttatttctgtaaccaggtgcagggagaaggcctggaaattatcaccagaccaactcaaaattacaaagttttccagagcttacataccttctaagctacatgtctacgtgtaagtgtgcattcatctaaagacataagtgattaacttcttctaatctataactaaggtctgagtcctgaagaccttcctctggagcctcagtaaatttacttaatctaaatggatccaggtgctggggtgattgcccttatcttatctcctgctaaatcatggaggtttggggagttccttcagaccactaataacatgtgcttaatctttttaaattttattttatttttttgagacacagtctcactcattgcccaggctggagtgcagtggctcaatctcggctcactgcaacctccg

SEQ ID NO: 96186 - DNA, 27996 bp, Homo sapiens
gtagttccagctcctcggggggctgaggcaggagaatggtgtgaacccgggaggtggagcttgcagtgagctgagatcgcaacactgcactccagcctgggcaacagagtgagactccgtctcaaaaaaaaaataaaataaaaaagaaagaaagaaacaggaaacggtgcagaatatatgtctgaccttgtcagcagggtgagcagggtggggtgaataccccagaagccgcaaagggaaagagggtcagcaggtttgaccacgtggaatcagagagaggcagtgccccccagccccagccccatcccacccattgcctatgcctgctccccaccttctgcaacaggaagagctccagccaagcctgggcctctcgggtgttttctggcataaactctgagctttacttctcatcctaccagccaccagatccccgttctctaagaaacatttgcagtgggccctttgccatcccgggatgaaatccatagaaatttatgtttcttaacacacatgttaagagaaagttcaggctgggcacagtacctcatgcctgtaatcccagcactttgggaggccaagacgggtggatcacttgaggtcaggagtttgagaccagcctggccaacatggtgaaaccccctctctactaaaaatacaaaaattagccaggcgtggtggcatgtgcctgtaatcccagctattcggaagggagatcacttgaaccccaggaggtgaagtttgcagtgagctgagattgtgccactgcactccagcttgggcaacagagtgacacttcgtctcaaaaaaaaaattcaaggccgggcacagtggctcacacctggaatcccagcactttgggaggaggccagggtgggcagatcacttgagctcaagagttccagtccagcctggccaacatggtgaaaccctcctgtctgtactaaaaacacaaaaaattagcccggtgtggtggcgggcacctgtattcccagctacacgggaggctgaagcaggagaacctcttgaacccaggagttggaggttgcagttaagctaagatcgcaccactgcactccagcctgtttgacaacagcaagactccatctccgggaaaaaaaaaaaaaagttcaatgtaatgccccaatggtaacataaaagaaaaataaaaagcaatttatagtaaaatctttacacactacacatgaatacatatttcacaacttcgtatggattctactgcccctagctgtgataaatgccactccaaccctagtgttgacccaagagaaatgaaaacttgtccctacaaagactcgtacacgaggccgggcgcggtggctcaggcctgtaatcccagcacttttgggaggcagagaggcaggtggattgcttgagctcaggagttcgagaccagcatgggcaacatagaaaacccggtttctactaaaaataattgaaaaaaattagccaggcttggtgttgcgcacctgtggtcccagctactgggaaggctgaggtgggaggatggcttgagcctaggaggtggaggttgcaatgagccaaggtcgcaccactgcactccagcctgggtgacagagtgagactccatgtcaacaacaacagcaacaacaacaaaagactatacactttaaatgtgtgcatttaattggatgtcagttatatctcaataaagctgttggaaaacaggatttttcagggagtgaaagaactctgtatgacactgtaatgggagatccatgccattatacatttgttcaaacaaatagaacgtacagctccaggagtgacccgcatttaaaccacggattctgggcgatgacgtgtcagtgtaggttcacccactgtaacaaatgtaccactcgggcgtgtgatgtggatagcaagcgggtgctgtgcgtgtgtgctggtcaggagtgtttggaaaatccctgtattttctgctcagcattttttttttttttttagatggagtttcgctcttgttgcccaggctggtgcgcaatggtgcgatctcaactcacggcaacctccacctcccggttgattctcctgcctcagcctcccgtgtagctgggattacaggcaagcaccaccatgcccagctaattttgtagtttgtcagagactgggtttctccatgttgctcaggctggtgtcaaactcccgacctcaggtgatccgcctgcctcagcctcccaaagtgctgggattacaggtgtgagccaccacgcctggtcagtttttttgttttgttttgttttgttttgagacgggatttctcactgtattgccagactggagtgcagtggtgcaatcatggctcattgcagcctcgacttactgggctcaatgtatcctcctgcctcagcctcccaagtagttgggaccagaggcatgtgccaccacatccagctattttttttttttttgagatggagactcactctggtgcccaggctggagtgcagtggcgcgatctcggttcactgcaacctctgcctcctgggttcaagcaattctgcagcctcaggttcctgagtagctgggattacaggcgctaccaccacgcccagctaatttttgttattttagtaaagacagggttccaccatgctggccaggctggtctcaaatcctgacctctggtgatcctcccaaagtgccgggattacaggtgtgagccactaggcccagccctttctgctcaattttgctgtaaacctaaactgccctaaaaagcaaagtccgtgtttgtttgtttgtttacagacagggcctccctctgttgcccaggagtgcagtggcatgatcatagctcactgtaacttctgacacctgcgctcacatgatgtgcctgcctcagactcccaaagtgttgggattataggcatgagccactgtgcccagccctttttcttttttctttctttctctctctctcactcctccctccctccctttctttcttcctctttttttaattttagaaataaaatatgctatgttgcccaggcttgtcttgaactcctggcttctaggcatcctcctgtcttgggctcccaagtagctgggattatgggcatgagccacagcacctggccgtggatgaattttcataaagtgaacccacccaggtacccagactgagggacagaagtttaccagatcctagaatcccaccttgtgcccctcctggtcatggcctccccccacccccaccccagtgtccccgcttgtttatttgtttatttatttatttattgaggtggagtctggctctgtcgcccaggctggactgcagtggcacaatctcggctcactgcaacttccacttctcaggttcaagcaattttcatgcctcagcctcccgagtagctgggataacaggtgtgcaccatcataccgggataagttttgtatttttagtagagacagggtttcaccatgttggctgggctggttgtgaactcctgagctcaagtgatccgccctcccaggcctcccaaagtactggggttacaggcatgagccactgtgcctggccttgactttttaaaaacagcttaactgagtcataattcacacaccatacagttcacccattgaaagcacacaatgcaatgatttttagtatatccacggacttgtgcaactatcgccaccatcactttcagcacattttcatcatctcaaaaagaaacccctgtaccttttaagtatcaaccgtctagcccgcacccccacccccagcctctggcaacccttaatctacttcctgtttctagagatttgcccattcagaacatttcatacagatggaatcacacaaagtgcggcctttgtgtggcttctttctcttagcatattttcaaggttcctctatgttgtagcttgcatcaagatttcattcctgttgatgagtgaatagttgtctactgtatagatacacaacattttgtttatcctttcatcacttgatggacatctgagctgtttctcccttttggctactatgagtaatactgctataaatcttactctgtcacccaggctggagtgcagcagtgcagtcacggatcacagcagcctcgatctcctgggctcaagggatcctcccacctcagcctccccagtagctgggactacaggtgggtgctactactcctggctaattaaaacttttttttttttggtaaagaaggggtcttactatgttgtccaggctggtcataaactcctgggcttaagagatcctcctgtctcggtctcccaaagtgctgggattacaggcgtgagccaccacgcccagcccaacaagtaaatcattatttatttatttatttatttttgagatggagtcttgctctgtcgcccaggcaggctggagtgcagtggcactatctcggctcattgcaagctccgcctcccgggttcacgccattctcctgcctcagcctcccgagtagctgggactacaggggcccgccaccgcgcccggctaatttttaatatttttaatagagacggggtttccccgtggtctcgttctcctgacctcgtgatccgcccgcctcggcctcccaaagtgctgggattacaggcgtgagccaccgcgcccggcctatttatttatttttaactttttttcccccccgagacggagactcgctgtcgcccaggctggagtgcagtggcatgatcctggctcactgcaacctccacctcccgggttcaagtgattctcctgcctcagtctcccaagtaactgggattacaggcacccgccaccaagcccggcaaatttttgtatttttcatagacacggggtttcgccatgttggccaggctggtctccaactcctgagctcaagtgatcctcctgcctcggcctcccaaagagctggaattacaggcgtgagccaccgcacccggcctcaagtaaatttttgtgtggacaaacatttttatttctcttgggcgcgcagacacctaggagtggagttgctgggttttatggagactccagggctcgtggtttgaggaaccgccgggctttttccacagcagctgcgcggttgttcccaccagccgtctaggacggttccttgcctggcttggactagttggtttcgctgctgggccttttccccagtggccccaataggggctgcagagtgaggcaggcacagtcctcaccgccgcctccgggggccctgttgtcccgggcgagctccggggacctctctccttccccgcgcccctcaaataccaagctgaccctggtcccgggatctaggctcgccttcaggggctgctctcgactggccgtgcccatgggctggtcgcctctctgtgcctcagtttcctctcctgcaaaacagaggtaacattttttacctccaaaaacagaggactcaaggaaggctagaaatgaaacaagagaagagaacaaaatcaaaatccccaacgagaaaacaaaaccctgtttttctggtgtgtgtgtgcgtgtgtattttttctttcccttttcctcctttctgttttttgcttgttttcttccgtctctcttttcattcctttatttcctttctgctaaaagtgacaccctccgggattatacagattctagagccaaaggcaggtgggagccgcacctggcgcgcgtggcgaggggaaggaactgcacgggcgcagggacacagttcccccactttgcaggggcgttttctgctggtgggtgcagcccagctccgccccgccccgccccgccccggcccctacgtcccgcgctctgcgttccgctctcccgccagtctaaggcgcggacacaaaggtcctgtccgggccactcccgccccgcccgcccccaccgtcccgggctccctcccgcagccccattggccgggagctcctgggggcggggatcggcgccccaccccccctcgggccacgccccctccccagctccgcgctctcagtcggagcgaagcggctggcggagcagaacggattgcagggtagggagctcttctcggggaccccaggataggcgcccctggcccgcggccccgggagccgcaggggtggggcctcggcctcctctgcctccatcgtcccccatcctgcagggtcttctagctcggcagaggagggctccgggctgggtttctcggggcctgtttggggaacgcgggttgctcctccccaggggaaggggtgggtgtggcaacagcggcaaggattctaggcggacgtcgggtagtacttcccgcctggccacctgttctctgcgtgcaggggaagctcttcccgccctccccgctgcttttgcctttgggcgggagccctggacgggggactcgccgggcggtggggcgaggcgcggggggcgtcgcacgcgggaagcagagccaccccccgccgggcctggccgcgccagctgtggctcgaggttgggacggcggccaggcccggcgggggaggtggggagccgtcctggcgccgcgcgattagccgcatctgggggaggaggagccgccgggcgcgctgggcccgggtgtttgcgcccggatgggggtgggggtgccytaggcgctggagaaaaacttcacccgcgcccacaggccccctttccgcaggctgcgctggcggttcaggtttgcaggccggaagtgaaatgttcttttttgatttttaaaaaggaagcctccggccctatggttttctggggttggagtggatgtgtgtgctgggggaggcggagacgtcccgctccaggcagggccttgggtcttaataggtggggaaatctctgccaaataggaggcctctcggagcctcagtttccccatctgcagactgggctctgacttcttctggcatgagagggtgtgtgagagtaaaaggaggcagctagccccgtgccgggagacacgtaagctactgttttttaacttgctgttttgatatttctcagtctctctgtgcccagtcttgcttgcccctgtcatttgctgccactctgaagccagagggaacttagaaaaacaatccgcttagatctaccccacgctgaaaatcgtccaccgaagtcccattgtcgtctaagtccccaacttctcagcagggcttcctgttatcttccgccactaccttctccagcctctctctgcctctgttctccctcccttcgggcctttggccctcctctgggctcggggtcctccttggagaccccaccgccctctgcactccctgggtggcctcggtgatgaccgtgagttctcgatgctggtcccttcagggcaagaaagaggcgcagagcccggctgggagtagatgttttcaatgagctgagctaggcctggcgtggggccatggggtggggttgagggtggttgacggtgggtcccctaggtaggggatcggtctttgttccaccgagtggcaaagccagcgcatttggtttgtgttccatcagcaggggcaggaatgggagggaaggtgatttcagatgggcccgtgcctgacacttccaccatcagccgcactattgtggactgagcccgccgtgcgcttggcattttcgcggcaccatctgcacagcgtccgagccctgcgacgcagcaccgctcctgtcccctttgacagatgaggaaactcgggtggggcggtgaaatcgcctggcaggggtcacagagggagtggggaccagtcagggctcaatctcaggtctgagccaaagccccccgagaatggagggaaggatggagggattgagtgggggaggcgtgtagagtagggttcttgttgagaaggagggcttgggcttcccgcaggaggggcagtccaggctgagaactggggcgggcgcagggtcccaggtgggtggtggcggtggggtgaccgtctccctgctgggtggggtcgcccgtccggtcgaggccgtccaggggtgctaatgggggcacaggcaryggcaatgttggaggcccccttgggttcccggtacactcctcgggtttccggcctcttcccagcactcaggggctcctgagggcggaagagctattcccagcttggcggggcctgggagggggctctgggcagacgtaggcgccgggctgcaccttccctgcccgcctgtttgcacttctctgtgactgttggcttcaggtccttagccagcggagggctgactccggcctggctgccccctcccctttgcctcccgtccctccccctggacactccaacccccatcccttcgtgtccctccccctcctctctctctgctcctccctcgccagaccccccgctctccccggaacaatggaggggaatgtggctaggscagcctgacgctgctgcgtcaacctctggctcgttctcggcctctatcgcttccagggacccttctatctgggctcagctgacccgccccgcctctcggcccacgtgccggcagttctcccaggctggggctcagctgcgctggagactgggatgggtcagctcagtgtctctgtctgtttacaaaggaggaacccaggtgcactaaggtaacttcgctactctgctagagtctcaccccgatccctgcgccatttcccttccacctcctgcactgttaagccttgggctgtgagatgggccagtgtagcccggctactgccgtgttccctgggtcagggacagctgcctcactgggagcgccttagaaatgtagaatcttggccaggaatctggagcctgtaatcccagcactttgggaggccggggtgggagaatctcttgagcctgggaggtcgagaccagcctggacaacacagtgagaccttgtctctacaaaaaataaaaaaattagctgggtgtggtagcacacgcctgtagtcccagctacttgggaggctgaagtgagaggatcccttgagcccaggaggttgaggctgcagtgagccatgattgtgccaccaaactccagcctgggtaacaaagcaagaccctgtctcaaaaaaaataaaaaagaaatgaagaatctcaggccccaccccacacctgctgaatggcaatctgcatttgaacaagatccccagagattcctgactgcattaaagtaggaagtagaatcactggcttaactctgtgcctyagtttcctcatctgtaaaacagggctgctaaaagtgcctcccctgttgggtcgatgtttacgtgcatgtagttgatgtttgtaatcccccaacagggcctgacgcagaagtctgtggacagtggctgtagggtgtatgaaagcactacagcctgccccatccccatagtgcgggccactacccaccacacctgccagcagtgggctggctccgggctggaagctgccccaacaccatgcccaaccctggccttccccagccagcatcccatggaaggctcaagacaccctcattttgcagagcaggcttggagaggttctcgctttgccaagartgaggtgtctgacttgaactcttatcccyctgccttctatcatcctgtcttcaataaaggggctgaagctattaagaatggaatctctggctgggcacggtggctcatgcctgtaatccgaggactttgggaggctgaagcgggtaaatcatgagaggtcaggagtccgagaccagattggctaaaatggtgaaaccccgtctctactaaaaatacaacaattggctgggtgtggtggtacatgcctgtagtcccagctactcgggaggctaaggcaggagaatcgcttgaacctggggggcgggggtctgcagtgagctgagattgtgccactgcactccatcctgggcaacagagggagattctgtctcacaaaaacaaaaatgaatggagtctccttcaatgagctccctcttactagagtgtaaatggctgatagcactgctraagccctccttgcagtaagcacagggctgcttggctcccattgatgtgggtggtgggttttcaggccaggagggcaggaagttggggagtgggtaaygggggctgcatgattgggccgtaagtctccagacatgcgggcaggctgagcaggggctgggaaagccagagtcttggtacccagctgaactccagaaccttccaggaggagctgcagagcctacggaaaattcccaggctattttcggccgaggcccccttctcccagccgacacacccatccctggggcagtcagggtgggygtggcttcctgcccccaccaccctgggctccctcccttggccgggcactcatcagagcctgggggctgactggggaagggggtgcatggccagctgggcacctcctggtgcagcctctcccccttaccctgctggctttttctcygtagcatttctgctgtctgacttactccgtatttcaccagggtctttgttagccgggcgaccctgggcaagttacttgactctttgtgtctccgttctcccattagtgaaatggggatagaatgagctgggctgtgtgaagtgttgtaaagtagtaagcagaatggccccaggacactgctgtggtggtggtagtcatggtctgtcccactcccttatctgttggttcaataggaagtggcagagttcatcaaggtcccctgtggcagcacaggtgcccagcgtgctgtgcggtgaggtgaggctccccgctccatggacgtgtgcatacagacggcaacaagttcacgcatgcatacacgtgtatgcgctcagatgcagaracagccatgtgtgggcacatatgtatgtgtacacatgcgtatayacacagcacacacatacacatgtgcatacacctacatacctgtgcacaaacgagcacacatgtacatgcagcctggcagtcatgacaccttggkcgtgacatttggtcgaagtttgttgcaggccagaagctcatctgagtggcggatctgtttgcagccttcctccctcccccagctgtggggagctgaaggctagtcacagagggcaggccctgtcttctgctggggacactccaaggccatgcctggtattgctgggagagcagtggctggctggaagctgggactgtgctggtgggcggggctgctgtgtggccccatccttgtgtatgtgtgtattgtggaggggacacagcagaggctggccagggcctcagagctggcttctgggtgcctggttacccgccccccagttgttttctttccagctggactttgcccggccctcccccgcactgaggccattcactcctctctgctgggcctactggggagtgagtggcccttggccaggcctactctggccaccccagcttggcttcagcycagatgggccatgagaggctggataaagctcctgggtctcccagttggcactgcccccgcccctagtcacgtctgctccgtgcctcagtttcttccactatcaggtgagcaggaatgtagccacctcctgctgggctgggcatggtgctgagtgcacaccaatgcagtggcagccagctggggctttgggtcctaatgctggcaaagaatgaggcttggaagctgggtgtggtggctcacgcctgtaatcccagcactttgggaagccaaggtgcgccgatcgcttgagcccaggagtttaagaccagcctgggcaacatattgaaaccctgtctctacaaaaaatgagctggttgtggtggcacgtggccgtagtcccacaacccaggaggctggggtgggcggatcacctgagcccaggaggttgagaggcttcagtgagccatgatcgcgccactgcattccagcctaggtgaccaagtgagatcctatctgrraaaaaaaaaaaaaaaaaaaaaaaagccatccttgtggccattcctggaccgtctggagaccctgctctgtgccagtgcctgtgctgggcccttgggacacagaggggccctgtgctgccctcagactcctcacccctacaggccatgagcttccagtggcatctctgaaggattgggtgcacttggggtgttgagggggcttgggtggagaaagaagggggcccccattttgggtctgtgccattcacccaggggaaaatgggtgtgacaaatggaagatgcaaggaggaygacgatggtgacaatgacagtgatgatgatgatgacgcggcatgattcctgagcgggccctaccctttccaccgcctttcctgcctcccattcctagtcccccacccatcacatggtttccccactggcctcagtcccacccgggccctcagggcctttgcacaggctgttccctatacctggaacagcctccctccgttttgcaaatggctacccctttcttgctgttcagggtcctgcaggcaccctgattagcgtgtgtattcccacccttctccccctatccccttctgtctgtttctttacagcccttttgggatctgtaatgatctggtttatgtttatttaactgtttattctctggcttcaagttcagccctttgtctctggggccttgaacagggctcggtattgggcacgtgtctgttgagtgcctttatgatgacaattataacaacagtcgtagctgacaattactgctcactggacctgggcggacagtgtgcccagtgcttagtgtgtattattttgttttcagttcagcctgatggtgtgaaatcgggactattataattcccattttccagatgtggaaactgaggcccagagagattaagtaacttgtasaagaccacacagcaggcaaggggtaggattagaagtcagctatgcttcattagccgggcgtgatggcgggcacctgtaacccctgctacttgggaggctgaggcaggagaatcacttgaacccagaaggtggaggttgcagtgagccgagattgtgccattgcactccagcctgggcgacagcaggactccatctcaaattaaaaaaaaaaaaaaaaaaaaaaaaaaaagtcagctatgcttgactccaggagaaaggagggagggagactttggatagaacaaggcagggcagtgtctctaactgtggagttgcgaggccactgctcccatctgctgtcctgggaggcctggacagggccctcccctcccagggccagcctctttcctggaactctgggcgttgaacattctaggactctatgacctgtgctggtaggtcatgcgggkgccctggcccccaggccagcagctggggcctttttgaggtgggggctccccggactcaggagttcctccttggccgcggctgtagctgagagaagggacaggaggtaggatgccacctcctccagaaggcaagccagccaccagcttcccagcccgmcagaactgaggcccaacgggagagtgcagcaatgtctggggaggggttctgacatttcagggatggggcatcccttctcctctgagcagtcgggcctggttcttgggtggctatgcttgaaggcggttcggggggtgcggtgggatttttgggtgatgtaggttgaagactcctataaatgaggggactgggggggcaaactgaggttgaaggttgtgagagcttcatttctttscatgagcagctggaaacctggattttgaggaaaccccctgggatgtttaagatagttcaggccgggcatggtggttcatgcctgtaatcctagcactttgagaggaagaggtgggagaatccgttgagcccaggagtttgagatcagcctgggcaacatagtgataccctgtctctataaaaaaaaaaaaaaaaaaaaaaaaaaaaaaaaaaaaaaaaattaggcatggaggtcaaggctacagtgaactgtgattatgccactgccctccagcctgggtgacagtgagacactgtctcaaaaaaataaaagttatttatttttttttgagacggagtctcactctgtcacccaggctggagtgctgtggtgtgatctcggctcattgcaacccacagctccctggttcaagcaattctccagctttggcctcccgagtagctgggattacaggcacccaccaccacgcccagctaattttgtatttttagtagagactggttttcaccatgttggccaggctggtctccaactcctgacctcaggtgatccacctgcctctgcctctcaaagtgctgggattacaggtgtgagccaccgcacctggcccatgcttcaaatctaaatttgaaaaccccatgggacctgagtcaaaccgatccagggctgctgctgtccctcccggctgtgtggtgttgagtggcgtcctgagttaggcttctccctacttcatctcrtacccccatcaccagccctgcgcaggtgccaagtgatgcccacccagctgccccactttgcagattcggaaactgagcccagagatgggaaaggacttacccaagggcctctgactgctggactgtttctctttcccctgaacctcgagctgaggccacgttagagccgacmccttcatattcaatgttcagtgattattgtgtacagcgagtgtcctgctcttgaaaaattgtcaaaagcacagcagcagctagggaattcccgccctccagctggatttaccggtacatactaggggtcacagaaggaatttgatttcataacagcgtggtgacccgggctgtgtggaaattcactgggcctgatggagctggatgcagccttggaaattctccctttccctttgggctcycgcagcaggccccccagtcctgkgtgcaggcttgtgacagctgctcagggatccaaacgtggcgcttgagctctctgcgaygtgttccacagttccctggaggcrgacactgcgtgagggtcagtttttgccccygsttccctgtggtgtctggctcccagcagcgtcagggagggtccgtggagtggctgagtttggatctaggtggttggcattaaaatctccctggctttgrgttttcttttttgagacagagtcttgctctgtagcccaggctggagtgcagtggtgcgatctcagctcactggaacctccgcctcccaggttcaagcaattctcatgcytcagccttcaagtagatgggattacaggtgcctgccrccatgcccagctaatttttgtatwcgtattagagactgggtttccccatgktggccaggctagtctcgaactcctgacattaagtgatccgcctgcctcggcctcccagagtgctgggattgcaggtgtgagccactgygcccggcccctggctttgkgttttctgctcaccttcctccttccctcccacaaatactatgtgtcccaaatgtgccdggatccatgccttgtgctggggacacagaggggaccgatgccatcctggtcatgggggaggatgtggcattttcatgaagagctatgatcgagggggccccayggttgcttcagkagcccagagtaggcatctgaccctgccaggcgtgctcccagacaaggtgacaatggtgctgaggtgcccgagaggaatgagcctcagatactggactgtcagacrtggacatgggggtaagcacagggtccctaccttgcaaggcacgagcccctgacagcctcttctctttccaggtcagccatgtcatctgagcctcccccaccaccacagccccccacccatcaagcttcagtcgggctgctggacacccctcggagccgygagcgctcaccatcccctctgcgsrgcaacgtggtcccaagcccactgcccactcgccggacgaggaccttctcrgcgtgagtctggagcaggctggggacgcgttctcagatggatctcttkcctgaggccagagattcactgtgtctctggccatttttgggcctatgtcccggactgccaaataggcagacctggggctgggccgtgggctgagggtgagaaactaggaaggcgccttgtaaattcagggtactgcccagcccagaagaacctgttaccagctgggagtggcaatgggtgggcagttgctggggtcagaatcgctgggctttaaccacacatgagagtctggttccctgtgagactgtgaattctgcagctgcaaaatgggcacagcaccagggctgcaaaggacccacataatgcctggcagatgcaggtctcaggccttgcgmgtggaggatgcttgtgttattaatagtaaatcattagtttctggagggatgttcagtgatgttttagttcaactccctctttccaggagggaaaacaggcccgagaaaattggccagggtcayccaaagagtcctttcccccagcgtctttgtgagcggctcccagggttgagggttgtgcagtcctcagcctgtgtgactgtacatggcggtcctggccagggcttgatggggcacagctgtgggcaggggctggaatgagctttgtgtgcccaggagcgctgatggggcccctgacatttccccctctctgtcaggacggtgcgggcttcacagggccccgtctacaaaggagtctgcaaatgcttctgccggtccaagggccatggcttcattacyccagctgatggcggccccgacatcttcctgcacatctctgagtgagtcagcggcaggtctgggtggcctggctggggtgggcrcttccttggccctgtggaggtggggatggtgtgtgactctgatgggcrctgggtgtgaggacgaatggctgggcctgtgtgactctgcctgtggctggtgctccagctgtgctcctgtgtgtgtgttgggttggggttgtgagactctacggagctgtgttgggggatgtgaggctgggggcgacacggtacttgtgattgtccctgggtgtgtctttgtgaatgggtgtgtaaggttttgtgtrtgctgggcgtggtggctcacgcctgtaatcccagcactttgggaggccgaggtgggtggatcacgaggtcaggagatccagaccattctggctaatggtgaaatcccgtctctactaaaaaaacacaaaaaaaattagccgggcatggtggcgggcacctgtagtcccagctactcgggaggctgaggcaggagaatggtgtgaacctgggaggcggagtttgcaatgagccgagattgcgccactgcactccagcctgggcaacaagagcaagactccatctcaaaaaaaaaaaaaaaaaaataatgagcagggcgtggtgacaggtgcatgtaatcccggctcctcggaaggctgaggcaggagaatcacttgaatccaggaggtagaggttgcagtgagccgagatctcgccattgcactccagcctgagtgacaagggtgaaactccatttcaaaaaaaaaaaaaaggatcgggcatggtggctcacacctgtagtcccagcactttgggaggcggaggcaggcggatcacctgaggtcaggacttcaagaccagcctggccaacatggtgaaatcctgtcatcacaaaaatacaaaaaaatagaaaaaaaaaaaaaaaaaagcggggaatgatggcgggtgcctgtaatcccagctacttcggaggctaaggcaggagaatcacttgaacccaggaggtggaggttatggtgagccgagatcgcgccattgcactgcagcctgggcaacaagagcaaaactccatctcaaaaaaaaaaaaaaaaaaaaaaaaaaacagatctgcccaagatcacatagccagaaagtgatggaaatggatctgggggtgcccgactatgcttgtgggagacagggtggtgtcagctgtgcatggtgcatgtgtgtgagcagcagggactgctggggtgagtccgagtgcccattatatctggccaaggacaccccatgaggctggggagccctgtttggcctggggaccagtccagcttcctgccctcctttgggggaggtggactggtgaggctgggggctgtcctgcccctttgctccaggaaggaagtttggggtgggtctttctcctcctgcatgcttactgacgtccttccttcctgagtgtctgaaaacccttggggagccgggggtggggcrcacacatcctagggctgggctggaaggcacccagccccccatgcttcacctctgatcctctgggcagcctttagacaggggaggaccctcgatctgcacccttgtccctacctgcttctttggcctaagcacccccaagtcttttacttcaggcaggggcagacagagtcctactctgcacagcatacccgctaacacggaaaccacatttctgaaaagaggagcccactgcaatgggggagttacccctcctttgcccacccccgccccatgcttacctatcagatcggcaggcaggagaataccaaggtgacgcatttcacatatgmatgcatacatggatgtgtaagggtatttccatactgccttgtcccagaaaggattttgaatcagtaaggaaaacatagaggttggggcaaagaaatatttaggaagatggaaatattgtgatgtctggttctgctgctggaagtrggctgcagatttatttctgagctccctcgtgaccagatcaaagagggaaacactcttcaccatacgattctccaatcaaaacaaaccagttactaggggagctggctggcccttgcatttagcatctgaagggggttttcctctgggggggtttcatcaaggggacatcaagatgccagtctcmtgtgagagggtgactcatgtcccctagaaagtaagggaaccttcctgggggtggtcacagggagaggcccctccaggaactagcttcatgcaccaaagggaccttcttgaaggctcacygggagtccaggcgtggtggctcacgcttgtaatcccagcactttyggaggctgaggcaggtggctcacttaasgtcaggagtttgagaccagcctggctaacatggtgaaaccctgactttgctaaaaatacaaaaattagctggctgtggtgcctatagtcccagatacttggctgaggcaggagaatcacttgaactcgggaggtggatgcagtaagctgagatcacaccactgcactccagcctgggcaacagaacaagactctgtctcaaaaaaaggcaggctgggaaactggggaatttgagaacaaagacacggtgtggtttctgagactcctggaaccaggggctgcagtgctgaggacctcaggaaagccctgcccaggccacccctcaactcggattctcactccatgatggccttgtttctctctggctctctggcttggactggctgtctttactcttcagtcacaagcccaggctccctcccacatttcatgtcaccatgtgwgcacccacaggtggctgaactctttcagttccagcatcaaaagtcccagggaaggagctgattgggccagggcctccttgcctaggacagaggctgggggcagtgtggcagctccctctggtggaggggcagttctttggaaagaggttcccrgtggttggtcagatggtgcctgctttggtggctgwgtgaccagaagggtggctggtgtcttggggaagggagctgtgtcycrgtgtgagccctgactgctttatttatgcccccrtagtgtggaaggggagtatgtcccagtggaaggcgacgaggtcacctataaaatgtgctccatcccacccaagaatgagaagctgcaggccgtggaggtcgtcatcactcacctggcaccaggcaccaagcatgagacctggtctggacatgtcatcagctcctaggagatggtggaagcaccccttgtcctgtgcttgtgggagactttgcrgggaggaggcagcagacactggagatgacattcttccacacgagacggggcttcagccgggcatggtccctctcamgtatctcctggaggaaggggtatggggggcaggtgtggggtgtggggtgttcccggccatcagcacagcctatgaccattgcaacaacctctcaccatytgaagagcattaaaagcatttaaaaargagaggtgcccactggtggctgagtggaggttccaaccccatcccagggagtggatcaagggtggtatttctccagctgctcagacacatgggctcaacccacagaatccctcttcctcctggagctggaggccccagattcccagatctggccccctggcagcctgacagggaccttgcgtgacttctccaaggcaaatttccacctaagtgccccttgcgcctctcctggggcctgggcaaagcagttttctaattcttggcttggttggttctaggggagctggcttgaagtgggkggggaaaggcgggggtggcggtctttggattggacggatrttgccttttggtgcctttgcagtgggaggcggcatagctgcctgtctggggaagacagttctcccagcactcccacccctgggcacagcaggctggtactgggaggctgaacccctcttagagcctgaccttttcatctgccttctggttgtgtgaccatcactcaacagccatttcacagcccctgtaattatggcggcggggggctggggtggtggtggtgggaagggcttgtggagaggacacagtctttgtttaaaaactttgtcccgatccatccagaaaagagtaggtagcttgcatcctgacagcctggcaaagtcaagaaagttgaaggagaaacatacctttggagagggggttttctttaaaactagtgttaagaaatgcttagggattttttttttcttatttttcataactaaagctttcacccagagccggctctgtttgcactttgctgccgacattgcaaactttttggcagggtgggagactgagtctcattctgtcacccaggctggagtgcagtggcccgatctcagcttactgcaacctctgccctccagggttctggcaattccgcctcagtctcctgagtagctgggattacaggcatgcgccaccacacccggttaatttttgtatttttagtagagaccaggtttcatcatgttgggcaggatggtcttgaacccctgacctcagrtgatctgcccatctcggcctctcaaagtgctgggattacaagtgtgagccatcgcgcccggcctgcaaacttttttgtaggtatttctggtaaacaaatccttaggttatctttgctgtggttgtggtttggctttagtcatgatttcaaagtagaaatagctaggcattattttttgaaatatatgacctatatgtagtcaagaatccactgaacagaggsaagcaaaccttttggaaactggcttttgggcagacagtaaacgtccagtttgatgctggaagcatgaacagcttcatcaggtaggtactcctcaactctgatgagtttgtcctttcagcctaagggggtggaagggagttgtttgagaatagcaaatacgcatgttgattgcgagtgtgtggagacaaaggcagttcccaccacagttaggtcctggccrttgtttcctcgcctgcgrtgctccttgtacrtcctcaccctcctctcccgcctctgccttctgctgggtcaaaggtggccttttctctccagccttgaattgttccctgttggcttcccaagggcccatctgctggtacagtccacacttccamagccaagacccgagagggctttcactgccccaagcctctctcctgtgaccytgggattctgtcttggcagaatcctttgtcagcggctcttrctctgtccttcctgtttggccacagctctttcaatcaatgggtattctagaaccgcaggatgtcagagctggaagggacgcgataccggtttacacaaggggaaactcctcgaggctctgggagggacggakggttttggtgacagagcgagagctaaaattgaggattcctgaatccagatcttgcctcccatcagccatctttctcccaataaatttttgttttgtgcaaggctatgcgtgtgtttgtgtggaggctggctcaccaagtttttccttttaagtcgtcagataagggtgtctcccccaggtgaggctgacacattccacgtggcagtctgttttttttaggggatggtgaataagaagatgggatcatctgttttttagtcatcattctctagcatgagaaagcttagcagagaggagaatgcggcttcctggcaatagaaaatgccagtaacttggtcagcggcgctccagtgccctgttgaagcttttaggatgtgtgagttacacctcatccccatcagctgtgggaagagaggacgggcctcggggcacactgtccacagtccctggctcattcctgctatagaagtgttttttgtttgtgtttttgagacaaggtctcgctttgttgccctgcagccttaaccttgtgggctcaagtgatcctccttcagccacctgagtagctgggactataggcatatgccaccatgcctggctaatttttaaattttttgtagagagcaacttgctacattgcccaagttggtctcgaagtcctgtactcagaccatcctcctgcctcagcctcccacagtgctgggaccagaggtgtgagccacagcacccggccactgctatagacatttgatgaacgtttgctagggctgggcacagtggctcacgcctgtaatcccagcattttgagaggccgaggtaggtggatggcttgagctcaggggtttgagaccagctgggcatcatggcgaaacatggtctctaccaaaaatacaattagctgggcatggtggcatgagcctgtggtcccagttactccagaggctgaagtgggaggattgctggagcccaggaagtgaaggctgcaatgagctgtgaatgcaccactgcactccagcctgggtgacagtgacacccagtctcaaaaaaaaaaaaaaaaaaaaaaaaaaaagcttgctgctcttcaggcatgaagtcaggggctggaagcagatgaggcttgagggcccggggctggcagagtcctaggacggagagcttttcaaggtccatagcaggggaggaagggtttgctgttgggccagtgggagtgagggcagaaggtgggcaggtgtaagaactcctgttcttggtttccaggagagcagtgacaggcaggggccactctggggtcgctgtgctctgttgggaaggctttgctctggccggtgtctcccaagggaggcagtgattttgggtggtgcagagatggacacttttcttgtcagtattatacaatgatttccaaagcatattgggaaaaaaccagcccatcaaacctgtttagggagagcctaacgtaggcacttagctcaaaacaatgagatttgctgacttacttactatatggagtactacatgggtagccaaggaagggtttggcaaaagctgaaggtggggagcgggcgtggtagctcacgcctgtaatttcagcactttggtaaccgaggtgggcagatcacttgaggtcaggagttcaagaccagcctaggcaacatagtgaaaccccgtttctactaaaaatacaaaaattagctgcacgtggtggtgcataccagtaatcccagttacttgggaggctgaggcaggaaaatcgcttgaacctggaggcagaggttgcagcgagccaagattgtgccactgcaccccagcctggataacagagtgagactctgtctcaaaaacaaaaaaaaaggccgggcatggtgactcatgcccatgcctgtaatcccagtactttgagaggccaaggcaggtggatcacctgaggtcaggagttcaaggccagcctggccaacatggtgaaaccccgtctctactaaaaagacaaaaattacctgggcatggtggcaggggcctgtaatctcagctactcgggaggctgaggcagtagaattgcttgaaccggggaggcggaggttgcagcgagctgagatcgtgccattgcactccaggctgggcaacaacagtgacttgtctcaaaaacaatagcaacaacaacaacaaaaaacaaaactgaaggtgggactgggaagacgtttgggaaagcagcctcgggtgaaggaggtggaatgagttctacgtcttgactttggggtgccgtggcaggcagcgtggaggttgcctgtcgttcaggttggaggagcctgcctgggctgaggtggccagctggggcccagagccagaacacttgggaggggtggagaggaagcagcagcccttggagaggaagtgattcaaaaccacgtatgcctggatgtgtccggactacggcaacatctgcccaactgccttctcctggcccctgtgggcactccccttccagtagctggagagaccttcccggacagatcatgagcatgccccacacctctccctcgggatcaggttcaagctcaacttcctggctagcctctccctccagggagccagaggcctgccctgcactcacccactgctcaggttcaacccaggccttttctctgaggcttaagccctgggtgaccttgagttcagggtcagcttctgcagtgctggggatggtgactttcaacagtgctaagctggcctggatgcaacctctgtgctttgctgtggctcaaaatttacctactgtgtttaaatttcttgtgacggtgtctttatcctgcaaccccctaaagcagagagagggactgactgtccctgccttatagggttctgggttgggaaggggtattacttgagttagtaatggctcacactcactgttcaaagtgctttaaattccatacacggtaaggactatcccatttgacagaggaggaaactgaggcgaagatgaactcaccttaagtcacgcagcagcttgtagcagcagaactaggcttggggtcttggcagctgtgctcttacctgccacgtgcagaacctgctgctctggggtcacgcagaaggcaccaggacatgttgtgcatgcgtcgtttagctgttatcactttacatcccaccacagtgcggggcaagccgatgcccttggagtaagccccaggaagctggcctgggatgcaatgtgatgacaaagaaggtggaaggggagtgtcaattctgactgcagaagggaggcagcagacagtgcaggaggggctcgaggggcctggggagggtctcaagcagccactgtgggaactggggcagggacggcccaaacctccacgcatcagcacccagcctggcagactcggggtactcacctgagggcagccctgtgcaggcggtgacacagcagcaaccctccatctccggttaaaacaagtttgagtaagactcggttgtctcgctttgacgcaatacgttaaggaaacttgtaaagaatggcagatcctgacccagtgggcagaaaagcagcgggggaggagtctgtgcatcaggaacagcaacatgcaactccgcagagggaggggcccccgatgtgacagaaatccagagcaaagaaagagtggctctcagacctggaagggctggggttccattccagaatctgggaacataggaggaaaaagaaatcggaatgagaaacaggaaacaataaaatcactttaatgtgctactcttcactttggaaggtcattacagtatcattcgacaaggaaagatgccgctggatggctgtgtcctgtgagtcactgggatgagctggctgctttcaccccaccggatccggggctcagacagttacaagcccgagtggctgggaggtttggagggaaccaggtttagctgtgatgaaagcacctggctgtgggctgggaggcaggagtgcagggcagcctgggctcccctggccccagactcaggtcggcaagtgcccagtggaggccacacaaccccagcaccaagcaatggagggtgtatggctcagtgtttccacatcctgaaaagtgacacatgaaccgtttcctaggaaagttctcttccaccgtgttctagctgagacccgggatccttccagtttcacgaagaacgtgcagaagatgaaaagagtgagggacgcggacctagctgtagctgcactcagccgcctccgtggtaaagtctgggtgaaggcctgggtgagtgcagataggagagcagctcctcttactgttctctggctgggctctcgctccatccctgagaaactagaggcgaacgcctccaggaagccagccaggggcaaccagaaagtccttttggtgaagtctgacatcccgcgttggtttctctggacctgggtaagaaccggccccaggggaaggactgttttgccagcaccaactctccagcccagctgttggttcccactacctccggtctcggagacagagaagcagccaggctattctgagtgtagtgaacacagagccggtccgaatccggcccagccgaggtgcaaactccctagggtctgctcccacttggccagccatctgtccagcaggcctcagccccaaacacgggaaaacgcagagtgcgtctagtcactgggtatcacactgccccactcacagcccccatcaaggtgacatgcaggcgggagcttcgttccaggaggtgtttgtaaacttcgtcctgggctgggtcactgcagatggcctgtcctggtttctcattaccaaacccccatgtttggtattgatgcaggggcccattaaaaaaaccgcttatgtttccacagacccaccaagagggagggtccaggcacagtttttctttctgtatcatcctagaatgatggggaaatttccgccaaaactacatgattgcacgtatcagggtgggtattagactagggggctgggggtgggtggggaagaccttttgtgcgaggcattcctctgggccattcttgacaagagttttctccttccttctggaagtttctggcactggaggtggaagtccagactgcacatgcctggcatagcatgcagagcctgcctaggctgcgggtgggtgagcacgtgtgggaggaccctcggctctggccaccgaatgccctatgctggcttgtcagccgggaccccgcccctcccgctcccacgttaggagaacagcagttcacagatcctgcgcgtgtcctcaggcgctgtcacggagtagcccatggttctggggtctgtgaagatctcatggtcattgccaccctggaaagacacgaagtacagatgaaggctccccctcgtctgtcccgggccattgctgatgtgaccctggagtccaaaagtacccaaaaaacaagatttaactgggcagggagagtttcttcagctaccttcctcttagtttccaggagaggaacgtgagtacaattgttattaagaagagatttataaccttctcttgaactgcaatttggcttggaacacgtaattatgcctatgagagccatcacgatgttcttgcgaagatctgtctaaggcttatttttctacacagaaggcatcagcgagtgacagtattctcacagccatcagtttttttttttttttttttagctgtacctacgcttttctaacaagtcacaagggagcgtcaggaggcagagggccgggagcagggctgccagggatattcctgtgatgagggacgtggcgacatcagcggtgatggcagccactggccatgtgtcactctgcacacttgaaacgtggccaatgcaatggaggaactcagttaatttgattttaatttaaacagccccacgtgggccgggcatggtggctcatgcctgtaatcccagcactttgggaggctgagaagggtggatcacttgaggtcaggaatttgagaccaacctggctaacacagcaaaactccatttctacttaaaatacaaaaattagctgggcatggtggcgcac

SEQ ID NO: 96187 - DNA, 76965 bp, Homo sapiens
  misc_feature (1)...(76965): n = A,T,C or G
tcccacccccccaggagcccccttggtgaagcccttgccagtgaaccccacagacccagctgttacaggccctgacatctttgccaaactggtacccatggctgcccacgaggcctcgtcactgtacaggtgggtggagggtggcacagagggaggtggggtgtcttgagatgtgggtcttcagcaaatgctctgtcgcttctgcagtgaggagaaggccaagctgctccgggagatgatggccaagattgaggacaagaatgaggtcctggagtgagtgtgggacttgggcagggaggcggaggcaggcagcacttcccgggcctctgggggccccagggctgcctatgctgggagaggaatgaaatgtccattccaaacaggtttcccaatgctgccttcccgcccggggtggtggggctagtgtgtaaggcaggagtcatgtcttgggaggaggaggtgccttctgttccactgtttccagcagtgccctgggcatgttctgtgagaccaggccagacctggtagtaggggtccgaggtcacaatttgctctctgctgagacctcagattgagtggtgaggcttgccctagcggctcctttgacatggtcagagttggatcagcacccagcacccacctggccctgttgctccccacagccagttcatggattcaatgcagttggatcccgagacggtggacaaccttgatgcctacagccacatcccaccccagctcatggagaagtgcgcggctctcagcgtccggcccgacactgtcaggaaccttgtacagtccatgcaaggtgagtaaggggcagagcaagcaggtggaagggagtgtggaggtcatctgctgtggcctcctccgtgtccctggtcactgaggatggaggctgcacccctctaggccctggcttgggcatccacacccactcctctgaatcagcatacctcttgcaccctgctcagtgtgcgctgggcctcacttaagccctgacctgagggggcggttctgtctcttgggggaggggcccatgggtgcccggtcagcctgcctcaggggctgcctgtacaatccacaaccccagtgctgtcaggtgtgttcacggatgtggaggcttccctgaaggacatcagagatctgttggaggaggatgagctgctagagcagaagtttcaggaggcggtgggccaggcaggggccatctccatcacctccaaggctgagctggcagaggtgaggcgagaatgggccaagtacatggaagtccatgagaaggcctccttcaccaacagtgagctgcaccgtgccatgaacctgcacgtcggcaacctgcgcctgctcagcgggccgcttgaccaggtccgggctgccctgcccacaccggccctctccccaggtgagccccaccagaccccattgggagactcgagctgggggtttctctggcctcactgaccactgctgcccacagaggacaaggccgtgctgcaaaacctaaagcgcatcctggctaaggtgcaggagatgcgggaccagcgcgtgtccctggagcagcagctgcgtgagcttatccagaaagatgacatcactgcctcgctggtcaccacagaccactcagagatgaaggtgggctgggtgagcagggtagaggggctctggctccgggccccacccttaggagtcgaggccctgagtgtccgtccctggcccccaccccttcctcagaagttgttcgaggagcagctgaaaaagtatgaccagctgaaggtgtacctggagcagaacctggccgcccaggaccgtgtcctctgtgcactgacagaggccaacgtgcagtacgcagccgtgcggcgggtactcagcgacttggaccaaaagtcagtgcccagtcctctgctctttcccggagccacctggagcccagccccatggttcacctggagctggcccttctgcccaccaggtggaactccacgctgcagaccctggtggcctcgtatgaagcctatgaggacctgatgaagaagtcgcaggagggcagggacttctacgcagatctggagagcaaggtggctgctctgctggagcgcacgcagtccacctgccaggcccgcgaggctgcccgccagcagctcctggacaggtttgtgtggccctggggctgtggtgcggctcgggtccagacaggctggggtgatgggagcctggccccactttttccttgcctgtcgcacagggagctgaagaagaagccgccgccacggcccacagccccaaagccgctgctgccccgcagggaggagagtgaggcagtggaagcaggagacccccctgaggagctgcgcagcctcccccctgacatggtggctggcccacgactgcctgacaccttcctgggaagtgccaccccgctccactttcctcccagccccttccccagctccacaggcccaggaccccactatctctcaggccccttgccccctggtacctactcgggccccacccagctgatacagcccagggccccagggccccatgcaatgcccgtagcacctgggcctgccctctacccagcccctgcctacacaccggagctgggccttgtgccccgatcctccccacagcatggcgtggtgagcagtccctatgtgggggtagggccggccccaccagttgcaggtctcccctcggccccacctcctcaattctcaggccccgagttggccatggcggttcggccagccaccaccacagtagatagcatccaggcgcccatccccagccacacagccccacggccaaaccccacccctgctcctcccccgccctgcttccctgtgcccccaccgcagccactgcccacgccttacacctaccctgcaggggctaagcaacccatcccagcacagcaccacttctcttctgggatccccgcaggttttccagccccaaggattgggccccagccccagccccatcctcagccccatccttcacaagcgtttgggcctcagcccccacagcagccccttccactccagcatccacatctcttcccaccccaggccccaggactcctacccccacaatccccctacccctatgcccctcagcctggggtcctggggcagccgccaccccccctacacacccagctctacccaggtcccgctcaagaccctctgccagcccactcaggggctctgcctttccccagccctgggccccctcagcctccccatcccccactggcatatggtcctgccccttctaccagacccatgggcccccaggcagcccctcttaccattcgagggccctcgtctgctggccagtccacccctagtccccacctggtgccttcacctgccccatctccagggcctggtccggtaccccctcgccccccagcagcagaaccacccccttgcctgcgccgaggcgccgcagctgcagacctgctctcctccagcccggagagccagcatggcggcactcagtctcctgggggtgggcagcccctgctgcagcccaccaaggtggatgcagctgagggtcgtcggccgcaggccctgcggctgattgagcgggacccctatgaacatcctgagaggctgcggcagttgcagcaggagctggaggcctttcggggtcagctgggggatgtgggagctctggacactgtctggcgagagctgcaagatgcgcaggaacatgatgcccgaggccgttccatcgccattgcccgctgctactcactgaagaaccggcaccaggatgtcatgccctatgacagtaaccgtgtggtgctgcgctcaggcaaggatgactacatcaatgccagctgcgtggaggggctctccccatactgccccccgctagtggcaacccaggccccactgcctggcacagctgctgacttctggctcatggtccatgagcagaaagtgtcagtcattgtcatgctggtttctgaggctgagatggagaaggtgagaagagggggtgggtgcccacgagggcagtgtggggtggcagggcaggggatcctggaaaaccaggtctgtcttggcttatctgtccctcagcaaaaagtggcacgctacttccccaccgagaggggccagcccatggtgcacggtgccctgagcctggcattgagcagcgtccgcagcaccgaaacccatgtggagcgcgtgctgagcctgcagttccgagaccagagcctcaagcgctctcttgtgcacctgcacttccccacttggcctgagttgtgagtccactgctctggatggtggttgggggtctaagtgctgtccagtccttggtgctgggagggatgagagcctcaggtcaggcctggctcataggctcttcctggccccatcctgtcccacagaggcctgcccgacagccccagcaacttgctgcgcttcatccaggaggtgcacgcacattacctgcatcagcggccgctgcacacgcccatcattgtgcactgcaggtagagggtgggcctgagggtctctcctctatgggctcttggcctagcctcataccccggcctcataaccccttcttggcacagctctggtgtgggccgcacgggagcctttgcactgctctatgcagctgtgcaggaggtggaggctgggaacggaatccctgagctgcctcagctggtgcggcgcatgcggcagcagagaaagcacatgctgcaggagaaggtgaggatctgggcagatggggctgggatgggccttctgtcccagggtgacgggcccctgcccagctgacctggccaaatgcacctgtgcagctgcacctcaggttctgctatgaggcagtggtgagacacgtggagcaggtcctgcagcgccatggtgtgcctcctccatgcaaacccttggccagtgcaagcatcagccagaaggtgaggaaggttccgtggaagctgctgggagagccacagccttgggactccctctcctcactcactctgtcttctcagaaccaccttcctcaggactcccaggacctggtcctcggtggggatgtgcccatcagctccatccaggccaccattgccaagctcagcattcggcctcctggggggttggagtccccggttgccagcttgccaggccctgcagagcccccaggcctcccgccagccagcctcccagagtctaccccaatcccatcttcctccccaccccccctttcctccccactacctgaggctccccagcctaaggaggagccgccagtgcctgaagcccccagctcggggcccccctcctcctccctggaattgctggcctccttgaccccagaggccttctccctggacagctccctgcggggcaaacagcggatgagcaagcataactttctgcaggcccataacgggcaagggctgcgggccacccggccctctgacgaccccctcagccttctggatccactctggacactcaacaagacctgaacaggttttgcctacctggtccttacactacatcatcatcatctcatgcccacctgcccacacccagcagagcttctcagtgggcacagtctcttactcccatttctgctgcctttggccctgcctggcccagcctgcacccctgtggggtggaaatgtactgcaggctctgggtcaggttctgctcctttatgggacccgacatttttcagctctttgctattgaaataataaaccaccctgttctgtggcccgtgtctgagtctgcccattgctgcctcagctccagtagcactgccaggaacttaacttacttagcaccttttgtggatgacaggatggtaccaaactgccacactaccaggacagttctttaagggccctgcagttctggcttgctcatcctccccatgccacactgtatgtatgtttcctcagcagctctgaggagggtccaggcagagtgtgtgcacaaacaattccaagagacacaagtagctcccaaagtgcctgacagatgatgatatggttttttaaaaaagtttaatattattacagtcaggaggcagcggctggaagatactcggctctttcccccaagtccaggttcagtgcattggcccccacacagcaccccagcctcctgcctgggcaaggaggccctgcgctcagtccagcttctccagcacagagggcacatacaccaggctgagctcactgccaaagttgcagacaatggcagcgttgtccagcaccaggatctggcgggcaggctgggcctcactgttcttccccaggtagactgtctgtaacaggtccccgtagtttaggtcccaaaaggagacacagccctggccgccagtcaccagcaggttgtctgagatgacacccaagcttgcaccacagcccaggtcctggaggcaaggacatgacaagctcagtcctgagtccttccctaaaatcccaagaatcctatgatccccatcccctctacctgctgaatggagtagaacttgatgcctgtgctgcggtcccagatgctgatgaggtcatcyaggccactgctgatgacacaggaggtggtacaggtaagggaggtgacatccccacggtgagcaaacacatggctgacccggctgccagtcagtacatcccacaggcagatggccccatcttgtcctccactggccagcaccatggtctggggaaacaggccaggggagtggggtcaccatggtgtaatacctctgtcaacagtggtgtccctgtgccccagtgggtggggccctgactgcttcctggaaggcccctggggaccagctcccaggagtcagcaaacatgggccacagactctgtaccccctaccccacctgcaggccgcttacctggtcaatgtacacggtcgtgatggcycctgagtggccctgaagggtgaagaggcagcacgagtcctccagacggaacacctgggacagggatgggcctcaggttctggtctctgggattttccaagttatactttggctgggaaatgccctctgttcttcaycaggactcttccagcctctccctgacgaatgcatcaggctcccaccccgtgccgggccactccagcacccaagagacaagacaatactcactctcagtgtgtggtcttggctcccagtcaccaagcgcccagcagcggctttcagggctgtgatgggtttttggtgtgcacagggcactgtgtgggtcaggtgacaggccactgtgtcgctgctgctgtacactggagaggcaggggaactgccccgccctggggtccctgaggacaaaaggccaagtgaagaatctctgagaaagcaatgggtagacggcccctgcccgtcccaccaagtgtgaacacctgcccaccccaggccctccgacctctaaactgcagggggctgagggcagtgtgggtctccaaggagaagaaatcaagggaaccgttgagccgtgcagccacaatcctggaagagaagaacagctgccaggggcctctcccttagagccccagccctggggctgagcatgtggacatgagagttaagggccagttcaagaaggcacaggagggacatggccaagaggaaagcacatggtgccagaacagatgctggagccagagggcaactccaaatattaaccaccttgtgcctcagtttcttcatccgtraaatggggataagagtacccacctcacagggtggtcatgagaatcaagtgagctaacgtgtaaggtggtacctggtgaatatcacgtaagtttgtaaattaaaaacaagcagagggctccatgtagcctggagctgaagggagggctgctgaggggaaacaggatgcagggtgggctatgttgggtgttgcggaagcctgcattctccacataaaagcagcttcaacccaagcacagctcacatcaattcctttttccataaagaaacaaggattttctttgctctccaaaattcctaggtacagtctgacaggcagggatgggtatatttgcccagtaaccccaaagcctcaaagcagatggggttcaaaatcttactgcagggaaaggcaatgcatgtctgcctacaacctctgcccatgaatttgaagggcctgcaccagagctggggaagccagttttatgattggaagtgggtggacaaggagagaccacagtcaccaggaaccctgatggtcaggttgagacatcggggctttccttaaagctaaaacaagcagcaaaggagaatttccaagaagcatggaggggcctggtgaaattggccaggctggaggggaggatgtcagccaaagcccatgcagaacctgtggtgacaggaatgacggcagcagcccactggcagaaatcaacatcactaagggcaagggaygccccctccccaaggaaaaagactccagctctaggtcagatggtgctgccaccaacagtcaaggagccttggaggaggagccagtgtgggacaggcaggcaaaggcgtcyggcagaaggcacctggccactgggtggagacccaggttcaccagcttggaggtggggccagaacccaggtggctgagactccccaaggagtgtgcatgcagacggagtactggggacgcccacagccaacaggcttgctgaggaggccaagcacgacagaggcagggagagcagagaacagctgccagcggccaaggagaagagagggttctgcaagcgcactctgtaactaaaaatgcaaccaagataccccaaaggctcaatattgacaagctaatcagagaaactggcttcattgagaagggcgagaaaggataggagtatatcactccccactgtcactgcttaaggccctgggaggtcaccatgtgccatgccctattccaagcacgtcacacccctaacgcttttttttttttttttttttgagacggagtctcgctctgtcgcccaggctggagtgcagtggcgggatctcggctcactgcaagctccgcctcccgggttcacgccattctcctgcctcagcctcccaagtagctgggactacaggcgcccgccactacgcccggctaattttttgtatttttagtagagacggggtttcaccgttttagccgggatggtctcgatctcctgacctcgtgatccgcccgcctcggcctcccaaagtgctgggattacaggcgtgagccaccgcgcccggccacccctaacgcttttaattgttaccttcccatccaagtggactgccctctgctcacaggtgtggagctgggcaccaagaaggtcaatcgaatcatacagtacagcagttgaagagaaccagaactcaagactcaagagagtatggcctagccaacaaaggctggggacatctggggctgaggcaggccacgctcaccttttgtccaagaacaccagagcggtaatgccygaggagacctcctcgctgctgcagcacagcaccccttcaatggcgtcccacacctacgagtccagaggctgtgagcacctgccagccagaaaggcccacaatcccyggggcggacagccgctctgcccacctttagcccctctgcccacctccagccggccgctgctccgccccaccacgatgaggttgccctgcagctccaagctccagatggaaccctcggcactgggggcccaggcgagggaaggggagcctttctcgggggagccaccctcgtcctcaggggcctgggacagcaccggcccaggcgagggtgggcgcagggctggtgtgcagacggccgccagcccctcctcctggtacacccgctgcaccaggcagctgaagtcatagcctggggagtcccgagagcggccacagaccgcccggtgccggggctcgggctgagtgggctgtgaggaccgaggctgcgctgaaaagttggtgtcaattaagcaggtgaggtcaggctggtccccgaagagggaaggcggcggagggccccgggggcggtgtctcaggggagggctgtccccaggctcctctggaccagccttcccaccatctgaaagtcgttcccagctctcctgagcctcaagcccgctgcccacgccactgtcccggcgctgcctgctgggggccaggagggcggagtgagagggggcacgggggaggggggtgagagggggcgggggacgggggtgagagggggcgtgggagtgagaaggggcaagggaaaagggggtggggggagagggtggtgcggggtggggnnnnnnnnnnnnnnnnnnnnnnnnnnnnnnnnnnnnnnnnnnnnnnnnnnnnnnnnnnnnnnnnnnnnnnnnnnnnnnnnnnnnnnnnnnnnnnnnnnnnnnnnnnnnnnnnnnnnnnnnnnnnnnnnnnnnnnnnnnnnnnnnnnnnnnnnnnnnnntgggggcacaaaggaggaaagggcagccgcacctaccctgggcgcggaatgcgcgttaggcaatccccggtctgcgcgtcccacacgcagatgtggcctgccaggcagcagctcaccagcagcatgccgtcgctggccaggcactcgatgtcctgcagaagcccggtgttggtatgggccaggctccggccctcccctacccggccactgtgcccctgctcaccatgaggtggccgcgcagcacaagcggcacgatctccgtctcgggtggcgcatagccgtagtcgtcgcagggcagctccccgcgcctccgccgcccgggcccaccacccagctgcccgtagttgcgcgggcatagcacgcggtagaggcagagcagcagcagcaccaagacgatgccggtggccaggcccagcgccgccaccctgcacgggagggcggactgctgtgagacacacctcacagcctgtcccctcccctcctccctctcccctactcttgcctacccgtccccctccccgcactctttcccaccccaccccacccagcagccttacttgtacagcgtgacgtctccatgggcctgcaccccacctgggcccttgggtcctgcttcccagtgcccagcaggtatgggccccggtgggggccaggcactgcggccgtcctgagggtgccggccctccagagcctccctcgggttcaggcggagcgtgactgggatgacgggcagcaggctgatgtacctggattcggacagtgggcagcctcagcggggggcctcccagggcttcctcctgctgtgctcgccagccagtcctctccctcctccccaggcaggcctcagctccaccggccagactctcccagcatggggggttggggacagaggtaggtccctccccagcccagcttagcagccaacttgctgtcccagawaccagcacccaaacagccctggtggccgtgtggggtatctccctccccactcctggcacaggtgggtgggtytcattctggtgagggctggcagccaccagtgactcctcagagcaacctgggactcctctcttgggttatagctgcctaaaccaccagttcccacctcacaaccttatgaactgttttaattatttgcataattcaaacctgtgggcctcctgcattggggaaaggggatggtgagttgacaccatcgagtgaggtggcacctggcacggcccagctcacctcttggccagtgtgatgttgtaatagctgaagagcgtcggccagtggcggaaggacaatttcctccaaagttcctcatcctcaggcccccaggttacctctgggactgggctgtcatggacaacctctgctggacctccacgctcaggtgactcgcctggygacgtctggttctcaggtagcttaggggcatcaggtgggaagatggagaaggcagggtccgggtggctggggggcagcatgccactaggcacgggcatgggagccagggctccctcacccaatgggctctgttccgtcacctgggcagcgaggtagttgcgcagccctgctgggtctgtgtataccaggatgccaatccagacaacggtgccagcctgcagtggggcagggggtactcagtgggaggaatgggccccaacccccagcagcttcagccctcatgctgagaggaagcagcacagggacctcaggcctggggatggagagaggacacaggccccactgcgtccttttctcctgcctctccaagtcctcctgctaacacctgccaacacttgctgctggaggggcctgcttgcctttccacagttaggggctgagtttcttggcctggaaatacactgaagcaccctgaggtttgacacagaatgtccccacccctaagctccacctcagctggagccagaaagctgctaccattcctacggtcagagggccagcaacctgacctgctccagagtcccccagaggtcctagtcccagggggcctcagccttcctcccatctcagttcagctccctggaagaggcactgctgccccaaggccagcccagcccggctggtgaatgattttgcccagcactttccagtgtctgcacaccatgcagcggccgatgaacccgacccagggcaatgtggtggccacaagtgggtccatcccagagcactcaactaacaggctcctgtcctgggccactctggggagaggatggctcctgtacctgagaaccctggagctgcttctcccacaggcttatctcctcagaagccactagggtctgggcagggaggacacaacgggcaactccccagagccaggcttccaggggccaccagggcctgaggaataccctttgccactctaaggccaagtgcagcaccacaaggggcctggagcaccggccctccagaagagggcagggcagggcaggggtggcaggtaccatgatgaggcgctgtgccaggcgggtgcgggccaggaagtagacaacacgcagcctcttggggagccgcaggtttcggaaggaagacggctgcaacgtgatggtgtggggtgtggacggcctcacagccagctgccgctcgtagcgcgttggctgycccactggcttggctgagggcaggcaggcctcagggggcagtcgcttgttcaggtctgctagctgttgggggcacagtggtcagggcctgagtccaccatccagaggctgctcgcacaggaccgctgtcctgcccgaggtctacacccttctcacccaggactccctcagtacagccagggctgaggaggcgggcagggcagggctcagcccactcctacctccatccggcgaatgtcaatggacaggacagtggtgaaaaacagcatctgaaggaagaagtcagacaccagccccacgacagcaaagagacagaactcctggaatcagagcacatggggatgggggggtgccgtgacctcactgtcccagcccaagaggagcagtrcccggactgcagccacctcataaccggcagggcagcagcaggcagggcacagcagagatgagagatgctggttggtcctcagctcacataccagcagcagctcaccccgtctccaccagggggcagaagaaaccctcacactttcttcagaaagggctgaaagggaaggggaagtaccttccctgaatcttccggtccctctagaggggactgaaggcctgatccaacccggaaacctctaagccccaccagcctgctccccaaaaagtccttccccactgagcccccgccctgctcatgcatcaccaacccagctagagcccaggcctgattcaggggctctcagaaaggttcccagccagcaactgccccggaacaatgaagagagagagagagggattaattctctaaaactgaaaaagggtgagctctctgctccccaagctctgtcagcagacaaaattttctgagatgtcggtgttgagacctctagcacatcaccacagtgctactccgatctggggtaagaccatggagtgcagatagtggcacagtggttgtctcagctctaacgtcccaagactgtaccctatcctgcagatactactgtttttccaggagaagcagcccacagcccatctgttctctgctcacccccatccctcagctggcctgccagccctgggggaaagacgggggagaaaagatggcatcctccccttcctgcaactccttctggaatggctggcatcagtctggggttccagctcagtgcagggccacctccacctctgctcacagcccacagctgagtgagggcactttgccaagagcagggtcactctgggcaatgggtggtggccctcccactggtcaggccaggcaaggccatgcgtctggcgactgcggcacaggccagggccaagggaggagaccggaggaagggtctaggaaccccacggtgcttctccctcaaaaaygggaaacaggtgtgacaaactgcacagccagtccccagctcctgccatgcccttgcagcctcctcctgccacttggctgaaagggaagcaggcagggaggggtaggaagacagggtcaagggcagagtctgcctggctaggtgctcaatctgggaacccagccagggtttgctgagcacttctgagccaggcatgccaggggccatctgggtgctgtagtgatctgcttgccaggcaaagaggtcccacctcagaagcaaggatgcctgtgctgaagaggggagcaccctgcccatggctgcacagctggggagcacagcagttgcttccatgctcatccaggtggcaggccttggggccttacctggatggcgggcactagggtgaagtagccgatgaggatgatgcccagctccgtggccatgttcttcatgatggaccagctctcgctgcttaggcctgcagagggcagcaacagggcacagggcaacacatggccactctgcgacatgactcacacaacctcatgggcctyggagtggcagaggcatggcraggccccccagccctttgaaggagccattccaccaaagcaccccaaccctcagggtcctgctaatgcccagactttaaggggccatcaccaccacacagctgctacggggaacgggtgttcacagcctggagggtgcagaggagagctataatcatcaaaagagggaagaagcagagtgtggagatgagaaaatccacaaggaaagccaagtgccacccacaacaaccacatccaacctccgcatgtggttcttgtctggtctgcacgggccagcatgacagtgtgcccatcaaccacatggcagaagcactcggcgggtagaggacctggctgcgttcttcctcaagccccttcctgtagtgagccctgatcccacgctatcacactgtcgcatgtctaaggctctgtgctcttactgggtaaggacaatttcgccccatctcttcctaactccatatccagcacagggcctggcttatcacagaggctcacagaggtctggatgaatggacggctgcctacagccccattcctcacagacatggggtgacgaggaagaagaggctcaagtgaccaggcctccaaggccaggctctcccttttctcattttccctagaaccccagatccccagyttctaccagcagggccagagggagcttttctggcagccgtgaaggcagcgtctctgaaatggccagcccccggggcttgggcctagtgtgctggagtgaggcagtaagagaaaatactaggcgctaaactccccagacagaaagccaccaccaaacacaagccccacccacactgaagtgcagtggtgtgatcacggctcactgcagctttgacctcccaggctcaagcaatcctcccacctcagcctcttgagtaggtgggaccacaggtgcatgccaatatgccctgctaatttttctatcttttgtagacatggggtttcaccatgttgcccaggctggtcttgaactcctgggctcaagtgatccacctgcctcagcctcccaaagtgctgggattacaggtgtgagccatggcacccagcctggtttactttcttactgacacatgaaccaggacgaagtacagtccaatggccccatggctccccagggcacacactcaagagctgccagggcccagtggcccactgcatattatgccggaggcaagagcaagggacatttcaagggctctgtttgctcacagagcgttaacagcaagaggaacaggccccattccagcccctcctgcagccctctgcccaactctcccactgcgttaccttgggcgatccgcagcttcacctccaggtctaccggggttgagaccacagacttggtgagcaccaacacattctctaacccaataaccaccacaaggtaggggaaaatctcgctggggacagagaaggagaaggtgaggacagtgttgtggtggttcccaacagactggggccctcaggaaggctgtggggtttccagcctgtcatgggggctgctgagtgactcccacaggtgctgggcagaaaccctcccttgtccacctcacccaacaagacctgcatctacacagcactcagctttcaggcaggctccagagccttgcagaggggccagcagccatcctgtctctagccatccagcacaggagggctggaagaggcccctcagggagagctgtgcagcgccactgctagaccacacttctgctggcccttcccaggagaagactgctggctaaagacaatgactgctgccaagacccacaccagtaactctgggtggacccatcacagctaaatgcaaggagatgaaaccatcctgaaggcccactcacctttgttgagaagctgtgtgtggagaagaacgactgttcctacacaaagctctaccagctatctgagcccactgtcccacactccccgcagcaaaccctaagaaagtctatgtgcgaggaacgccagccaagttataccttgcaggacctctgctttggagccgaaggaagggagggccctgtggagggtatggcagacggtatgggggagggtggtgtttaacagtgtcaagctcaggaaagggagcaggtatctaagagcaacgaaactaccagaaacaaaatacgacgtcgcttttcatacgaccagcctgatgggccaaagtggtggacaggccaatccataatccattaataaccattaatagacaggcaggcgggcctagccagagccaagatcaaagcctgaggacaagccgagggaagggcttccagactaaggttcagagaggagtggcaaggggaaagtaaacatcagtgaaaaaggcgacaaattacagtgtgctcatatcttccaaagagcttcctctaaaatgacctatttcattaggcatttaaatgttctaatcatgaaaaaaaaaatgttctcttctctatctcacacctccagtggcttaagccatcaagctgcagtgtgtgtgtggtgtgtgtatatagaatacataaacacagacacacaaatccgactacacacatgcaatacatactcatgtatacacaaacataccaacacacaccccttatatacacacccagcccacaaatatgcacttttgtacatatggacactcactatagctagatatgctatatacaaacacaagtatgaatacaagccagacaaagaagaggaagaaaatgtacctcttaaatgtcaaaaacaacaatgtgaagacgtgaggtcacagcaaagtccagggaaggccaagaacccagaagtgcaaggctctctggcctgagcccaccctgtggcccagtggagcctgctagggacctacccgccattgagggtgggcgtcaggccgaagagtgtgcagagtcccacagacatgagcagcgagctgagcactgtgaccacggcagccagggccagcccccacttggacttgaccatgtcgatcttccctggagggcagagagggcgtatcagggcggcccctcccccagcccccggcccactggggctcccgggagtaggttgccctgacagtcgaggaagggaaaactcctggtttcaccaaaggaaagggacaggcacaagcacttcccagtgtcatggacacagtacacctyttaggaaccctaacccaggaaggggctgaaagtgggaagagccccggccccacccaagctcctaagaccctgctgggggacaaagccctagctctgatgaccaccaggtgtgttctatctctctaccccaagccacctccagagccagggaagcaggtgacatggaaatgcccgtttagcttggagaaagccctcagcctccctgccatgaacctacgcgtggagaagtagatgtaggcaaacaagatgatgtaggtggtcacaagggggatgagctcagcgacaccaatctcctccttgaagtgcacgtggaccaggctctccgcccgaaggctgcagttggggctggggtgcagaagcatcaggcgggcacgcaggctgcccaggaacctggtcaaggagcagggtgggggtaaatggaagtgttgctcttggttctggggacaaagacaatccccggacagagggtccatcaggacctccctcctgcccctgtgttgaaagggaacttctctatggtgcctgagcttctctatagtctccaggggcactgggaaaatcacaaaggggacaaagttttctcaggagctccccctgctcctttctttgtctccctttccggacctactccaacactctcttttttatttatttatttattttattttttattttttgagacaagagtctcgctgtcgcccaggctggagtgcagtggcgccatctgggctcactgcaagctccgcctcctgggttcacaccatcctcctgcctcagcctcccgagtagctgggactacaggtgcccaccaccacgcccggctaattttttgtatttttagtagagacggggtttcaccgtgttagccaggatggtctcgatctcctgacctcatgatccgcctgcctcggcctcccaaagtctgggattacaggcgtgagccaccgcgcccggcctccaacactcttgattgccagaggcctaggagagcygatcagaagcacctcgagtgcccttgccaattggggagctgcctgcagtgccccactgggaaggacacaggccatatagggtgctcagtagtaaccagctggggatgcctgccctaggctcaagagagaccagaggaggcaccaggacactgagaccgccagccctaccttagtcccctatgcttaaccagmtgtcaggtcatccccattaaaatgtggtagacagcatcatctagtctgagggatgtaaacattcaacaggaggcctggaaactctcccaagtttccagggggcattcagaacactctaaccagaagagggactactcaaagcctcatgtcacccagcagaccagtcaagagcccagggtactgtcaatcttacttggcatggtagtgctggaagaccagggtgatggtgtaggagaccatcctcytcctggtgtagaggctcaccccgctgtacttcccaggaacaccaaataacaagtctgcaagcagaaaccagcaggtactgacacagaaatgacagctactgcagagccaccaaggacccctttctcacccccaccctgggaaacaaagggtaaaccctgatctgcctaagcacacatcaaaaagacggtgaccaatgggcacctttacaggtctgaagggaacttgtactggggctacctttgagtgtggctgaagtctgcagggttttaggctcgtgctggtggatggtcccaatgatgtcaggatcagcatggaagcgttcccagtcattctgycagaagttcccaggggacagcagcaggcatccatgctcagggagtaggttcctgagcttcctaaggcctggcagcaggtcggtcacttgcagacacaactcctccaagctcctgatcccagagctgcacaggagacaggacaaggcacctgctgtgtctgccaccacagggcagacctgctgtacttaggggacatcctctgtctgttcttcaatgccccatatttgctctctggtatcgccaaagagcctgaccactagggcagcagggggaagtacttccaggtggccaataacctaaacatgtggctgtctgactttcaaagtgcatctgaagcccaaaagcccatcagctctgaggacgggcaagtgtactataagagcatgcacaaccccacccactaaaacaccctggccagttcagtggatgagcagggaccggggtaaattaggggcttcatttagttcaccaaaatatctgtcaacgccactagctaactaaaacctggcagtgatgcagcttgccaattacacacattgtatgccaagccagcataacccagggacccactgataggcaggggagcacgacttgggctggggcttcagaaggtacccccaggtagagcttgcttctcgtcggcagagacaccaccattacattcacaccataacccacaggcaggaagccatgtgggtcatgagttagcacagtggacactgactccatctgagatgtaaggatgagactcaaggctatgtgtgtgccatctgcataggtccaagcggaatgcagccaccgtagacccacaaggatgctgagaaattcaaggctagctcaccctccatccttcttgcttgttctatctctgcagagctgactggctcactgcagttacactgaggactgtaactctcccttcagtacagaatgggattcagggaggccagggtccctgagaggggtacctgtctctcagcacgtggttccggatctcctccaccagttggaatgcccgggacaaaggtgaacgaaatacatctactgccaggaggttcttgtgccagggaaacactgaggacttcacaaatatctgctggacataagccaccggggcacccacatactgcagaagaaatgagggagggcagaaagggcagctgagcacaggaagaagaaagacggtccaattcaagggatttaatgggcattggaaaccgtgccccacagagttaaagaaaccaatgactaatacaagttcttgagtttgcaggatggcagataagaaaagaaacaatttgctgaaacccagaaactccctccgcttatgagataaaagaactggctgaaataagctggaaccaagatggccgactggagttgtgcagaatgagcttgccgatgtcacagcctgaatttccactgccatgtttcatactaactccccccggaatttgcacatgggacctgtgaggtggcatcaagagataactgggcatgctcaaagacttcccagaaatcacccttccttccaccaatcatctgctaatcctagtatccaccctctaaacctttcctaataaaattactgccttaaagccagcacagggagacagatttgagctggactccggtctcctagggagtcaaccttcaatataaagcttttcttttccccaaatcctggtgtcacagtattggcttctagcacattgggcagcgagcctcttttgctcaataacacatctactaagggcaaagcactgtgggaccaggtgtaggcaaacgatggcctgtaggccaaatcagggcccatgcctgtttttctttttgagacagggtcttgctctattgcccaatcatggctcactgaaacctcaatctcccaggctcaagagatcctcccacctcagcacccccacccaccaagtagctgagactagaggtgtgtgcaccaccaccacgcctaattttcaaaaatgttttgtagggacagggtatcactatgttgccaggctggtctcgaactcctgggctcaagtgatcctcccattttggcctcccgaagtgccacacctggctaacttctttattttctgtagagatggggtctcactatgttgcccaggctggttagtgcctgtttttccacttccaatttttactgaagcacagccacacccctaccattactattgtctatggctgctttcactctacaacagcagggtcaaatggctgcaacagaggccgtctggcccgcaaagcctaaatgtttactatctagccctttatggaacatgtctgctgaccgcactatagactctacactccccaaagcatgtaacctgtcttactgattcaggttttgtcacttgcagcagagtagcgggttttgaagatcaaaggacccaattttaaatcacagctttccaaacatatggccttgaaaacacttttgacatctctggatttcaatttcctcattgtgaaacaggaataacgacattcaccctgcagcatcaagatgtatgcacacaccacacacgcatacaaacagtgtctgaaagattagcagaaatattaacaatgaacaatcaggcatttcacttcatctgaccctcacaacagcctgatgagaagcaaggagaggctcaggcattgtgcctgcctagagcttcacactccaggcagggtggtgtaaggactcaaaccaaggtctcctcactaaatatcacatacttttctcactagaatctgccatctacctttcaagagcttaacagggatgtaaatgacaagagtgttcacatatgcaaccctcagtaacaggcatgtcgcggagcaccccaaaacatgctgggtcagccacagcagagttatggcccaggagaagctgagtagagccataaggttagaaaagaacaggtaggagaggagcaggagggaatgtgagttgcaagggatgctgagagcacagaaggcctggacatctgcaccaaggaaacctgtcaggggataacagaaattacgaggaagatgacaagcaggcttagactgaagcctgactgagctgtcaggattttaatcagttgacaaagcaaagcccagtgtctctgaggtgaaggggcaacctgatgaaagcagtgctctgtaaagactccccgggagttggtgacaactggagacaaggaaacatggccctagacagcggtgtactgcgaggtgtggactgaagggggcagggcccagcccagctgagggatgaggggctgtctccacgcctgggctgcagtcgggaactccaaggggcatgcgtgtggatgaaagggaggccatggagccactcaccaatgcagtactccaggttacagcataggcaagggccaagatgctgaccaagcacagcaagttaatgcctcctgggaccctgggcacaaaggaacaaccagaggcaaccgtctgagcctttgtgaactttatgtggctgtgccttagtgagggctctggggacagaaggcctcatccactttgtcttctgtatcacgctcagccactagaagctgctgggaggcacagaggcacctggatggagctggctgccacaggctatgaccagaacagaagctcacacaggtctgagcaggaaaggagcactaacctggtaaggaagatgtgggcagggcccacactcactgtgctgagtgaactcccacaatccctacttaatattcaagagagaaatggacatggaaacactggtatcttgagtgggtgatggaggaagtaagggccagtggggtccagatgcccctaggcaaaagactcctaactagagagaggctgtggtaggcagccttctaacacggtccccaacagtccacacctcctggtgctcatgcccttgtgtaatcccatccccttaacagtgggctggacctaatgatttgcttctgacaaataaatacagccaaagcaataagaaatcacttttccaattaggttacaaaagactatgactccttctcccaccctggcccccttcttttgggagccaccgctctgatgaaaccagccaccacattgtgagctgctcagggaaggcctatgtggcaaggaattgagggaggccttcagccaatgcacagtgaggaactgagatcctcagcccaacagcctgtaaggaacctacctttaagtgagcttggaaggggatcctcccccagttgacctttgagatggcagcagccttggctgacagctctactgtagtcttgtgagagaccctgagctaaagggcccagataagaaaaccatggctcagagagataaaatgaagtgtccgaggtcacacaattgataggcaacagagccaggattgaaacccagggctgggtagctctgaacaatatgagtcttatggagaacaagacacagaaggaaaggcctagcacaagcggcgtgggagaggagctgaggtcctgggagccctggagtctccagccaccacagttcagagcatgaggctcccacccagagcttcctggaaaccctgtgtccacgctcacgcagccaccacaaacactgcaatgttggccgtggaagtccagcatggaacaaacccagccacctctgtggacctgccagctaggccttcgtgtgaggctcaggttttcacaaatgagctagtcttggggacccaggcagggctggagacctcaggtttttgaaaaatggaatccttcctttctatttagatacagcaacctagagctccaggtattttacctttacaccagtgtacccgtgggctccctcagaacaggatgtggaggactcctgccactcagctcttcctagagaaaaggcctcctgatccttgccctccaaccctggtgggcaagggctgtggtgggaagagcaggctcaggagacctgcctgagttcaaatcccagtgccaccactccctggctgtgtcccttggatgatggtctctatactctccaagccttgtctcttactgagggaaatgagaataaaacctcagccctcaccagagcaccatgaggaccaaacaaaacaactcctgtgaaccatccagatctagcaaagtgtctgaaaatatattagttatatcatttatattatcccttaaaactatgaaaacgagttggtgtcccatgcacaatcatctcagtctacaggtttctccaagttcaatacgatgggtcttcttatcaccactgtcgtcgagtcattgcctctaagggaatggcttcccaatgcctatggaattaaaagtttaaacttcacagatcaggagattcaacttggttccacctaacatgctccaggaaaaactgcagactcactgtctcctaaataagccatactgtttctttattcaacaagaaacctttcttgagcatctactgtgtgtaaaacattggagtgtataaacttgaatgaaacatgactccaatggggtcgtcatgtagaacacagagaagaagcagaggacatattgtaagggagctggggaaggcttcctggaggaagtgactctgagctgaggttgataaagcctcaggagtgtacttctggtgcacaccacagggcagtccaagcacatgaatcttcattctcccctctgcttgaccagccagacttgatcaatgacaatgatgacaatggcaacagccacaatcatttgttgaatgcaagtgatgagccaggcactgtactaaacccttgcactgtttcacttaatcataagaatgacaatgtataatgtaggtataattatcccactttatggatgtggaaactaaagcacaaggtgacagtaacttgcccaaggtcacagtgctggaaaacgtaaagtctctactgtttctgcttcgttcttctcttcctctggtaaaaacatccctctgcccagagagaaatgcccttccccaagagtggccacagaggccaatggtcacagtgacaacacagggtgagccgaactcagagcacaaagacatggcagaactgactggagtcctttctggaggacacataaaggtttaactgtagggtgcagccatcaatcccattgtggagaagcatctagcaaaaggggaggaggagggctacataaaaagagagccatctccagcatagagaaagatccacaatttaacaaaaagaagtcaaacaactcaaaatggggtcatctgaacacacacatcacaaaggaagacaggcaaatacaataagcacttgaaaaagtgactaaggtcattagtcatctgggaaatgaaaattcaaatcacaatcacaatgacatgtccctatattagaatacggctttttaaaaaatccaaacaactgaagataccaagaactttacagcacaaagactgaatcttaatgtacgtgaatttttaaataatttaggaggctgaggtatataaaaagaaggacatttcatctctgtagtcctccttctgaaaaccaaagtccacagtgaaattcttaaccaaagtccaaagtatattcaggttttctaagtttttgcctaatgtcctttttcttttccaggatcccatccaggaaaccacgttacgtttagctgtagtgtctgaggcttcttgtagcttgtgacagtttctcagacttcccttgcttttgatgatcttggcagcttcaaggggtactggtcaggcattttgtagggtgttcctcaactaggatttgtctgatgttttacttctaattatactgcggttatgggtttgggagaggaagatcagyggtaaaatgtcctcctcctcctcacatatcaagggcacaatcaatcaatgtgatttatcactgctgctttaaccccaatcacttactgtaggaggtgtctgtcaggcttcttcactgtaaagttactttttcccacagtcacactgtcctctttggaagaaagtcatcatgcatagtccacactttaggatacattacttagaatttttttgcccaggagatttgtctattgtcatccattcatttatttatatttattcaagcatatggactcaggaatggactcacagagaattattttatattttgggtcttaattcaataccagtttattttgttgcaaaaattgctctaggccaggcatggtggctcacgcctgtaatcccagcactttgggaggccgaggcggatggatcaatcacaagatcaggagatcaagaccatcctggccaacatggtgaaaccccgtctctactaaaatacaaaaaattagccaggcgtggtggtgcgtgcctgtagtcccagctactcgggaggctgaggcaggggaatcacttgaacccgggaggcggaggttccagtgagctgagatcgcgccactgcactccagcctagcgaaagcaagactccgtcttgaaaaaaaaaaaaaaaaagaaaagaaaaaggaaaaaaaaaaagaaaaaaaaattgctctagcactgaccactggggagctctttcgattgcccccctatgtctctttgacatacactatatttactttaaactttgaaaaatctttgtcttctctttccaaacagtataggatctcctcaaggacagtgagcctctatctgtcccccacatcatcccacaccacgcgtatgcaataaacgagtgctgaactcagcagtgagtcgagtagggaaggaagttttggctccttcgtataggcagcagatgcctgcaatgtactgtctactgcccgagtctcctattttcccttttttaaaatttatttattttttatttttttagagacaaggtctcactctattgccccagctggactgcaatggtgtgatcatggctcactgcagccttaaactcctgggctcaagcgatcctcctgcctcagtactgggattacaggtatgcaccactgcacccggccctattgtccctttggaaaccatcctctctcattcccagcaaggtgctgacaacaacaatgaaatacctgcctttagccatagggcttgggaaggggacaggcaggtaaccctattcatagccaactgggctcccttttatcctccactggattggatgatgcaaaaacatggggctgaagctgctagggccactgttgggaagaccaaaagtgaagctgacccagagaggacaaagtcaagagatggactccttttgaggctcaaactatatcgtgcttaagtcagccctgcacctggctgagttatatgaaccaaaaattccctttcacttactctgatttgggttgaatttcctgttcttcataactaaaacagtccttaccacccacttcagtatcgctggcctgtatctttatcaaggacagtcaatggaggtgagataactgaccactgagctgtgtgacaccaggtgactgccctgggcccatctccttctcaatcctgcaggggatgagcgctccaatcagagagagaggaaatggacaatgctcctgattcccgagccctctagttattctgcaccaacactttctatcatcatcccatcattcaaagagctcacaaacacatcacaccccttacggcctcatcattaaacatctattccacaccaatgggccaaatgaactctcctagtcaggaaacacaaatattcccttatgtgctaacattgcattaaaaggttaatgaagtccggacacaatggctcacgcctgtaatcccagcactttgggaggctgaggcaggtggatcacctgaggtcaggagtttgagaccagcctggccaacatggtgaaaccccacccctactaaaaatacaaaaattagccgggtgtggtggcaacatgcctgtagtcccaggtactcaggaggctgaggcaggagaatcgctttcaacccaggagacagaggttgcaatgagctgagatcacgccactgtactccaccctgggcaacagagtgagactccatctcaaaacaataaaaaaaaaatggttaatgaaggtaaaaggtttaagcaagaaggtcccacaatgagccagtgagccaatggccaacctgggacataaagccacaaaactggtttcaccacaaaactggtttcagccagcatcagaccatgcatcctttgaccttcataggcagagcctcatgaagccagggtggtgcactccccactgacaccatgtatagttgtgccacagacctatcttgccagatatgcctctatttcagccgcagagtcaagttcataacaagttacctgactactacgttaaccaaaaaggaaatgggaatatgctatgactgtcagagagaagggggaggagagctctgttcgctgagctttggttttcctcaacaacagattcagcaagtccagcacgaatccagggaccacagaacaacacagaagaaagggcactttgtccacacctgacaggcaaaaggtacacagatgagctagtcaagcttcaatgagctccaaataatgagtgcggtgtgatggtgagttaggtcccttgactgagcccctcaactgaagaccttttttctcatttatatcagtgttcggcccagagacagtcaactgaaaacagtacagtccagaaggaggagtgggctggggtcaggagacctagagttccaaactaaataactggccaggtgcggtggctcacgcctgtaatcccagcactttgggaggccaaggcgggtagatcacccaaggtcaggagttcgagaccagcttggccaacatagtgaaactccatctctaataaaaatacaaaattagttgggcgtggtggcgcacacctacagtcccagctaatcgggaggctgaggcaggagaatcacttgaacccgggaggcggaggttgcagtgagccgagattgtgccattgcactccagcctggacaacaggagcaaaactccatctcaaaaaaaaatgtataaactaagtatctatatggtacactgataaagctgttaaagtacatgaattcacaaatcagaagctgaccaacctcaatctcactggcagacccctgcctcagccagtctccacccaacgctctgtgctggcctcaggaacatgacgagtacccacccactcaggctgctcagtaggctctccttgtttgcggtcagagtccacaggtgggggcgagtaatccttcacaggggtggtgaattccacaggtcctgttcctggcaaggggagtttcagcagtgggtagctgggatgtacaaaaaggagataagaattagacactatgagaggcagtcctctctcagcactgacacaggagccactggagttaataactaaattctgtcaggactgtacaaatgtgcaaaatattagaatcacaaaattgcaaagctgaaactcagaagtcatctagattagaatttttcaaacttattttagtcacataaaccttacgaagaagcccaactggtaaaatagactgttctgttaaatgttttcaggctgtataagctaagtatgtataaatatacttagttataacattatatataacattaacatatataatataaacatacacacacacacacacacacacacacacacacacacacacacacacacagatagataggygcctgccactacatccaggtaatttttgtatttttagtggagacggggtttcatcatgttgaccaggctggtcttaaaactcctgacctcaggtgatccacccacctcagcctcccaaagtgctgagattacaggcgtaagcaaccgtgcctggctagtttatacatttaatgagtaacttttactgaaaggaaacaccaacatgttataatatataacattatattaatattttcaggctgggcgcagtgggttatgcctgtaaccccagcactttgggaggcccaggctggagggctgcttgagcccagaagtttgagaccagcctggacaacatagtgagacctcatctctacagaaaatcaaaaaaattagccaggcatggccatgtgaacctgtggtcccagctactcaggaggcttaggtgggaggactgcttaagcctagaggtagaggctgcagtgagccatgattataccactgcactccagcctgggcaacataagacccctgtctctgaaagaaaaaagttttcagagacttaataaaagcaagatgctaaaaacaaacaaaaaaaaatcaccttgccaaattagatataagggaacaataaaaaacaaaagtgggggtacctttaaaaatccagaaggattccaattcagatagctaagcaactattccacttaaagggacagaccatgaaaattatgtataattaactaaggatgtggtttatactaggatcatgaggaaagttaagttaatggacccgatatacgcaaggaaaagccctgacctttcatcaaaaagttggcaaataagctgggtgcggtggctcaagcctgtaatcccaacactttgggagaggccaagcgggcggatcatttgagctcaggagtttgagaccagactgagcaacacagtgaaaccccatctctaccaaaaatacaaaaaattagctgggcatggtggtgtgcacctgtggtcccagctactggctgaggcaggaggatcatctaaccctgggaggtagaggctgcagtgagctgagatcatgccactgtactccagcctaggcaacacagtgagaccccatctcaagtgaaaaaaaaagaaaaaaaagaaaaagttggcaaatagatgtacattttgtttcagatctcactttcttaaaatttagaaataacttctatatagtacaatgcacagatcttaagtataaagtgcagtaagtttttacatgtgtatatctgtgtaactactatctagatcaagctatagaatatttccagagcctcagaaggcagccttgtgcccactcccagtcaacagcataccactccccaccaccaaaggtaactgttagaatctctatcaccataaattagttttacctatttttgaatgtcatataaatgaaaccattcattctacttatatactcttttgtgactggctgctttcactcaaattctatctgctagattctccacactggcgcacatagcagatcattgctttttggatacatactagtccactaatgaataaagtatagtgcatttgtgtattccactggttgaggaacatttggctgtttctggtttgagctattaagaataaagttgggccaggcacagtggctcacgcctgtaatcccagcactttgggaggctgaggcaggtggatcacctgagatcgggagatcgagaccagcctgaccaacagggagaaaccctgtctctactaaaaattcaaaattagccgggcgtggtggcgtatgcctgtaatcccagctactcagaaggctraggcaggaaaatcacttgaaccggtgagctgagatggcgccactgcactctagcctgggcaacaagagtgaaactcaatctcaaaaaaaaaaaaaaaaaaaaaaaaggagaataaagttggccaggtgaggtggctcatgcctgtaatcccagcactttgggaggccaaggcagaaggatttcttgagcccaggagtttgagaccagcctgggcaacatggtgaaacgccatccctaaaaaaaaaaaaatacaaaagttagccaggcatgctggtgcacacctgtagtcccagctcgggaggcttaagtgggaggatcgcttgagccgggaggctgaggctgcaataagccatgatcatgccactgcattccagcctaggtgacagagtgagacccccgtctcaaaaaaacaaaacattttgggctggataattgtttttaattaaaaaaaagaaaaaaaaagaataaaactattatcctttattggtttttggtggcctcataagcacttatttctgtcgggtatattcctaggatgaaatggctgggtatggagttatatgcacattgagcttagtagatgataccaaacagttttccatagcggttgtacaaatttatgttcccactatcaccagtgtaataggagttccagtttctccaaatccttgtcacctcttgatactgtcagtccaattaatgttaaccatttagaggaagagacagtggtatctcagcatggttttaatgtacattttcctgataagaaacaattaaaaaaattatttcatttacttactactggccacttggatatagcaacttttgtgaaacgcctcttcaagtcttttgacaataccatgttttgaatattttaaatacatttattatgttaattacagaaaacaattacacaatctccttaccttcacaaaaatcaatttttacttttctctggcttttccatctttacctacactcaaaaaccatttattaagtatgtattatatgctgggaactgagaatacaaaagataatactacggtctgcctccaagatgctctaagtaggaagagagaaacgactacaagagaatgtgatcagaattcatttagggctgctctgcctatggagcagccattctttattcctttacttttctaataaacttgctttcacttaaaaaaaagttaatttaggctgggcacggtggctcacgcctgtaatcccagcactttgggaggccgaggtgggtgggtcacgtgaggtcaggagttcaagaccagcctggccaacatggtgaaaccccgtctttactaaaaaaacaaaaattggccggaygcggtggcacacgcctgtaatcctagctactcgggcagctgaggcaggagaatcgcttgaacccgggaggtggaggttgcagtgagccaagatcatgccatgccagtgcactctagcctgggcaacagagggagaccctgtctcaaaaaaaaaaaaaaaattttaggctgtggctacagcgtttgcatagtaatcacagagtatagtcagtttttgttctatgtttagactatacatgtttttggattctgcttgtgctttctggctgtgaaggtagaagactaggaagacagtgaataataacaatgaaaaactcatacatgatatttaatatgtgccaggcactattctaagcacttsayatgtacagatacatcttgacttacgatggggttatgtcctgataacgctgtcgtaaattgaaaatatcctaagtcaaaaatgcatgactaggctgagcaaggtggcttatgcctataatcccaggactttgggaggctgaagtgggcaggttacttgaggtcaggagtttgacaccagtctggccaacatggtgaaaccccgtctctactaaaaatacaaaaaatagccggacgtggtggctcacacctgtaatcccagctactcgggaggctgaggcaagagaatcacttgaacctgggaggcagaggttgcagtaagccatgattgtgccattgcactccagcctgggcgacagagtgagaccccgtctcaaaatcaaaaacaacacaatgtgattccaatttcctctccaaattaaaatccacctctcaccatgagcagcagcttgttgaatcaaatgtctcaatgattcacatcactctctgacctgcacatagggcagtccaactaacatggcatctgggtgctctttttatcccatggcgcacccactgcttaccagggcaggttcagattaacagtaccctctgtcttgctgggctgctgctgggacatatcctgggcccagtggtctaacctccaagagttataaacagacacctcttgccataatgcctatttgctacacatttcatcagattttcccagaggaaagaacagtcactgcacccaggggccaggcaggaagaacagctaactctagctcacctgcaaggctcagcactgggttcatttgaagtagtgtccttggctctcagtcactgaaacctgcagcctcaacagcagctcagagaagaaagtcacacatcctcagtgctgtttggggtgagcctgatgcatatacagatgccctctctcactccctggattcttctgcctgatggagacaggcacattcccaagctgtcattgatcaccatccccccagtactgctctgtactttccctggggtgacccagtggtggtgagccagtggtgtgcaaaaagtatttctgcagctcaggtggctgttagatctgaatagggaaattaagtgcagcagtcctttgggtttggctgtacaagtctttcatcccaggaacaataaaaggtaagcaattaaatggaaactgaatgtctagcaaaactactagaagcagtctatatccatactttattttctgcaggcaatcccaggctctggaagaagggggcactgctctgctgctctggacagaaaagcttcagtgggttgaagacaatggtgaggcttgtgtccctgggtccatgatctctggttttctggccaagtcccagaatctatggattctcttatacaaccttttattagtctttggaggctgagagacttcacccagccttggaaaaattttctcaagtcaatcaggttttaagaaaaaaacaaaattaaaaaaaaaactttaagatcacatgacaaagatactcatttgggaaaataagtacacagcactaagaatgtgacagtacaaggccaggtttggtggctcacacctgtaatcccgacactttgggaagccaaggcgaggggatcacgagctcaggagtttgagaccagcctgggcaacatggcgaaaccccagctctactaaaaatacaaaaaattagtggtgcacgcctatagtcccaactactcagagggctgaggtaggagaatcacttgagcccatgaagtcgagactgcaattagcagtgattgcaccactgcactccagcctgagcaacggaagcgagaccctgtctcaaggaagaaaaaaaagaatgggataatacagaagggtctttcctcctcttttttttttttgagatggagtctcactctttcgccaggctagagtgcagtggcgcgatctcagctcactgcaatctccgtctcccgggttcaagtgattctcctgcctcagcctcccgagtggcggggactacaggtgcaggccaccacacctagctaatttttgcatttttagtagagacgaggtttcaccatgttggccaggatggtctcgatcgcctgacctcgtgatctgcccgcctcggcctcccaaagtgctgggattacagccgtgagccaccacgcccggccaggtctttcctcttaaaagaaaaacagggtgactacaaaagaggaaaccatagtaccatcagagagtaaaaccaaaggagggcaacataatgagaccccatctctacaaaagacgaaaaacagccaagtgtggtggcgcacacctgtggttgtggcttcttaggaggctgagatgggagggtcgcttgagcctaggaggttgaggctgaggtgagctgtgattgtgccactacattccagcctggctgacagagtgagaccatgtctcaaaaaacttattttaaagaagaaaaaagaaaggtcaattaacttaaaggaaaaaaaaacccaagagctgagttcttagagcactccaaattcatcacttatgggacacagctataagtattttatcttgtacaacacaatttagcagtttaaacaccaatacaaacatactgagccagagtgaaaccaggtgacagtaacacaggtgcaggcgggcaccagagtccctatggcttggatttgaatttgaaccccagtttccctaattattagttatgtggaccagacaaatctctaagtccctacccctctttgttaaatggaaacataactggaccacttcctaatgttatacctgaagcatcaacacagcacccagcaagaaactctcagtgatgttcatctttcttttttttttttttttttttttttggtcttgctatgttgcccaggctgatcctgaactcctggcctcaagtgattctctcacctcagcctcccagtgttggaattacaggtatgagcactgcacctggccaaagttcatctttcttactgataatcagggaagagcttgagatcattagcaactgaactgaacagggagttccctcctgacttctcatcctcccttcagcatagcactgaaaacatctataaatgttttagmcaatgaatctgaagaacagaattctttccagagaaaagaataagatgggctcttttcacagctgtcagcattttagagttaaaagggtcatcagatgtcatctcatatcaaactcctcctttacgacgtcattgtcagccatagccttcaggcttctatgaggccttgagaaagacagacaggaacaagggcagctacagctctcacaactgtccttggcaagtgcagctggccacaagaatcaacaagaagtctgaagcaagctccatgtgaacacaagaaaatgactagagagcaaagaagcaagtctctgaggttagcctgccacaggttgtccaagatactgttctaatggactttgcctcgcaacacacaaaaaaggctcttgcacttaaccaggtactaaaacgaaaccactactattgagaaagaaaactgaagtatcatatctttcaattatttcagtgtcttagaagtatctaaacattattttgagatasagtaccagtgatatgaataaatctggtgaatcagtaggtcagggccagccaggactattttattatattagctaaccaggccaggactagagttctccactcacagttataaggagcccaagctcccattgtgtaaaaagcatacagaggccaagggctccatagtggttagggttagaaaacctactgtcytaagacactggcccaccatatccaaggcaacccaaaaacataccagcaggctaagatgcagaaccctgtgaagaggatgatggggatgggataggatgcacagaggagcccatggttgtagaaggcccgagatatcttctcacgcagcctttcagtcagggtcatcctcagccgaagtcaccttgctgccatcccggaaagtgaccatggatcaccctggcacacacttgacagcactgacaaagaacaacatgtgcaggtacctggtaagaagggagaaaagccagttaacaaagagtacttggctctgcacactagggctgctggagggaggcgatagttatgtggctggggaatggtttcagaatgcctatatgcaaggtctagtgacctcaatcccaaaatacacacacacacacacacacacacacacacacacacwcactctctctctctctctctctctctctctctytctccctccccgcccaactccctccctcctatattaggcaatgctaaaaggccactccccaaagggcatttttctcatgtgtggcacacgaaaccatgcctgtgtaacagacgtcaccttcagctgctctctgtcaaacaggcattcttcccccccctcctctatgcacaaatcccactgagaaaagtcctttacatagggatacagagaaaccctttacatagggatggcctcctcaaaacacactgttgtacaaatagtgattcactcgtgaagaaggtctagcgaggtcagccctcaacataaaaacgctaaaaagcttaggtctctgacataatggtcaccaagcaaaattcactctggtagaactctctgctcttggtcctatagttgttcctgggagtgcaaaggcagagagcagctcctgttcctgcctgcccagtacccgtccccttccataagttaacagcagcctggtatggctcaggggaaccacctcgctccacaggatttaacctggattaactatgagtcaaggtgccccgtgccgacccaagctacacaaattgggcctctctccctggactttgacttctaaacacaaacaaacaggaacttggatattcatgatgtttattcatcccacagaggttcctgctcccaagatccccaggctgttctggctcccatcctttctgaggactggctcatcaacttttttttccgttttgtaagctattctatacccttctaataaattatctttttgcttatgttggccaaagttaatttctggtgctttcaaacaaataacattaaaccaataaaatcagaatagaaaactctaggaggcccagggatctagaattatcttccctactgagccctctgatggaatccaagtttaaacctacttctcttgttccatgttgctgttttcttcggtctgtgctagagggaacctgcccagacacatttcttggcttgactgtactcactgatgaaaacccagactcaaagatgactcctcataagtgtcaagatcagaaacaagaagcaaaaggagtcacaccacagccaactcaaaagccaaaaggaatgcctattgctcgttctacctttccgaaagcagaagcgttaagcgcacatgcaagtttccaatccaggaaccctttattttttttgacatagaatctcactctatcgaccaggctggagtgcagtgggcactctcttggctcactgcaacctctgcctcccaggttcaagtgattctcccacctagttttccaagtagctgggattacaggtgtgcaccaccatgccctgctaatttttgtatttttttgtagagacaggttctcattatgttttccaggctggtctcaaactcctgggctcaaatgatccagctgcctcagcctctcaaagtgctgggattacaggcacgaaccaccacacccggccagtacttcattacttttttttttttgagatggggttgcccaggctggagtgcagtggcacaatcttggctcaatgaaatctccgtctcctgggtttaagctattctcctgactcagcctcccaagtagctgggattacaggtgcccgccaccacacctggctaatttttgtatttttgatagagaccaagtttcaccatgttggccaggctggtctcaaactcctgacctcaagtgatccgccagcctcagcctcccaaagtgctgggattacaggcatgaggcaccgagcccagccacttcattactttttatggctgaatatttcatcaaatgggtatgccacattttgtttgtccattcatcagytgataaacatttgggcagtttctatgttttgcctattgtgaatagtgctgtgatgaacattctaacattcctgtatttgtttgaatacctgttttcaattcttttttttttttttttttttgagataaagttttgctcttgttgcccaggctggagtgctgtggcacaatctccactcaatgcaacctctgcctcccagattcaagcgattctcttgcctcagcttcctgagtagctgggattacaagtgcccgccactacgcccagctattttttcgtatttttagtagaaatgggatttcatcatgttggccaggctgctctcgaactcctaaccaggtgatccaccgcctcggcctcccaaagtgctgggattacaggcatgagccaccacgccaggccacattattcttgtttacttggtctcgaactccaacttttttttttgaaacggaatcttgctttgtcgcccaggctggagtgcagcagcgcgatctcagctcactgtaaactccgccttccggtggttcaaacaattcgtgcctcagcctcccttgtagctgggagcacaggtgcacaccaccacacttggctaatttttgtatttttagtagagatggggtttcaccatgttggccagactggtctagaactcctgaccttagatgatttgccagcctggcctcccaaagtgctgggattacaggtgtgagccaccacaccctgtctcaattttttttttttttttttttgagacagagtcttgctctgtcaccaggctggagtgcggtggtgcgatctcagctcactgcaacctccacctcctgggttcaagcaattaacctgtctcagcctcctgagtagctggaattacagatgcgcgccaccacgcccagctaatttttgcattcttagaagagatggggtttcaccatcttggccaggatggtctcaatctcttgacctcgtgatctgaccgcctcagcctcccaaagtgctgagattacaggcatggccactgcacctggccaacctttttttttttttttgagatggagtctcgctctgtcgcccaggctggagtgcagtggcacagtctcagcttactgcaacctccacctcctgggttcaagtgattctcctgcctcagcctaccaagtagctgggactacaggcactcaccaccacacccggctaattttttatttttagtagagacgaagtttcactatgttggccaggcttgtcttgaactactgacctcatgatctgccctccttcgcctcccaaagggctgggattacaggcgtgagccaccgtgcctggcccccctcaattcttatgtttactttttttgttgttgttgttcttcagttggggtttttgtattttttttctttttgttttcttttgagtatattcattcttaggagtggaattgcttggtcataaggtaattttccccaatgtcttctcctaaaaatttgtagtttcacatttgtttaagtctgtaatccagctgggtgcagtgactcatgcctgtaatcccaacactttgggaggctgaggtgggaaatcacttgaaaccaggagtttgagaccagcctggacactgtgagaccgtgtctttacaaaaaaaaaaacattaacaattagcagggcagggtggcacatgcctgtagtcctagctacttgggaggctgaagtgggaggatcacttgagccaaagagtttgaggctgcaatgagctatgaccacaccattgcactctagcctgggcaacagagcgagactgtgtcaaaaaataaaaataaaaatctgtgatccatttgagttaatttttagataaggtgtgagatataaattcctttttttcccctttggtctaaagatagccaattgttccagcaccatttggtgaaaagactatccttcctccattgaattgcttggcatctytgtcaaaaagcagttgtctggaccaggcacagtggctcacgcctatagtcccagcactttgggagaccgaggtgggcggatcgcttgaggccaggagtgtgagacctggctaacacagtgaaaccccttctctactaaaaacagaaaaaattagctgggtgtggtggcacacacttgtaatcccagctacttggtacgctgagaatcacctgaacccagaaagcagaggttgagcaagccaagatcacgccactgcactccagcctaggtgacagactgtgactccgtctcaaaaaaggagaaaaaggccaggcgcggtggctcacgcctgtaatcctagaacttggtgaggcaaaggtgggcggattacaaggtcagaagttcaagaccagcctagccaatatggtgaaacctcttctctactaaaaataccaaaattggctgggtgtggtggcgagtgcctgtaataccagctacttgggaggcggagacaggagaattgcttaaacccgggaggcggaggccacagtgagccaaagactgtgccattgcactccagcctgggcaatacagcgagactctgactcaaaaaaaaaaagaaaagaaaagaaaaaagaaaaaaaggccaggtgtggtggttcatgcctgtaatcccagcactttgggaggccagggcaggcagatctcctgaggtcaggagttcaagaccagcctggccaacacagtgaaaccccgtctctatgaaaaatacaaaatagccgggcatggtggcgtgtgcctgtaatcccagctattctggaggctgaggcaggagaatcgcttgaacccaggaggcagaggttgcagtaagctgagatagtgccactgcactccagcctgggcaagagggagactccgtctcaaaaaaaaaaaaaaaaaaaaaaaaaaaaaccttgatagaattttgatagaaactgcattaaacctgtttatcaaatttgcaaagaactggcatgttgagtcttccaatccatgaacatggtatatttttccatctacttagatctttgatttctttcatcagcattgtatagttttcagcatacatgactgtacatgttttgttagatttatacctaccatttcactttttagcaactatgttttcaattttgattttcacatgttcattgctagtacattgatttttttatgttaatcttttatcctgcaactgtcctgaaatcayttattagtgccagagtctttctgcatgtgtgtgtgtgtgtggattctttggaaatttctacgtasacttatcatgttatctgtgaacagaaacatatttattcctttccataatttcttcaaatttttttctgcaccactctttctcctctctttttgagacttcaaaaacataaaagataaactttctgttattgtcccatgggtccctgaagctctgttcatttttttttttcattttatttcgatctctgttggtcagactggataatttctattattctaccttcatgttcactgactcttctgtcttctccattctgctattgagcccacccaattaatttttcatttaggttgtcatattttgcagtaaataaatttctgattttctgttcatttcaagagcattcacccttacttgttatagcaaggttttaattaatactttaattatactttggcttttaattttttgataatttcaacatctgtgtcatgttgtggttgccatctgttggctgtcttttccccttatgattttcctgatttttcatagctgaagtaattctgaattactggacattttgaatattatgctatgtgactctagctcttgtttaagtcccacgtaaaattttgaatttgtctttgcagcaatcaacctaattagrtccagtccacaagttcctacccaccttctgtgggctgtggtaccaatatgatatcagttttcaaagccttttaagtattattttgatttttcccaagcataccgtccaggggccagtgcagaactacttgagcagtaatgtactccacagtttggtcctcaaagcctttggtatgctgtttagggtcagatgcacgtatgttagttctgaggaacagcccaagagttcatatgcaactttatgagttcaatttgttgagctccttcctctacacaatcttcctaacactttccagatcccaagggcccctttcctggtcttctggctaaaagtcaggggtttaatttccctaacctgctgagtacctcccacaactgtgactacctccaaggaaaagcaatgagagaaaggaaagaacaaaatcaaggattccctccatgctcctgggaccacagtccctttaaatagaagacttcctctcctatccatttgccaatgtcactgctgtctccaccactacacaattacgtggagggccagagcaagagaaaaggagaaaagacaaagcaaacaacacacgagatttcttcctccatccccattcctgacccatgaggatcccctttcctgctcctcaaactagaaagatggcttctgttagacctctttctgtgcacatccagcacacatttccaggtttggggctgactttaagtgcaggctggaaaatattgtatggaggaaaaaaaattatgggaaactcactaccagttcactggtatttggagttctggtttccttctccaattcgcatgctaacatttatctttctggggttactccactgatccatgcattctgtccagggatttcagttgctctcttcagacataaagggtggagtatgtttactccatctttatcacatcagaactcttaaatttttttaatgtgataatcttcctacatttcaggattctttgccttcaaagaaacttttttttctttttttgagatggagtcttgctctgtcacccaggctggagtgcagtggcgtgatctcggctcaccgcaacctccgcctcctgggctcaagcaattcttgtgcctcagcctcccaagtagctggagttacaggcgtgcgccaccccacccagctaatttttatatttttggtagaaacggggtttcaccatgttggccaggctggtctccaattcctgacctcaatgaatctgcctgcctcagcctcccaaagtgctgggattacaggtgtgagccactgctcctggccctaaggaaacttttcacactacgcctactggcatttttctgtcaatcacatcatttcattgtgagaagcatgtagtaaagttttctacaaaaagcacacattacttttacaatttgaaaaaataaaaattatatacaaaaagtgcacaaaaggagaatagagggaaacgttagtagtggttgcttgtctttgtgtaatgtgattatatgcagggtttttttttttttttccttgagacagagtctcactctgtcacccaggctggaatgcagtggcaggatcacagctcactgcagcctcaatctcccaggctcaggtgatcctcccactttagcctgcctataggcacgtaccaccatgagagataatttttggtaattttagtagagacagggttttgccacgttgcccaggctggtctcaaactcctgggctcaagcaatcctcctgcctcaatttcccaaactgattataggtgtgagccaccacacccagcagagaaatttttaaactcaaatctcagtatctttacatttttcactataagcatttatttatttttctttttttagagatggggtctcactctgtcacccaggctggggtacagtggcactatcatgtcttactgtagccttgaattcctggacgcagtcctcccagctcagcttcccgtgtagctaggattacaggcatgtgccaccatggccagctaattaaaaaaaaaaaatgttgtggggagacagggtctcaatatgttgcccaggttggtcttgaactcctggtttcaagcaatcctcctgcctcagcctcccaaagtgttgggattacagacatgagccaccgtgcaagactattttaaataaacttttgaagtttagtataacatatcacagaaaagcatacaaattataagcacacagctccatgaattaccaccaagtaaacaaagccatgtaacctaaacaccattccatcaagaaacagaacattaccccaaaggtcccctttatgagccccaatgctgactatttttcaattataaaagtaaaaatatacatgtttatattcaaatattcaaacagtcctggaatgcctttttttttttttttttttttgagacagggtctcactctgtcacccaggctggagtgcagtggcacgatcatggctcactgcagcctccacctcccaggctcaatcaattctcccacttcagcctcccaagtagctaggactataggcgtgcaccaccacacccaacgaaatgtttgtatttttaatagagatggggttttaccatgttgcccaggctggtcttaaactcttagactccagcaatcctcctgcctcagcctcccaaagagttgggattacaggctgagccacccaccatgcctggccctcatagaccccttcctacctatccctttacaattcactttatctcagaggtcagagtggacacagattctactaatgctgtgagctggatacccttctgcacttagaacaaagcccaaatgcctccccctagctctcagggctctgcacaacccaccccggtcctctgcaacttcacttcgtgtcacctctccctgttctggtttcttccaatgccttatgtgtgccaacctcattcmcatctcaggggcctggcacatactgttccatcctctattccctcttcyctttataggctggttccttttcattcttcaagtctcagctgaaatatcacttctacaaaaagacctcccttgaccatatattttccagtagttctctttattgttccttacagagcctatttcttctttttcagtgcatttaaaactctgtaattgtacaaatgacttattccctggtttactatctgtcctctgtcaagactataaataaactccctgtctgttcttcagggtctttaatagcacttggcatgttaaatttttattaaatgcacctataatcccggctactcaggagactgaggtgggacaatcccttgagcccaggagtttgatgccagcctgggcaacacagtgagaccctgtctctgaaaacaaaccacttgttgaataagtgatgaacaaaccaaccaacccaaccaggatcagatattattaggacagtgctcagtacatatcttctcaacttctaactgtgatacaaagcacctcaggcattctggaagaaagagagctaataatcccctctctctgaatgaaatcataaacaaggaacacttcatccatcctgttcttcacaaatgtcccaatctaaatccttgttagaaatgcaaattattgggcctatcccagacctggtgaatcagaaaatctggcggtgaggcccagaaatctctayttaacacaccctccagctgacagtgatatgctcaaatttgagaaacactgccctaccaaacctggagcccaagagttgcctaagtcaactctatggtgcccacatcttgaacatatgtctaaactggacgagcagggcaggcatcrtagctaactaatgtctgtaatcccagcagtttgggacactgaggcaggaagactgcttgaggccaggaaagttcaasaccagcctgggcaacatacagagatcctgtctctacaaaaaaaaaaaaatttaaattagccaattgtggtggctcatgactgtagtcctggctacttggaagcctgagtgggaaggactgcttgagcccaggaggtcaaggctacagtaagctgtgattccgccactgcactctagcctgggcagaagagcaaggcctatctcaaaaaataaaaaatgaactggactagtgatagatatccaaaaccaccagcctgaaaaattctaatagtctcctacctgattttgctacctgcatttgcacttcacttctggtttgtcttcccacatggtcagcatggacagcttcctaaaataaagacctgcttatggccaggcacagtggctcacacctgtaatcccggcactttgggaggctgagatgggaggattgcttgagcccagaagttcgagaccagtctgggcaacatagtgagaccccatctctttaaaaaaaatttttaatggaaaaaaaaaaagacctgcttatgtcaccccttgcacaaaagttctgaatggctctccagtgcctgcatatctgaggccatacttctttgcttattatacaggtacactcaaaatatactgaaacctctttccagctttattctcttgtcaaataaaaataactagtatttataaaccatgtgtcagcctctggcctaagacttttgcctacattatctcctgaatccttgtaacaacccttaaactaataactacttttactatttcagttccacaaaggaagaatctgaagtccagaggtgtaatacgcccccatgttacccatctagaaggccctcatgaatatcacagtaatgttgggatgctggcattcttccccaaaataacctacattcccactttccacacctttgcagtcaaggctctctctttactgaatgcccttttcctatcttcccactctaatttcccacctctaattttctccattcagccttcaggcactagataaaatgctatttcctccataagccttctctaaacatcatcctattcattttgtaccagaaacatgtaagtactaatgttaaaacaatgttatgttcaacatattaacagagatcatctctgccaatgctgaagacatctgataaaattcaaccctcatccttttaagataagaatagacaggccgggtgcggtggctcatgcctgtaatcccagcactttgggtggccgaggcgggcggatcacaaggtcaggagattgagaccatcctggctaacacagtgaaaccctgtctctactaaaaatacaaaaaattagccgggcgaggtggcgggcacctgtagtcccagctactcgggaggctgaggcaggagaatggtgtgaaccccgggggacggagcctgcagtgagcagagatcacgccactgcactcccatctgggcgaaagagtgagactccgtcacaaaaaaaaaagaatagacagatgcttagtagatatgtgtacgttgatttacatacatacataaatacatacatattaggccaggcacggtggctcacacctgtaatcctagcactttgggagaccaaggctggtggatcgtttgaggtcaggagttcgagaccagcctggccaacaaggtgaaacccccgtctccactaaaaaatacaaaaattagtcaggcatggtggcgggcacctgtaatcccaactatttgggtggctgaggcaggagaatcgcttgaacgcaggagaatcgcttgaacccaggaggcagaagttacagtgagccaagattgtgccactgcactccagcccagatgacagagactctgtctcaaaaaataataataaaaaaaatacacatatatatataaaaaataaatacagacttcaactaaatgtttacatctttctcaatctcaaagctaaaatcaagcccaatgggaacacactagaagtgttctcactaacgtcaggggccatacaggctatgcatttaaccatcattatttattactattgtggaactactagttatcacaatcagtcaagacaaagaaaacataggtatacaactggaaaggaaaaagttaaattatcattatttgcaaatgatattatgtacaaaatccaaatatatatacaaaaaaattacatatatatatatatatatatatatatatatataatcaactgaaaaccttttacagttgataaaagaatcaccataaggtagtgaaaactaatatatatcaatgccttcacatacatcaacaacaagcaggcagaagtaaaataatgataatattgattataataatgattcattaacactaaaataaataacaaaaccaaaaacttgaaaataaacttaaaaagaaatgtaagaaatctctgaaactcccagcaggacacagtggctcacgcctgtaatctcagcaacttgggaggccgaggtgggcagatcacctgaagtcaggagttaaagaccagcctagccaacatggtgaaaccccgtctctactaaaaatacaaaaattagctgggcattgtggcacgttcctgtaatcctagctactcaggaaactgaggcaggagaatcacttgaacctgggaggtggaggttgcagtgagccgggattgcaccactgcactccagcctgggtgacagagcaagactccmcctcaaaaaaaaaaaaaaaaaaaaaagaaaccaaaagaaatctctgaaactccgaaagacagaaaagatgacttcaacaaaaagaaaaacatgccacattcttaatgaggaaaagtcaatataacgtaaccaaagtgtcactcttcctacattcatctagaaatgtaacagtcccaataaaaacaggacttctttaactaaacaaacttcaagtttatacagaaaaacaaatataaccaagaaagttctggaaaataaagatgatgaaagggaactaacttcaccaaataacaaaacatgctagagtaattaaaacagtgtggtcctaacacataaatacacagattaatgtaacagaacagaatgtccaggaatagaccaaaatgtacacatatggcaaagtatactatatacagtaaatgataaacaagtaggagaaagattaattgcgcaacaaaaggtgttgcaacaaatgggtagccacggaaaaaaattaagctggatctaacacttcacatcaaaataaattccaaaaagcacagtggctcaggcctacaatcccagcactttgggaagtcaaggcagacagatcacttgaacccaggagttcaagaccagcctgggcaacatggcaaaacccttctctaccaaaagtacaaaaattagctgggcatggtgatgcacacctgtagtcccagctattcaggaggctgaagcgggtggattacctgagcctggcaaggtccaggctgtagtgagccatgatcacactactgtgctccagtatgggcaacagaataagaccctgcctcaacataaaaataaaaaataaaaataaattccaaatagagaaaagatttaaaggtaaaatatgaaatataaaaattactttaggccaggtgcagtggctcatgcctgtaatcccagcactttgggaggccgagacaggtggatcacctgaggtcaggagtttgagaccagtctgaccaatatggcaaaaccctgtctctactaaaaatacaaaaattagccagtgtggtggtacacgcctgtagtctcagctactcaggaggctgagacaggagaatcacttgaacctgggaggcggaggttgcagtgagccgagatcatccgagatcgtgtgagatcgtgccactgtactctagtctgggcaacaaagcgagactccgtctcaaaaaaaaaagataaataagatctggaaaaatacaactgcaattcatatcgctgacaaggtgctaaattcccgcgtatataagcaattttgacaaaatcaatttaaaaataccaaagcccagctaggcacaatggctcacacctacaatcccagcactttgggaggctgaggcgggtggatcacctgaggtcaggagttcagaccagcctggccaacatggtgaaaccctgtctctactaaaaatacaaaaattaatgataaactatcataaagaaacattcagagaaaaaagcaagggagcagtgtcctactttcatgtaagagaacagaagtctctgcttatttgtctataaatgcacaaaacacctgggaatggacacatgagaagtggcagcaccagcagcctctggggagaggatctggtagccaggtgcaagatggaagggaaactttcccatgtagtttacctttccaattttgtgtcatgtaaatgtatttctacattgaaaagctgaaattaaaaaataatgagcaaagtttcctgtggaagcagcagccctcttctctgagcttctctaactgtgaacttccaccttgctcattctgactctctcagcctcctggattgactgcgttccccttcaggagaagggaataactgaatcaccttgtgttccctagagcacccagcacctcacctggtgctgagcagaaagtcactataggtctgctcactgagctaaactagtccactggtgcaaacaattcatccctttgggataatgtttttctgaaagttgtcaagcggaccaatgctaagggcagaaaattacttctctgggccgggcacggtggctcacgtctataatcccagcactttgggaggccgaggtgggtgggtcacgaggtcaggagatcgagaccatcctggctaacatagtgaaaccccgtctctactaaaaatacaaaaaattagctgggcctggtggcgggtgcctgtagtcccagctactcaggaggctgaggcaggagaatggcatgaacccgggaggcggagcttgcagtgagctgagatggcgccactgcactccagcctgggcaatggagcgagactccgtctcaaaataaataaataaaaagaaaattgcttctctaagcttcaaaattagccagtaacctgggagaattttcagcagatcaagttaatagtattgaaaaaaggtcgggcacggtggctcacgcctgtaatcccagaactttgggaggctgaggtgggcagatcacctgaggtctggagttcaagaccagcctgggcaacatggtgaaaccccgtctctactaaaaatacaaaaattagcagggcgtggccaggcgcagtggctcatgcctgtaatcccagcactttgggaggccaaggcgggtggatcacgaggtcaggagttcaagaccagctggccaacacagtgaaaccccgtctctactcaaaaacaaaaattagctgggtgtggtggcatgcgtctgtaattccagctactcaggaggctgaggcaggagaatcgcttgaaccctggaggcagaggttgcagtgagctgagattgcaccactgcactccagcctgggcaacaggggcaaaactctgtctcaaaaaaataataataattaaatagtattgaaaaaataaaggaatttcagttaatgaacgaaagctgatttcagagaatttaaagcctaaaaacacacatattcaagaagatgagtactggcacattttagagtaactgttgggatggcacagcaacacccaaattgaagtaagaccaawttatattagttggttgtaatggttgtcacaaataaccacgtgcataatgtcaaccctctttacaatagaacaccaacaaacctattaaagattttcttccacaatgccagttacctacattcttactccctcttgacctggtcaggaatgactaacaaagggactgaactgctgctgctaagaatcagttttatttttatttatttctttatttgagacagagttttgctcttgttgcccaggctgacgtgcaacggcgtgatctcggctcactgcaacctcagcctcctgggttcaagcgattctcttgcctcagcctcgcaagtagctgggattacaggtatgtgccaccatgcctggctaattttttattttcagtagagatggggtttcaccatgttggtcaggctggtttcaaactcctgacctcaggtgatctgcccgccttggcctcccaaagtactgggattacaggtgtgagccaccgtacccagccaagaatctgttttaaagctagaaacaacttgagagcccatgggggcagccttgtcatttcacacaatrtcttggcccatggacagagtgtcctcagcctccactccagcaggtacttgtaggagcacagccaggaccagcctcctgccaccagctacacatgagcatatcaggccacacaggctaaacaccctttgcctgatttcctgcaagaagcgtgctttgctggagggcatcaaagctcttgacagttttatacaatcaaatcccaaaatgggagatgtgacgagtctcgttgcgttactacttcaatattaggggaacccacccccaatatttcaacataggttctttctattttccgtaagtgtcggccggctgagaaataaagagaaacagtacaaagagaggaattttacagctgggcctccaggggtgacatcacatatgagtaggaccgtgatacccacccgagctgcaaaaccagcaagttttattaaggatttcaaaaggggagggggtgcaagaacagggagtaggtcacaagatcacatgcttcaaagggcaaaaaggagaacaaagatcacatgcttctgaggaaacaggacaaaggcaaattcagaactactgataagggtctatgttcagctgtgcacgtattgtcttgataaacatcttaaacaacagaaaatagggttcaagagcagagaaccggtctgacctcaaatttaccagggcggagtttcccaatcctagtaagcctgagggtactgcaggagaccagggcgtatttcagtccttatctcaaccgcataagacagacactcccagagcggccatttatagacctcccaccaggaatgcattcctttcccagggtcttaattattaatattccttgctaggaaaagaatttagcgatatcttccctacttgcatgtccatttataggctctctgcaagaagaaaaatatggctctattctgccagaccccacaggcagtcagaccttatggttgtcttcccttgttccctaaaatagctgttattctgttttcaagatgcactgatttcatattgttcaaacacacgttttacaatcaatttgtacagctaacacaatagtggtcctgaggtgacgtacatcctcagcttacgaagataacaggattaagagattaaagtaagacaagcataagaaattataaagtattaattttgggaactgataaatgtccatattaaaaggaaatattaacgatttatgttcagagattgaagtaaagacaggtgtaagaaattataaaagtattaattttgggaactgatatatgtccatattaaaatgaaatcttcaccatttatgttcctctgccgcggctccagccagtccctccgttcggggtccctgacttcccacaacacttcaagaactgttttttggttttttgttgttgttgtctttttgagacggagtctcactctgtcccccaggctgaagtgcagtggcacaatctcggctcactgcaacctctgcccccgcccccaggttcaagcgattctcctgcctcagcctcccaagtagctgggattacaggtgcctgccactgtgcccagctaattttcttatttttagtagatatggggtttcaccatcctggccaggctggtcttgaactcctgacctcgtgatccacccgcctcgacctcccaaagtgctgggattacaggcgtgagccactgcgcccagcaagaactcttaatataaacgttgcatggaagagggttccaaacagtgcaaagaggggaggagtttgtgaggagaaatgtggcaaagaagaaagccaagagatgaggctcacctgggccccttttccttggggtgagggtccaggagcccctagagctctctccagcacaccagacttcaccggccccttccaccaccttatctcccaggagagcctcccctctgtaccccctccatgcccaccagcttctaagaacctttcatcctgctcaccgctggccctaagactccctccacactcttcaaggcaaagggtggtactctgggctcacaaacctaagtgctatgggttcttgtcaagtcacaatgtgtgaagcctcacagataaacaaatcacatctacatggtgctcattcccaaatatttggtcaaagtctaaaaaacaaagattttgtttctgtctcaaattgtaaggcctgctgtaagttttaattgcttctttttcatatctataatctggtactaagtaaaactttccagctaacaggacaactgtggactgtgatatgcactgggaccacacaattcttccaaatgttcacagtcacttctcagactggaacttgcttgccttccagacatttatagagacaaaggaacagaaagctaccagatttcagagctaggagagatgggatcctccagcacaatatcctattggtaaggaagaaactgaggcttagggaaggtcatgccagatgacccaggtcatgtagcaaatgacaacaatcaacactctggttccaactcccagcccggggaacatttccatgacagagttgattccccagcacctcccaacaaaataatgtgttttaacctatgtaagagcagtctaggccgggcacggtggctcactcttataatcctaggactctcggaggccgaggcaaacagatcacttcaggtcaggagtttgagaccagcgtgagcaacacggtgaaaccctatctctactaaaaatacaaaaattagccgagcatggtgacaggcacctataatcccagctacttgggaggctgagacaggagaatcacttaaacccaggaggcaaaggttgcagtgagctgagatcacactgctgtactccagcctgggcgacagagtgagactccatctcaaaaaaaagcaatctagcattcagatttaaatgtttactataatcagtgacaaagtattctacttcgttttgtggtaaaaaaaaattattaacataaacatcattttaaccccttttaagtgtacagttcagtggtattaagtacattcatattgttgtgcagccatcaccaccatccatcttttttatcttcctaaactgaaaccttttgtcttagctaggagatcaactttttcttttaacaagtttactatataacttgtcaaaggtttttctgtaaaacagtcatctgacagcctctgccccatcggctatacaacctctgccccatcggctatctgtgtagtaaaggcacacgcagtgaagcctccattctttcaatctaaggacctgcctgcttgaagacagactgtaaaacaccttcatggatgagttatgacttatgatcaaacaccatcagaggcagccactgaaagggctgaccataaagacactatgctgaaatgagaaacgcctacaaccatcctggctaacacggtgaaaccccgtctctactaaaaatacaaaaaattagccgggcgtggtggcacatgcctgtaatcccagctactcaggaggctgaggcaggagaatcgcttgaacctgagaggcggaggttgcagtgagccaagatcgcgccattgcaccccagactgggcaataagagcgaaactccgtctcaaaaaaaaaaaaaaaaaaaaagaaagaaagaaaggaaaacacctacttatttcctagttgtgagtgacatcatgtccctactgatgtcctagaaggttgtgcttctcagcctcccttcctgcttccccataggctttgttcctggcctgctttcctcatctaccctttctccccagggcttctcagcctgactcctggctccaattctcatctgtttgctgatgtctcttacatacacacctctcaagcctctcccctaagctccttatttacactatttccacttggtatctccactcaaatgcctaataagcacttcaaatctaacaagaccaaaaacagaattcttgatttccccacagtagctgttctttcccagccatctcagttaattataccactagctaccctgtttattcctccggcggaaagtttaggaaacatcctacaacaagcccacatctgaaacagctggttacaacagttttacctccaagtcagatccccaacctgaccaacaatcatcatctccctggctactctcccatcactgaccatggggacagcaggaatgcctctattcattcctgcctcattccatcctcgataaatctttctaaagcacaaatcactaatgtcactaccctgctcaaaacactccagtgggccggggtgcggtggctcgtgcctgtaatcccagcactttgggaggcagaggcaggcggatcacttgaggtcaggagtttgagaccagcctggccaacatagtgaaaccttgtgtctactaaaaatacaaaaattagctgggtgtggtagtgcctgtaatcccagctacatgggaaactgaggcacgagaataacttgaacccaggagtcagaggttgcagtgagctgagaatgcatgactgcactcgagcctggcagcctaagtgacaaagtgagactgtccctaaaaaaaaaactaaaattaaaaattaaaagaaaacaggggcttagccttgttcactgctgaatccccagaactttaacagtgtctgacacctaggaagaattcaataagcatctgttgacttctaagttttttggttttttgttttatttttgagatagggtcttgctctgtcacccaggctggatacagttgtacaatcgtggctcactgcggtctcaacctcccaagtgatcctcccatctcagcctctcacactgctgggactacaggcatgagccaccacatctggctaatttattttattttattttttaatatttatttatttgagacagagtctcgctctgtcacccaggctggagtacagtggcatgatctcagctcactgcaacctccgcctcccaggttcaagcaattctcctgccttagcctcctgagtagctgggattacaggcgcttcccactaagcctggctaatttttctatttttagtagagacggggtttcaccatgttagtcaggctggtcttgaactcctgatctcaggtgatccgcctgcctcggcctctcaaagtgctgggattacaggcgtgagccactgcaccaggctttttttattttttgtagagatgagggtctcactatgttgcccaggctgggactgatttgtgtttttttttttaaagtagatattaaacatacatctcagatgacaagtggaatttattcccaaagtgcaaggatggtttaacaaaaatcaattaaggtaatatgccacattactagaatgaaggagaaaaacaatgatcatcccaactgatgcagaaaaagcatttaacaaaattcaagataactttttgattaaaaaatactcaatgaaataggaatagaaggcaatatcctcaacataataaaggggtatatatgaaaatctcacagcttacatcacacttgatggtgaaagactaaaagcttttcccctaaaatcaggaacaagacaaggatgccacttctatttaatccagtactgaaaagttttagccagagaaattaagcaagaaccttctcactgcctcatttaccctttctctccaggcatctcaactggacaggaagtagtaaaattatttccgttcctagatgacatgatcttacatgtagaaaaccctaaagattacacacacacacagctaataaatgaattcaacaaagttgtaggatgcaaaatgaacatgcaaaaatcagttgcatttctattgttcactgacagtgaacaatctaaaaacaaaattaggaaaacattccatttataatagcatcaaaaagaataaaatacttaggaataaatttaagcaagggagacaaaagacataaactgaaacattgctgaaacaaattaaagacgtaaaataaagggaaagaaatcccactttcccactttcatggattggaagatgatattcttttttttttttcttttttttagacagagtcttgctctgtcacccaggctggagtgcagtggcacaatctcggttcactgcaatctccgcctcccaggttcaagcgattctcctgtatcagcctcctgagtaactgggattacaggtgtatgccaccacacctggataatttttgtattgttagtagagacagggtttcaccatgttggccaggctgggaagacaatattctttaaatgacaacgttatccaaagctatctacaaacgcaatccatatcaaaatgcaatgcaatccctatcaaaattctaacagctggccaggcacggtggcccatgcctgtaaacccagcactttgggaggtcaagtggggaggactgcttgagccctggagtcctcaagaccagcctgggcaacacagtgagactccatctctacaaaaaattttttaattagccaggcacagtagtacattcctgtagtcccacctacttagcaggctgaggtgggaggatcacttgagcctgggagctcaaggctgtagtgagcagtgactgcgccaatgcattccagcctaggtgacagagcaagactccgtctcaaaaaaaaaaaaagaatattgtcttccaatccatgaacgtgggatttctttccatttacttgtttaaaaaaacaaaaaaaaaaaagctgggtgcagtggcccacgcctgtaatcccaccactttgggaggccaaggcaggtgggtcatgaggtcaagagatcgagaccatcttggccaacatggtgaaaccccgtctctactaaaaatacaaaaattagctgggcgtggtggcaggtgcctgtaatatcaactactcaggaggctgaggcaggagaatcgcttgaacccaggaggtggagtttgcagtgagccaagattgcgtcactgcactccagcctgacaacagagtgagactgtcttaaaaaacaaaaaaaaaaaaaaaaaaaaagaaagaaattctccccattactttgtccaaagaaaaaagtgggaaccctgaatagccaaaacaaacttgaaaaacaagaactaagttgaggactcacacttcctgatttcaaaacttactataaagctacagtaagcagaacaatgtggtactggcataaggtcagacatataaaacaatagagagcccagatcttctgtagttcatcagtatgatacctgggtgtttcacacacatgtgagatgagtcattcttgaaccttgttatgatgtcagcactacccatctaacctgaaaaaaagaaaagaagaagaaaaaagaacccaaaaataaactctcacaaatataatcaactgatttttgacaaagatgccatgaccagtcactggggaaaggacagtctcttcaacaaatgctactgggaaaactggatagttacacgcaaaagtgaagttggactcttatacacaaaaattaactcaaaatagatcaaataaatgaaaaaagaagagctaaaactgtaaagcccttagaagaaaatataagaaaaagatcttcatgatgctgagtttagcaaggattgaaaagtataggcaacaaaagaaaaaaattgataaactggaattcataaaaattaaaaacttttggccgggcgtggtggctcacgccttaatcctagcactttgggaagccaaggcaagcggactgcttgagctcagaagtttgagaccagcctggacaacatggcaagaccccatatyttaaaaaaaaataaatacaaaaaaaattagccaggcatggtggtgtgcacctgtagtttcagctacttgagaggctgaggtgggaggactgcttgagtccaggaagtggaggctgcaatgagccaacactgtagcactgcactccaccmtgggtgactgagggagactctgtcttaaaaaagaaaaaaaaaaaaaagttaaaaattgtgcaaatcacacaataaagagagtgaaatgctaaccaacagaatgggagaaactattcacaaatcatatatctaacaagggtttaatatccagaatttgtaaagaattcctacaactcaacaataacaacaaaataacaattaataactcaaagtgagaaaaggacttgaatgaacatttctctaaagaagatatacaggctcggtggggtggctcatgcctgtaatcccaccactttggaaggctgaggtggatgggtcacttgagctcaggagttcaaggccagcctaggcaacatggtgaaaccccatctccacaaaaaatatgaatataagccaggcatgggggcacatgcctgcagtcccagctacttggaagactgaggtgggaggatcacttgggaccagaggcttgaggctgcagtcaactgtgattgcgccactgcagtctgggcaacagagcaagaagaccccgtctcaaaaaaaagaaaaagaaaaaaaaacccaaacaacaacaaaaaagaagatatacaaatggccaatcaacatatgaaaaattgctcaacatcaatattccttagaaaatacaaattgaaatcacaatgagataccaattcccacccactggcccttgggtacatgtgcacaacatacaggtttgttacatatgcatacatgtgccatgttggtgtgctgcacccgttaactcgtcatttacattaggtttatctcctaatgctatccctcccccctccccccatcccccggcaggccctggtgagtgatgttcccatgtccaggtgttctcattgttcaattcccacctatgagtgagaacatgcggtgtttggttttctgtccttgcgatagtttgctcagaatgatggtttccagcttcatccatgtacctataaaggacatgaactcacctttttttatggctgcatagtattccatggtgtatatgtgccacattttcttaatccagtctatcattgatggacatttgggttggttccaagtctttgctattgtgaatagtgccgtaataaacatacgtgtgcatgtgcctttatagcagcatgatttataatcctttgggtatatgcccagtaatgggatggctgggtcaaatggtatttctagttctagatccttgaggaatcgccacactgtcttccacaatggttgaactagtttacagtcccaccaacagtgtaaaagggttcctatttctccacatcctctccagcacctgttgtttcctgactttttaatgatccccattctaactggtgtgagggtatctcattgtggttttgatttgcatttctctgatggccagtgacgacaagcattttttcatgtgtctgttggctgcataaatgtcttcttttgagaagtgtctgttcatatgcttcacccactttttgatagggttgtttgatttttttcttgtaaatctgtttaagttctttgtagattctggatattagccctttgtcagatgggtagattgtaaaaattttctcccactctgtaggttgcctgttcagtctgatggtagtttcttttgctgtgtagaagctctttagtttaattagatcccatttgtcaattttggcttttgttgccattgcttttggtgttttagtcatgaagtccttgcccatgcctatggcctgaatggtattgcctaggttttcttctagggtttttatggttttaggtctaacatttaagtctttaatccatcttgaattgatttttgtataaggtgtaaggaagggatccagtttcagctttctacatatggctcctggatcgatagtttctatgtagaataatgaaaacattctggaaatggatagtgatgatggttgcataacaatgtgaatacatttaatgtcactaaatagtacacttaaaaatggttaaaatgggccaggcacgttggctcacacctgcaatcccagcacttggggatgccaaggtgggcagatcacttgaggtcaggagttcaagaccagcctggccaacatggtgaaaccctatctctacaaaaaatacaaaaattagccgggtgtggtggcacatgcctgtagtcccagctacttggtaagctgagacagaagaatcgcttgaaccgggaggcaaaggttgcggtgagcagagaccacgccgttgcattccagcttgagtgacaaggagactccgtctcaaaaaaaaaatcaccaaataatttttgtttgtttgttttgagagtcttgttcggtcacccaggctggagtgctgtgacacgatcctggctcactgcaacctttacctctgggtccaaacaattcttcctcagcttcccaagtagctagaattacaggtgcgtgccaccatgaccctgctaatttttgtatttttagtacaggcaaggtttcaccatgttggccaagctggtcttgaacttctgacctcaagtgatccacccaccttggcctcccaaagtgctgggattacaggcatgagccactgcacccagccaccaaataattttaaaagtataatgagaagaggcttgcctgccaccatgtaagacatgcctttgctcctctttcaccttctgccatgattgtgaggcctccccagccatgtggaacttatattcattgctcaacaaggaagagacttgcaaggctattaccctgggcagttggcaagactccattttgatcatagtgcaaagagagctctcagattggaacaagaaattagccacagattcactgaatccttgacctcttagttcactgccacagctctactattgtgaagagagaagcggttttgaaagaaatgcttttaaattaaaataaccaaggcattcgaacaaaatatcgtttggcattcttaggtaactcttttagactaatgtaatggtagcaaaactacttttaagtgtgtatacagatggctctaatcctaaaatatttacatgctgcaaattattttcagattaagttggtcagcttacaacaggggatcaagagctagccttaagagaacttgttttttaccccattaccagtcttattgctgatgctggcaaaccatcatacatttaggccaatggttatatgtaggctcaggtaagaagattactgcatctgctcagtaagtgcatcaccgttgggaaaaataaaaaagaacctaggggacatagccaatgaggaagaagactggcactagagaccctaaaggggcttgggatggagaaacccaggtgtagcatagggctatagtgagatgtgggactggtaaaaaggattaagtgaacatctgtacacaggagttaacacccttatctgggcaagaagaaagcctgacaactaggcatcagctcctcaggcagaaagctaaagggtcttctctaaggacaggaaaggatcccaaagaaaagaacctttgcggggcgcagtggctcacgcctataatcccaacactttgggaggccgaggcaggcagatcaccggaggtcaggagttcaagactagcctggccaacatggtgaaatcccatctactaaaagtacaaaaactagccaggtgtggtggcaggtgcctgtaatcccagctacttgggaggctgaggcaggagagtcgcttgaacccaggggggcgaaggttgcagtgagccgagatcgcaccactgcactccagcctgggcgacaagagcaagactctgtttcaagaaaaaaacaaaaaaaccttaccagttccccagcatactagtgggctccctcctcatttaccccaaagtaacacctatcaattaataaacttctccccccaaaaaaaagtataatgaggattaaaggatatagatgaaacaagagtgtccccaagttaatgactaagtgacagacataactgagtgataggtacacaagggcttattgctctctatttggatgtatatttgagttttactataataaatattaaaaaacaaacaagtcttcaaaatgtgcaaagcttttcaagaatttatccccttacaaattttagcaaaaatgagtacagaagaggaggcagggaaaggcaaggctcagagggattcaacagtataaaaaataaaataaaataagaataagaacaaagatttggctataagaatacaatcacagtaatatttagaacgggaaggaaatgtgttatgtattttatagtaaaacctgagacaaagagcagaaaccattaaaaacaatctagacgattaaaacacttaagcacaagctggaagaccctggatacaaacttgactctgagcttcctagtggccaaggcagagagaggaaaacatcaacatagttctagtatacttagaggtatactacaggcgcatgccaccacacctggctaacttttgtatttatagtggagacggggtttcacacatgttggtcaggctggtctcgaactcctgacctcaggtgatccaccctcctcagcctcccaaagtgctgagattacaggcatgagccactgtgcctggccaacaccttgtatattttatgctttctgaaaatgctaaatatcaaataagccactggttcccaaatgttttgatcatgaatgcccaacaacaaaaattcaagtatatgctcccaatacatgtacacttacatataaattatatatgtactacagtgataatacagtgtacattataaagtacataataaaaattattatggtggttcatgcctgtaatcccagcactttgggaggttaaggtgggtggatcacttgaggccaggagtttgagaccagcctaaccaatatggtgaaaccccatctctactaaaaatacaaaattagccaggtgtggtggtgcacagctgtaatcccagctactcgggaggctgaggcaggagaccaagattgcagtaaaccaagatagcatcaatgcactccagcctgggcaacagattgagtgagactccatctcaaaaaaataataataataattaaatggggccgggcgcggtggctcacgcctgtaatcccagcactttgggaggccgaggcgagtggatcatgaggtcaggagatcgagaccatcctggctaacaaggtgaaaccccgtctctactaaaaatacaaaaaaattagccgggcgcggtggcgggcgcctgtagtcccagctactcgggaggctgaggcaggagaatggcgtaaacccgggaagcggagcttgcagtgagccgagattgcgccactgcagtccgcagtccggcctgggcgacagagcgagactccgtctcaaaaaaaaaaaataaaataataataataataataataataataattaaatgaagctgaaataaacaggaaaattagttttatttttttcctgagatccacgtgcatctttatgcttacataccaactttggaccccactgcaaagcttccttatgatttagcatccctgcaaccattctaggttagtgcccttgactgcttaagcagaaactgtcaaatggcagtggtcaaattgctgtcaccttcttgctgagttccaccatccccacactagagtcagtgacgctggcttcctcccaccacccctaccaccttcttccactacccttacctgccaatgagcaacagaaaagactgtgggctgcgtgcagtggctcacgcctgtaatcccagcactttgggaggccgaggcgggcggatcacctgagatcgggagtctgagaccagcctgaccaatagggagaaacctcgcctctactaaaaatacaaaattagccaggcgtggtagtgcatgcctgtaatcccagctactcaggaggctgaggcaggagaatcgcttgaacctgggaggcggaggttgcagtgagctgagatcacgccattgcactccagcctgggcaagaagagcgaaactccatctcaaaaaaaaaaaaaaaaaaacagactgtggaagcaggtacaagaacagcataaaaggatggactcttttgtcagccaaatctcagtttgcacacaacacactccgtctcaaattcgctaggtgacccagggccagtcaaataacttttctaaaactctccgtaaagggggtgataacagtgttatctcacctggttattatgaaaactaagtgagataagctaatattacagtacctaggacactgcctaaacagcacaagtgctcgatatcacccagaattattactctgagtggcaaaagacgacacctgaaccttgtttctttagccaactcagtaaggtagcaagttctaacggaaggagctcaggtggcagaggtgtggcagacctggtttgaaggatgatccacccttgacaagctgggtgaccttgtaagaacccagcttctctatgaggagtcctctcatctgttcaacgggggtgatgacacaaactgtatatgaagtacctgtcagagccggtaaaacactggcaaccaccaatggtgagagtaagcaaacagcacatgaacctgtcattccaggatccctgaggcacattcacatgcatggctagattctgagagagaaaacatccctaaagtctaccaccaaatgttaatatacatacctgcagtgaagcccacaggcacactttttctttccttttttagtttatttaattcctgaatcgcatatgcctccatttttctagtaataaacttgtagtaaactttttacccacctaatgacagtgactgagggaacgggggaagggccccaaaccagtgattataaagtccacggagatctctagagagggggcgtttttgccgcaacagcaaaagaaaagagagagcattcaagccaggcgcggtggctcacgcctgtaatcccagcactttgggaggccgaagcggacggatcatgaggtcaggagatagagacratcctggctaacacggtgaaaccccgtctctactaaaaatacaaaaaagtagccgggcatggtggcgggcgcctgtagtcccagctacttgggaggctgaggcaggagaatcgcttgaacccggcaggcggagggtgcagtgagccgagatggcgccactgcactccagcctgggcgacagagcgagactccatctcaaaaaaaaaaagaaagaaagaaaagagagagcattcaaacatcagatcagttcataataaatttaaaaagcctaattctttccatttcaatttatgaccaaaagaataaatatggaaatatatttatacagtgttaaatatatttatatagtgttttttacatcatgtgctcagtgggaatactgcaaatgtgtaaaacacctaaaatgtaaactatattaacacacattttaaaagatacaggtcttggccgggcacggtggttcacgcctgtaataccaacactttgggaggccaaggcttgtataatgcttgagcccaggagttaaagaccagcctgggcaacacagcaagacccccatctctacaaaaaaatacaaaaattagccgggcgtggtggcacacacctgctgtcccagctactggggaggctgaggtgggaggatcacctgagcccaggaaatcaaggctgcagtgagccgagatcgcgccactgcactccagcctgggagacagagtgagaccctgtctccaaacaaacaaacaaaaaacaagtctttaggcatcactgaggaacacctaaaatggatacagcactaactagacaccctcgaccctgactccctaataaaagcgtcagtcttttgctcaatatcctgacctgacagcaaaccaataaagacacggcataaccaaactccacaaatttttggccaaataaaagaaacacacgcaacgctaacattaaaccttttctatggccgcttcacgataagtattacaaaatccccagaaagagtttattcacctagctccgactgtcgccatacaaggtggagcagtgagtgacccgaaccaggggctgacccctgccagagcccccacagcgactcactgcccccccctccgcattcccatctgcacaactttctgtgattcaaacagtccggagccagggctccctgcaactaacgctatcgtgacattataagccggttaaatactgaggtcataaacccactcagaagtaaacagaagcaacattagtgagcaaagttgaggtttaagcaatacggaaaactagaaaccaagcaaaaccagcaaagcaactagcgttgtctctcaataagatcttccaaaagaggcaaagtggagaacctgctctcccccgcactccggaaaacccaaacagcaccaaagcaggttctacaacagcttcccggagcaactaggccaggggatgcgacgccgcgcatctccccccgtcacaccaggggcccgcggaggtctggtggggacgcggagctccaggggccggccggtgcagggacacggccgggttgggggtggggacgcgcggccctgcctccttgccggcctgcggtctccagggccggcccgcacggctgctggacagcgccatgcccacgcacccccgaacctagcggcccccattccggaactcccagctccacgcggctggggtcgagctggggcccgcgggcaggcgccctgagcacccgcgtgacggtacctgtggtggcagcacctcccaagctgcggcggcggcggcggcggcgacgggggcggcagcaggggcggagcgcggcgtgcgcgctctcggcccgcagtccggtgcgtggcgccctccctctctctcctggccgccgggtgcccgccccttcacctctcacctcctacctttaccctcccgccccgccgccctccgcacgtgcgcccagcggcgtgcgcatgcgtagtcgaaccacattcgcgtctcccgttcgccctctggtggacaccggagggaagtatggacggccgggccgggccgggccgggcggagcgtgaagccgggttagggcccgccgggtttgggcccaccggctctcatcggtcatcaagaacttgcagaaagccgggcacggtggctcgcggttgtaatcccaacactgtgggagtccaaggcgcgaagatcgcttgagccgaggagttagagaccaacttgggcaacgtaggagacctccgtctccacaagtaaaattaattagccggctgtggtggcgcgcacctgtggtcccagctactcaggaggctgaggtaggaggatcacctgagcccgggaggtcgaggccacagtgagacaaaaaacaaaaaacccaccctgcacaagatgctcatgttccctgttttataatggcaaaaaattagaagcagctgggccgagatacactgcaaatgcagatgagaagaataaataatgtccataaaactagtttccctatagacatttaaaagcataagttgacatttaaccattttccacagggaacaggtatttgttataatagcaacagctacgttcactgtttactaggtgtcagttgcggagctggtattgtacatgtcctcgcatttggccctcctgaaaatccgaggtaggtcttgttacagggcctcacagaaggggaaggggaggctgcctcccctcgagggaaacacaggtccccacctgcccagctctggcccaactagagacgctgcccggaccactctggggggactttgatcatgctactgcatgcccttgctgtacccaggtcttgtgtcagaggtaagcctcccctcagcccctgcctactgcccgagacacccgcacccaccccagggctacctggataaggcaggccctgtacctgccctcaaaggcaccagcaaacttctctgggagttccggaaagtgcagatctagtcaccaatgcaaggcagaaattagaggtggcccttctgaccgcaccagcccccgacccactacacattcttcagatacctcctcctaaaacccagttcccaccggactctggcctccctccttgcccaccacactattgtcacaatgaaagtaacaatggggacagtgggccttggcccaaagtgactttcagggttatgacattttcagcattgtcttttggcttaatatgggaattttgatcctataaagaaagtattcgctgggcgcggtggctcacgcctgtaatcccagcactttgggaggccaacacgggcagatcatgaggtcaggagatcgaaaccatcctggctaacacggtggaaccccatctctactaaaaatacaaaacaaacaaaaaaaaaattagccgggcgtggtggcaggtgcctgtagtcccagctactcgggaggctgaagcaggagaatggcatgaacccggggggcagagcttgcagtgagccgagatcatgccactgcactccagcttgggcgacagagcgagactccgtctcaaaaaaaaaaagaaaaaaaaaaagaaagaaagaattttttaggttatttttatttttacatttgaggtctcactcctttacccaggctggagtgcagtggtgtggtcatagctcactgcagcctcaacctcctgggctcaagtgatcctcccaagaaggtaggactacagatgagcgccaccatgccatttttgtttttgttatttttatcaagatggggtcttttgctgtgttgcccaggctggtctcaaactcctgggctcaagcagccttcccatgttggcctcccaaactgctaggattacaggcatgagccaccgtgcccatcctgtttgttgtattaaatgagagagaagcaacaatagagagcattcaggggaacttacctacaccccttacctatcctgacatcactctctccaggtctgatcccttgaaataccatcatttgtcccctcagaaaccttgggcatgaaggagtcctcctgagccctgggcccactgtaccaaagtcttctctccagagagggtcaggagcctgtcttctaaccacctccatggcaggacttagccagactgccttgggaactgctgtcattctcctcactcaccacctcttcccacccaaccactccatcaaagctgtgtttgcagaggactgaccctcagtgaagtctggacactcccccacaaaaaataagaggctccaaaactgacaagcacctagctaagtacctttgtgccttgaagcatggcaaacaatcctccactgccctaagagaacccactgagaatcctgtggagcctctggggaagctggggtttatggggccctggtaaatctgctacagaatgccccccatggaatataatgaagtggacatgatttttgggcttctcccacaacattttttttttttgagacacagtctcattctgttgtccaggctggagtgcagtggtgaggtgttggctcacagcaacctccccctcccaggttcaagtgattctcccacctcagcctcctgagtagctgggattataggtgtgcgccaccatgcctggctaatttttttttgcatttttagtagagacagagtttcgccatgttggccaggctgtctcaaactcctgatctcaggtgggatccacccgcctcagcctctcaaagtgctgggattacgggcgtgagccacctcacctggcccttttttttttttttttgagaccaagtctctgtcacccaggctggagcacagtggcacaatcttggctcactgcaacctccacctctcaggttccagcgattcccgtgcctcaacctcttgagtagctgggactacaggcttgcgccatcgcgccaggtttatttttgtatttttagtagagacgaggtttttgccatgttgcccaggctggtctcgaactcctgggcccaatcgatccacccgctgtaatcccgggattacaggtatgacccaccatgcccagcctcctacaacatttaatatgaaaacataacagaaaagttgaaagaaccatagagtgaacactcatataccctagattcaactattaatgttttgcttagtatctcatgtctatctaaaaaaatctatccttttattcatctatctgtaattgcccaagggttcttcttgcccactgcgcagacaaaatcaattcactgaggccttggcattgcagtaaagagtttcactgacgcaaggctggcgatgcacaaggccacgcagaagatggagctgttactcaaatcagtctccccaaaggcttagaggtcagggtttttcaaggatagtttggtaggcagggtgctagggaatgggaaatgttgattggttggggatgcaatcataggaggagtcctcaagcgctgagtcagcctctgggtggagtcagcagaaatgcaaaagtctgaaaagaaacacctcaaggccgggcgcggtggctcacgcctgtaatcccagcactttgggaggctgaggcaggtggatcacgagatcaggagatcgagaccttcctagctaacacggtgaaaccccgcctctactaaatatacaaaaaattagccgggtgtggtggcgggcacctgtagtcccagctactctgggggctgaggcaggagaatagcatgaacccaggaggcggagcttgcagtgagccgagatcatgccgctgcactctagcctgggcaacagaacgagactctgtctcaaaaaaaaaaaaaaaaaaaaaagaaagaaagaaagaaagaaagaaaagaaacatctcaaaaggcaagtcttaggttctacaatagtgatgttatctataggagtaactgaggaagttacaaatcttgtgacttccagagcaatgactggttatcatttaactacacctacaccttagcagaattcaggcccctcctataaaaatcctagacttgtggcttttcattagttttacaaaggcggtttagttttggagagggctaatgtcatccttgctttaaggttgaactataaattcctcccaaagttaccttcgcctatccccaggttggaggttagaagcaagatagagctgggcacggtggttcactcctgtaatcccagcattttgggaggccgaggcaggcagatcacctgagcaggagttcgagaccagcctgaccaacatggagaaaccctgtctctactaaaaatacaaaattagccaggtgtggtggcgcatgcctgtaatcccagctactcaggagactgaggcaggagaatagcttgaacctgggaggcagaagttgtggtgagccgagatcgtgccattgcactccagcctgggcaacaagagcaacacgctgagagaaaaaaaagaaaaagaaaaggaagcaacatggagtcaaccatgtcaggtttttcttactgccataattttgcaaaggtgatttcgtatcaatcctttattttaagagatagggttttgctctatggtccaggctggaatgcggtggcacaatcacagctcactgcagccttgacctcctgggctcaagcaagcttcccaagtagctgggaccacaggtgggtatgaccactcccagctaaatttcagagttttttaaatagagatgagggtctctctgttgcccaggctggtcttgaactcttggcctcaggcaactctcccatcttggcctccacaagtgctaggattataggtgtgagccaccatacccagcccctatcttatttttgatgcacttccagttaagttgcagaaacctgattttagtttttatatatagtaaatcaaatggaacagttccatttagccctaactaggtagagctcaactttacttcagattgttccccataagaaaggtgaattcaggccgggcacgatggctcatgcctgtaatcccagcactttgggaggccaaggcaggcggatcacgaggtcaggagattgagaccatgctggctaacatggtgaaaccccgtctctactaaagaaaatacaaaaaattagccaggcgtggtggcgggcgcctgtagtcccagctactggggaggctgaggcagaagaatggcgtgaacctgggaggcagagcttgcagtgagccaagattgcgccactgcactccagcctgggagaaagagcgagactccgtctcgaaaaaaaaaaaaaaaagaaaggtgaatttgaattcaggccaggcatggtggctcacgcctgtaatcccagcacttcgggaggccaaggcgggcggatcacttaaggtcaggagttcgagaccagcctcccaacatggtgaaaccccatctctactaaaaatacataaatgagccaggcatggtgatgcatgcctgtaatcccagctacttgggaggctgagggatgagaatcccttgaacctgggagacggaggttgcaatgatctgagatcacgacactgcactccagcctgggcaacagagtgagactctgttgttgtaaccgagtgagttatagagaaacaccacactttgagatgaattgaggagtcctttattagccagtgaccgagagacggctagcactcaaaattctctcagccccaaagaagggtctagattttcttttatactttggtttggcaaggggaagggaaatcgagttgaagcaatctcacagaagtaaaaacaggcaaaaaaagttaaaaagacaaatggttacaggaaaacagttccaggtgcaggggctttaaattcatcacaaggtgataggtgcgtgggctctgggtgctatctacaggacacaaatgcgggggcttaggatactatcacctgagcgaatttctgggaactgtggacagagcttgccacagtaccttatcagttaattgcac

SEQ ID NO: 96188 - DNA, 63005 bp, Homo sapiens
aaaacagtaccttaatagcagggaagaaacattgcacgtaccaccttcacccaatgatcaaagttaacatcacaataatgaaacgtatcaacaccatatgcctcctgatacggtgcaacgaggacacattgcttcagcagtgctcctgccccaaatgcctaacctcaatctaatcatgagaaaaacatcaaaaacacaatctgaaggacagcctacagaatacctgccctacaatcttcaaaagggtcaaagattgatgaaaagattttggaaccagacagacctggtggttacaaaacattgtgaatgcattaaatgtacactttaaaatggctaattttgtgttacaggaatttcacctcgatttttaaaaagggtcaaggtcatgaaagacaaaggaagactgaggaactgtcacaaactggaggagactaaggagacatcgcaaatgatgcagtgtgggatcctggaacagaaaagggtgttaatgggacaactggagaaatgtgaataaggtacatacattagttaagggtatggtgttgccaatgtccagggttttatatttgtattatggttgtataaaatgtttacctttggtgagactgactgaaaggtacatgggaactctttgtactgtttttgtcacatttttgtaagtctgatttcacaaaaagtttaaaaataatcaataatctgagacaaagatttatgcaatacaaacttgaacactgaattataataatgcaaagctggaaatgagaaatgcccaataatgatggttaagcaaatgattctataacactatgcagctagaaaagatggtttaatatggttttacatgacattagaacatttgtctgagtggttacttttggggatggaattctagaggatttgtatttatttctgtagacttctcacacaatccaagttttaccaatgagccaatgttacttttataatcagaacaaaaatagttgtttcagaaaatggatcttgttgacacaagtctaaagggaccttcatgtgggtcatgagcatgtgatgccatgctgcttcctgactggcccctcgccaggcctcccttcttggcacagaagcagtgaccagctgagatggtttgctttgggcattctgcattctcttcctgggtgatcatctgcagcctgttgagaaagaggctttaacttcatagcacgagagctgggacatcaccatatggcagacccggctacagaggaaacacccaaaaatgacagactggctgcatccacactgacttggactcaaagccatgaccataggtttttatggcctccttgtgaggaggtgggtatgagtattgatgattggcagatggggaagaaacagaagttccaagaggccatgacggtggccaaggctcatctagcttgttatgtatcagaactggaaccagaactagtgtctttttttctgcccaacaggtttccagttctactgcaaatcaccactgtgcccaggctgagctcagtcagagagaaggggaatgaagccaagagcccacaggatgattatttgccattcatgtggcatgctcccagataggcactcttggattatactcaacctcctcaccaacctcataaagtattccagacagagcctggcctgtctaccagaggtcttcagcagtaaagtcgacaaactttcagggagtgttgacttttgagtctagaaagaaaatattgcaaacaaatccgatgtataaaaatgggctgagggctgctttttcctggtaggactcaattttgagttttgtgtggatttaaagggatcctgcaggcaaagttcttaagcttgaggtttgcagaggagcagtaatagtagcttcaggctcaagagaacgaacaaaaatggttgatgcctggtaagggggtcatagtcgacaccagaagctcttgcagggtgtgtgatgggccttttggcccaggtcagtctgggtgacacatgagctgtgatctgtgaacaaactcaccaacactccaaaatgaatgtattaggactaaggctcccgaggaaggaagagtctgtgcagaacagactcagctgagccccacagaacgagaacaggctgttccctgctccctgtatcatcagatgtagaaagccagagcctcagggagcagcctatgcaaatgtgtctcttcatagcgggccagataacactgtctctcctcatcagagatttcatacctctatattgtaacccacaagaggaaacatttttctgttgcattccagaacacatatacacacaactccctaagcttcataaaacaatacttatcctgcaatatgtaatgcattaaacatttttcttgaaaaacatgctggttgcaaaccatgaatggctgtgaccaatggtttgaaaagcacagctccaacacagctaacatttataaagccataccagggccagacgctatacattcctattcatcaccctcatttaatccttccattaactttgtgatttagattatcattcccgttttcagatgaaaaaactgaggcttaaagaagttactgctcaaggtcatattttggtagtaggtgcggtaataagtagccaagcagacatttcaaccaaagactgaagccaggacccaaatacttggtcaccagactatatggcctcagctgcagaaattcagggcatccttatgtccgtgttagagcatgtgcggcccctagaaggcttttagcgaacgtccctctgcagcgcttgtcctcactccttggatcagcttcatcggctcctcctgtgggcccaacagagcgggatccctgggggccactctgctttgctacggcaatcacactgctcaagtcagcaagatgtttacttgagggagagggtgagaaaaagaaggttcaggttgggagtacgctggtcagtggcttgtttctgcttcactgtgaattctttctcttctatgaggtgatcctaagccagatacatatttaaagaatacaagaaaaagccacatgggtgttgaaacccacacgtagaaagcaaaggtcaagacgtgttcaggtcatgtatccaggctgctacaatgcccctggctctagactactcaccggccgccgctcccatctggaggtcccttggttctactcttttctctttcccttccgggctgcttcttcacccaaagggcccttggtctagagatgggttccactgatgagatgcacaaggagtggtgggcaggctaataatttggatctgcttcatacagactttctttgatgtcttggcagttgtttgttggggaggccgcagcttatgagggaaggcagtctcagtggcttctccgcggagggaacacgtgcctgtctcacaatcagcacaccccaactgcactatgctgagcccagcagcacacaagacccatatcaccagcaggcatcagggaccacctgaggggggactcctgctagccccaactggattctcaaacttgatagtcagaatcacctggagggctgttaagacacgggctgctgggccccgctcggtttctggttcggtagcctggggtggggaccgagaatgtgcatttctaacaagttctcaggtgatgctgatgttgacgttgctggtctggcaacctcaagaacacctttgaggaggattctagcaaaatctttctcttttcacatttctttgatatctaagggcaccttctaggtggggcgccttcccctctactggctggctcaccctttaagctgatgcactgcaagtcttgaaaagagagaaatttaaaacccattagcctggctgagaaagcccatcccagcccacccggagaggagtttctgtgtaatgccaacctcacatacatgtttaaaatgtttgttttttttttttgagacggagtctcactctgtcgcccaggctggagtgcagtggtgcgatcttggctcactgcaagctccacttcccgggttcacgccattctcctgcctcagcctcccaagtagctgggactacagacgcctgccaccacgcccagctaatttttttatatttttagtagagacagggtttcaccgtgttagccaggatgatctcgatctcttgacctcgtgatctgcccgcctcggcctcccaaagtgctgggattacaggcgtgagggatgtccacagtgagaagtgtccgcgcccggcttaaaatgtttgttaatttacctcacctaaacggtttctgcattaggggacggtggattctaactatttaagtggcctagccagatgagcaaaagctaatacttggggctttttcaagaagtacagggctgggcccagtggctcacgcctgtaatcccaggactttgggaggctaaggcaggaaaattgctggaggccgggcatttgagactagctagggcaacacagtgagaccctgactctattaaaaaacaaaaaaattagccaggcatggtagtacgtgcctgtagccctggatattcaggaggccaaggcacaagaatcacttgagcccaggagttcaaggctgcagtgagctctaattgtgccactgcattccagcctgggtgacagagcaagaccttgtctcaaacaaaaaagaggaagtacagtatgaagaagacaaaatggtgggactaaaaggagatttagcacatgcacttctacccaaatgtgttttgtgtacatgatattaccaagcccatgcaaatatgcatagattatagatttgcttggatctaagccttttgcatattcagtctagttgctatgaacacaaacctgacagagttgacagaaggaaagcaagctggggatcacaatccaacaagccacatctttatttttcacttccactccccagagcccaggctctgaaagactgtggctacgactggttcaatttcccatgagtgcaccaaacagtactatcagaactcctgtgaccaagccaaaagttggggctgactttgtgtagaaagatgtcctctttcattacatccggaaatactgaggagagctcagggatgctttcccttcctgtcctgtgtggaagccaggctgggaaccaatcactaccctgcaaatgatggctacattcctcagtcattgtgctcttggcaaaatatcagtctgaacaaaaatgaaataggaaaaatgccaggaaccttggggtattcctatcttctgagagcaactggtttgagagctcagaaacattgactctttctagccaaggcctatacaaaaccagaggcagaatcctataggatatctgaaggaaccccactctattggaaagataagcatagtatgcacagctttaaaggaggagtttctatttttaggactaaaaaaaagtcagtgcatcttcagcactatctactgcattcctgagaaatgccaggggaaaagagctaacctggctcactttaaaaaatgccctggaagatggagtattaccaatctcttccccctaggggagggccagagctgtagccctgctctagttatttaatacaataacacttctttcatacacctaactgagctgtatgttatgaaaaaattttaaaaaagcatatggaaaacaaatgctatcaacttgatctaaaacagcattcttttctttttaatcttagcatctcagcctcgcccgtatcgcatgaatagcaccgtagacacgaggtaaagttaactgactcaggaaagctcttaggagagcccatcagcacaaaggaattgattcaggctgcagaaagcaaaggaaagaggcctggtggggcaagctggttcaagagagggaccataaatgcattttaaaacaaaaaaaataaagtatcctcattcaagagacagagcaatgaaacaaacacccaaccagagaaaactcaagtagattgtggatagtcggcctcccactaagggtaacacctcaagagagagctaaatcagaacaggttttggaaaaattttattgcattttgtttccatgtggaagcactgacagaattgaaaagtggcagcatgttccacttacttttctgaaaaatcacatggctagattaactttcgccctacccaggacaggattgaataaaccttaactcctacccccaccccaagcaaaagctaaaaaagggggtttctggcaattgcttaaaaaacaaatcaatgtgtgagaattccccgatggtcaatawtcatatttgttatttttgcacttggagggcactccctacctccttcacctctatccaccatcaccacctccttcaaacaagactgacacaggaagtgcctctcaaatggaaaatctattctgtcccagtgccacaggcttaggtgtgtctgtggattctggccaatgggatggccatatgtcaactttgaaagggtggggactgtgaggtaaccccagcatcatggtcatctccatgccaggacaacagtctcccaggttaaaatatagataagacacaggtacgtgcacatttatgggggttaactatcagaaagtgaatccactttgaggtttataaaatgagaaggggatgatggtggggctgtatgtgttgggcactggtgcctattgcagtcagaattcacactgcttaattgacatcttgctggggaagagagggagatggggtggtgagagaggaagcagatgaaacaaaggaaaacgtagcttgcctgaaattgtgtaattttttttcctcttgattgtataaggcattttgaactggaaaaacgtctttcctacacactcttccaaataatcacagggaatataattgctgattcagaatacaaataagacctctttcatctttctccccactcccccgcaaaatcattctacacaccccaagcccataaagtacaaggcaggcaattgctttgcgagttagcaggcaaaccgtgtccacttgggggatgaggtcgctgtgccaaggtcccttctgatcctgcccttctcaggcctcaaggggtaagcatccatcttcggtgaggttttatgtcccatcggggagcccgccactgcctcctgggcagtgggaggtcagggccctcctggctttcccatgcatcccccaccaggtgtccagactattccatccacgcacagcgtcatgtctcactcagttagtagaatgggcacagcgcgagacagcgccctctacattagtcatgccagacagacagcagagagaaaccagaggccagagaagtgattttaaaaggaaaagagagcagcwtcggtcaccaaaagaaatcgaaaggatggtttttaaaaaataaaatgtggggacttttttttttctctgcaatgctcagccattttacttgagacataaaaaaagttttaagagtagttgttttgctttttcgatttaaacattcatgagaacggatgggacggtagtgctgtggtgtggacttgtgtctgagtggccatgccggtcggggtccttcagaccacatactggtacgggtctgccttcccttggtctggcgtggcaaaggggctggcccagcctagagagaaggggtggccaaaaacggctttcatgttcatccattttgtttttttagcccatcttctctcttcctttttcaattgttctattccctgaaaacaagaacaatcatactttcagtcaagcactgcattgctgtggtttctggggagggatgtccgcagcgacaggtgaatggagtaaatgtttcctttttaaagcaacaaagctatctacctaatatatctttctcataaaaagtgttactaaaaaaatttctcctttttttggtgggcactcattcacaagtccctccaagaagggagggaaaaagaagcactatcagcagcgcagaaactgctgcttgtaagtatgccaggccggggtgtgtcgctaagataaggagcgcgtctctccagccctggccccttgttgagctctgcagaggcactcttcagaaactctgtgctgggctgtggatggagtactatgaaggctttggcgtgagaggcctcagagctgttggggagctcgcaatcatcataaccaatgatggccattaatttgggataggttcctaggaagtttgaagctaccatgaccaccttgcagacaaaaaaaaagtaacaaatcaaatgactgctctggcgttgtgtgtctcaccagcctgggggatcaagcagcaccccgcttagtgggcctggtgagacacaaactgagaaggttgaataggagtgacagaccacgaatgaggggagaagtcaccagaggaggaaggaggagggattagtacaggttagagggtggcatggccaggccagccagcatggcatggcaaaggtcctcctagtggctcctttggggagaagcatggcgcagacctatgcagcagctgtcacggagccagcgctgcttcccctgctaagtctcaggaaaaaactggggctggggaaagagctgcttcctccctctctctcttcttcagatggagctggtcaaagggcagggcttgagaacggggcccctgcccagagggaaaggacaggagcagcctggcagaagcctggccaggggtctgtctgctgtggtctctagtaaaggggtgctgggaggacagctgagtctgggtctttcttcacagcctagggacctgggaagggcacaggccaaagggaagacaccccttcccaggtggggcagggccctccagctttctcctttccttccaacacaattctctttaggaatggtcttctcagggaagaacggctaggactggggccgtgagagcttgccttctggctcccccagaccgtggcccggcagtatcccaatggcagactggtcctgaaagaatccccatcgggttccccgtatatcttacgtagagaagttggtcacggttactgcttggatacagggctggatctataccattggctactagttttacagaaactcttttgcaatgacatcatttcttataaaagaaaaaaagttgccaaaagccccgcaaccttctaaaagttgccggaagacccgaataatggtgctctggcagtgggcagcactgtcccttcttttctttgcacgtcctcctctaagcccacaggggaaggcgcccagcagcagtgggaggatgttgtcatcctatgagcccgcttctaatgctgactaccctgaggcccaaaccttcacccagagccctagaccactggtgaaagctgaccctgaggtggcctcaggacaccaggaatcgtaccgggatggctctcaacctcatggctctgcttgttcctcacacccagagctaagtgccaccccttcttcctatgtaaatccccagagaaatgcccatattgcagccagggattgaccaccttgaggttttcagacaccttaggaaggtcaggagacagcagtaggggcaccaagggagtaggccccagtctggcacagccagcagcctcaaagcttccagcgaagatgctgtgggtagatgggaggtgatggtaggggtgaggagaaggcagcggatgaggaccagggctgggccagacagagatgacccagaggccaggtaaaagcctgctgccctgggggctcaaggcagacctgtctcctgactctgccctcaggacccaggcatggctggcaagctgacctgcctgtcccagctgggttagggcaccctgtcaaccactctatttcaagcctgtggcccccagatgggaagggtgccctcagtgcctagtggagtgtctaatgcagtacagtataaaggaagacctgccatgggggggatggaaggaaatgtggtaaaggcagcctttcagccacggctgctgggccgcactcctggtgtgatctgctatggctgccccaaggctggaggacttgtgtgtggatgaagatgacccaagtgtaactgcaaacaaagaactgtkccctgcacaccaggggcctgaccactgggctccagtctgactgtgagcagctctcccagcaacactgaccctgggtcctccccatcyccaggtgtggaaatggtggrcagagccacctgcttaccgtctcatctgtgcagatggagtgcacctgggtcccaaacatcactgatgtgaaaatgaggaagagcaggccctcaaagcacagcaggataaggagaatcactgtggtgggtggagagaaggagctgcactctgaaagagaagcagcacacagggattggtactgtcayccactgcctgctgcccaggctcactgccccactaggcrcccactctrcctcctgcttgcaggccttcattcctcctgggtgccataggtctctggcckccaggctacggtgagaatcatcctggcccacactggctatctctcaatccctcagggaggcctcctcaacaggccaggccccagccagggcttcccttccctaacacaaatcattccttgttcactgcccccagtgccaagcacagtgcctgacacatggaagggcccaggaaggcctctgaagtgaggcatgaacgcctgacgacaccacaggggaccctgctctcctcagagagcacaatgcaggtacacaggtggagaggcctgtccagtcctgctatggccataggttttctgggcattcctgtatgacgtgctgcccctctgtgccccatcagctcacaggcagctgtggaggatcacttggtggctttgggattttaagcttggcaggggcagctgaactactgggtctcagccttgaccacagtgtgaggtaatgcactgcccccgctcccagggacatttgcagcaccgaggccaacagtgccaaaggccagggagtcgaccaaagaggcatgggcccagagtaggcactttcactgtcctggcctccagccccggggacctgaggccagtcctgccatcttcaggcctccacccactgcactgtgaagcagtgagatttgactagaggtatggtttgcttttaagcagaatcttttgtctgaacaaagtctaagtcagaaacccagcgcatggaagagaaaggcaaaggtgctgtggagatggtgggggtgagcagggaggggaaggccctgaagcaaggtggcctgggaaatgccaggcctggaagatggtgctgacagacaggctaggccccttggttggcactcttcacctaaggacttctgtgcctcagtgcagcggcccatgctggctgagcctgggctgtggtttatttctcgttgcttccatacttgtgcctgtttccctggctggaaagatcagatcctggagggcagagtcgggcttcattaattctgggaattaagggagtaagcactccatccaagctgtcctgctggctcccccacgggaatgtcaggaggggcaagggaggtcaaatgtgggaatgagcttggaaagataccaagcaccatgtgggtgacaggtaagaaacatctcatccacaatgcatatctcctcaggtttccctgggaacttatcgatgcctcagaatgatttctcttcttggctccttgtggggcagggcttggttggggtggccaccagcctgatggsctggccgtgggtggctacaagtatgggtggccttgggctgggcagggtattggggagaatgagaggctctgacatctggcagacaccacgaggtacaaatcctggcaccaattcctgatcatgagctctaactacaaggcccatactaatattctgttccagcccctgtgtctttcctgtcctttgcattgtggaattacctgtttctttctgtactggtttgataggtgcctctcccactacacttcaaactccaggagcggggagactttgttttgcttactgctgtacaaccagccttgggacagtgcctgacaacaaaaggatctgggcaagaggtttgggctttctgagattttgttttcctttctgtacaggggaatacttaagaattcatgaaagaacatctgcacagttcggccttggcctggcaggagcacatgggggtgcctgctggacaaagcacctccttcttacctacctctgctgccctggagctggtggaagagcccagggccatggcctattctccctccttgcaaagcagcaagcatcattcctctgtaggctgggccccaggaattaccaatggagtttggggaggtaggaatcagatcagggagtgtggaaccacctccctacccttctttaaatatcaactcaaagtgccctaatcctgggggacagccctctgcccccactcacaccagctcctatggcccaacagctccaccagggctgagcagtgagggcagtaatggtcatatacagtcaactctcaggcctcaactttgggtactgacctgtgccttcccagcctagctgccatagaagctgggtgcctgaagctcactccatcaggaattttgaccacagttaatcaagagcatggctgggaggaccctgaccactggagtcaaccagacagggctaaaaatcttgctccagacctaggcttgaactacagaccctcttgttagctgagtgatcctggaaacttgttcatcctctgtgagccacagcttttgtcatctgcaaagtgggaagcatctctcctaccttgcaggcttgttataagggcgaaacaatgcactgctcaaaaagccctttgggccattcctggctcccagtaggcattaatgcaatggtgccttccagcaccattacaacaacagggacattttgcctcactgacagtctgtgctacccctatcacctgcccaagtctgttaacttgacgagaggtgggaggtgtttgggatgataaaatatcctaattggactcccttgtcaagtaaccaaggccacatctggagtagatctggttccccaggcctagcagaaggcatgtacttcagaatgctcaccaagtgatcaggaacttgctggcgactcacctagatatgcagaatggcaagttctgcacatacccactcacccctaccctcctctcctatctctattgtctgctggcttgacctctgccatttgacttatgccagaattgtgggaagaagtcagcatgtataggaagagcaaaagttctaaagacagtgaaataaaaaaaaggaggcccatggagggaaaagcttaggaaatacaatgttccttgctcaagacgtttgtctcacagattgtgagtatgaaagagccagcccagcaggtggcctcttatttcttttcctccagcatctattgttttccttcaggatctgtgcaatcttctggctggagtttctccctcagtatttgcacatttcagtgggaagcctctaaagcaggaagaattatctacaatcttaatgtaaattcacgattatcagtgtaagcagttaaaaaacaccatcacaaaaaccaaagaaattaataaagaaactccatgtcctagccagaaagtaaaaaatsaatctctgcaagactggaataaaatgatctttgatttaagtgcctcatggaaagacagaaaaacttctctcccagcatggctcccacgcattggaaccggcctctgtgcttgcttggggcctgcattctccctgggcacgctcagtccagagggtctgtctgtccaactcatgactttacctgtcgaactgaagttaaggggctgcattttttcmygaagagagattccagtctctgccatttcttccctgttcagtccataggctttcaggagatttaayaaaatgaggttggcccctggcaccatgaaggaaacaaagagcctccccrccccccactcaggtcacacacccaccctggagcagggaggaaagcctcagcacatactcacttgtccaatcttcttcaaagcaatgcaggaagtggaatcccaccatgatgagggcgtgcaaggaaatgagagctatgtacatctgaaacaggaaaccagtgcagacaccattgttgtgagaatcctctgacctcacgggctcccgggacaggggcactcagaatttgccactcaggaacacttagtcaggacaaggcctgaccaggagggaccagagggccagctagcgattccctacagatccgtctacccaccagccctgggtcaagtgagcagccacctccgggagtacgtggaaccagaacagaagcaagcccgtcaccaggcatgacctgggctccaggcagtatgagctgcctgggcggggggttcaagcctgctgtacctcctcccttgaaaagccagggtgctgactgctgagggcccttctagtccttgcactaagtagactccacctacctgcacctcaggatttgaggtcatcacccaaactgccttcttgagctacttaggtccaacacttggaatgggagcccagaatacagcccttgctcatagctaatcaactgaaatcaattttctaaacgctcaagtgaagggcttaggtacaggcacttgttgagccagagagatctttggcaggaaggcagagatctacagggccaggcagtattctgagcaaagaacatcgtgaatgctgagaattttcaaaggaacaaagtgctccattgcttcatggggggcagggcagaatttgcaagctgacttactgtaaacaggacgaagtacttctggttgttctcgcctacacagttgttgacccagggacagtggtggtccatcttccgaatgcaccgcttacaaacactgaaacagcccacaggtcagacctttagggcatccccatggtgttgggagggccccgggggaacgcagaacccatggctcctgctccactcctctgaaatggcttccttgggcactgccaggggttttgctgggtgtgtgtcacgtggggcttgggaggcagggtcaggaccccaggggtggcagtcattccaaacgggtacagagtcattctccaaagccccttagcttaacacatacataggacggaactgacatggttacatggctaagatagaacctgctctcctgaagtaatggggcttacgatttggtttcccgagagaaaaagaatgaagcagtttcaaaaacttgaccaagtgggctaagatttggagaatggctgctacctatttccccaaaagaccaaaccaccaagggatgggtggaagttctagaagcactatgaggtgctaccagggagggccaggtacctccaccatggaaggacaaaggacagaagagagggctatttcagagcaaggtcaaggacagcaggaggcccagctccaagaactttttggctctaagatgacatccatttagccaaaaaaaaaaaaaaaaaaagcaagcaagcagaaaagtcatttgagtccaggcgcagtggcctgtaatcccggcactttgcgaagctgagatgggcagatcatctgaggtcaggagtttaagaccagcctgacgaacatggcgaaaccccatctctactaaaaatacaagaattagctgggtgtggtggtgcatgcctgtaatcccagctactcgggaggctgaggcaggagaatcacttgaacccagaaggcagaggttgcagtaagctaagatcgtgccactgcaccctagcctggacaacaagagcaaaactctgtctccaaaaaaaaaaaaaaaaaaaaaaagtcatttgagcttaactgtcgaccagatcagttcattaatttgcacatttctaacattattgggataatttttgggctgagcctgtttcaagcttatttgatagcaagcacaaacccgctccccctttggacaattcaaagtaataatatgaaacaagcgtcccggactactaggggcttgaaagcaactgcttcccaaagctcaagtttagaaagactcatttgccatgagaaagaaaaaaaactttttaatctgaggaatgtgagcccatttaattattaggcctagagaggcactgaaataagacagcctgtgacagcagtcatgtctcacaccccccttcgagataaataattacctttctttgtgtgtgtgttagataggatcttcctctgtcacccaggctagagtgcagtggtgcgatcacgactcactgcaacttcccgggttccagcaatccttccacctcagcctcccgaacagctgggaccacaggtgcacgccaccacacccagctaatttttttgtatttttgatggagatggggtwgcccaggtgggtctcaaactcctgagctcgagcaatccacctgctttggcctcccaaagtgctgggatgacaggcaggagccattgtgcccagcaaataattacctcttgaagccactagctatgtgggctctagactgatgccaagtagccatggaatgacacacaccctatagttcaacaatgtacagccaatcactaatcaatgttatttctgtaagccaatgagagttcctgtcaaacagctttgtatcagcccgctcctttttccctttaaaaacctgcttgtaaatggggaaaagactccctattcaataaatggtactggagataactggccagccatatgcagaaggttgatgctggaccccttccttacaccatatacaaaaatcaacccaaaatggattaaagacctaaatgtaaaacccaaaactataaaaaccctggaagacaatgtaggcaataccatcctggacatagggcaaagatttcatgacaaagataccaaaagcaatcgcaacaaaagcaaaaattgacaaatgggatctacttaaactaagaagcttctgcatagcaacagaaactatcaacagagtaaacagacaacctacagaatgggaggaaatatttgccaactatgcatctgacaaaggtctaattatctggcaactataaggaaattaaacaaatttacaagagaaaaacaatcccactaaaaagtaggcaaaggacatgaacagacacttcaaaagaagacatacatgtggccaagaagcatatgaaaaaaaagcccaatatcactatcatcagagaagtgcaaatcaaaaccacaatgagatactatctcacaccagtcagaatggctaccattaaaaagtcaaaaaacaacagatgctggcgaaagtgcagatacaagggaacacttacacactgtcgtgggagtgtaaattggttcaaccattgtggaaagcagtgtggcaattcctcaaagagctaaaagcagaacgaccattcaacccagcaatcccattactggatacatacctaagggaatagaaatccttctaccataaagacacatgcatgcaaatgttcattgcagcactattcacaacagcaaagacacagaatcaacctaaatgcccatcaacctaaatgatgacagattgactagagatgtggtacatatacaccatggaatactatgtggccacaaagatgggaacacagacactggggtctacctgaaggtggagggtaggagggagagggccagaaagataactattgggtactgggcttaatacctgggtgatgaaataatatgtacaacaaacccccaacacacgagtttatctatgtaacaaaccttcacatgtacccccgaacataaaataaaagttaaamcccccccccaaaacctgcttgaacgaaggcaacttggaagtgtgtttcaggctgcagtcctcaatgttggcccaaataaactctctcaattttgcctgcttctttatttaggtcaccagccaatagatgtgctcattgacaattttttttcaattcattattttaatgaattctagtctcctttttattattttgggggcattatttgttcaaaacaggttgaaatgctataaacaaagctttgaaataatacaattatatttccttttaaaagttccttagttcaaggccaggtttggtggctcacacctgtaatcccagcactctgggaggccgaggcaggcagattacttgagctcaggagttcaagacagcctgggcagcatggcgagaccctgtctccaacaaaaataaaaaaattagccgggtgtggtagtgtgcacctgtggtcccagctactcgggaggctgaggcgggagaatcgcttgagcctggggtggggagaggagacggcagtgagctgtgattgtgccaaagttccttagttctgctgggcatggtggctcatgcctataagcccagcacttarggaggccaaggtgggaggattgcttgagcccaggagtttgagaccagcatgggcaacatagtgagatcctgtctctaaaaataagttttttttttttttttttttttttaaaaaaaaaagctcttggctttcagctcggaggcagctaaggtgcaaccttcttcggttgtcccaaatctgggttcatccaacaccagctgcctctaccatgctgctgaagttcgacctcaatgagatcaaagttgtatagctgaggaacaccaggagtgaagtcagtgccatcctgtgtgggcccccaagattgcaccygccgcatgggtctgtccccaaaaaaggttggtgatgacattgccaaagcaattggtgactggaagggtctgaggcttacagtgaaagtgactattcagaaaagataggcccagattgacatggtaccttctgcctctgccctgatcatcaaagccctcaaggaactgccgtgagacagaaagaaacagaaaaatgttaaacacagcggaaataccacttttttttttggagacagagtctcgctctgttgcccaggctggagtgcaatggtgtgatctcggctcactgcagtctccaactcctgggttcaagcaattctcctgcctcagcctcccaagtagatgggactacaggcatgtgtcaccaagccaggctaatttttgtatttttagtggagacggggtttcaccatgttggccagactagtctttaactcctcacctcaagtgatccccccgcctcggcctcccaaagtgctgggtgggctcacaggcgtgagccactgtgcccagccggaaataccacctttgatgagattgtcaacattgctctacagatacagcaccgacctttaaccagacaactctctggaaccattaaagggattctggggactgcccagtctgtgggctgccaagttggtggccgccaccctcatgacatcacagatgacatcaacagtggtgcggtggagtgcccagctacttagaagcacaaaggacgatatttcaataaagaatcatttgacaactaaaaataaaaataaataaaaataaaaaaagttccttagttcacaccagctttcctctccactagcttctataactaattttaccttgggttcttgaaaaagtgcagagtgggcaatggcaggtggatgctggaggaagggctgggcgttggggccttgctggatcacactcacaccacagtgctggctaagctcttgctgaccagctggaaggacagggaaagcataggagcagctctgctgggctggaggtgtgctgtcccctggattccagaacctggaagcaaagactacccggaaacagtcctccaccacggtgctcacttgtagcccaaggagaagatgtgtgcttttcaaagcctcgcatgaactttggtggcaatgcagacctgagtccgctgagctaccttggtcaaactggctaactcggagcctctagtttcccttctgtacaaaataagtttattataaagaatacatgagacagatattgtgcctggctcagacgatgtgtggattcatactggtctgcacccttgctcttttccacaacttcaaagggccttactaacacaggcatgttgggaatgggtatatctcagacatgctggcctggttccagaatttccctggggaccaggagggcaaggtaagaaaaggagacacaaaagggacatggaggtaacaaagagcaagagaagtaccagcaagtccattagccactctgcttctctctctctgttaccacttttaaaaatacacatgaatatacatataagtatacatgcagaatatatatttttaaattggtaatgcctgttcccaatacacaattttaaaagtgcagataagcagacagtgcagagtgagtactccctgcatcctaggcctcaggcaccaggtgccatgctcccaccatagagcctgtttctggcatgttcttccagagaccagcacctctgggtttcttaatccccttcccatctggggaacaaactcctgagggtaaccacctccctgctcctggctcctgagcagtttctctttcatctgcacttatttttaaaagggttttcaagtgggtgctcttgagacagtgttggctcagcggcagagaggtgccaagtggctggacatcctctgaaagctgcccaagagtttaaacaagctcttacagcaaagctattcttccctctcctcccagcctctctggagacaaggcgtgaatgccaggaagctgggtttcccaatgggctgagtctcgctgggcttccaaattagaaaaataaacaccgcagggagagtgagtacagcctgctgagggccacaagtgttggtctaaaatgctggtccccgagtttcctgttttcaaagatatgaaatgccaaacccacactacccttctccttgggccaggtggtatgcagagtgggtggggtgaggcccatcccacgtggctggaggcactgctcagaggctgagctgctcacagaggccagaagggtgctggggctggagcctggagcaaccaaggacagggaccagaggcagatgttgaagggcagtgaaggacataccacaccctgccctgctgtttcacctctggcaccatctgccatgaggaagaaaaaatgtggacctccccccacaactcctgactcccaaagggaatcaatcacctcagagccagcccttttcccagcccccactgcatgcacatgggcagggggctcagcagtgttccctccctaggcatagcagggcagcccaaacacaaggccaaggaaggctcacagatcacagactaagagcctcttccacacacttgctcagccatcttccccgttttggctgtggatggcctcaacacctgaggccctttcttcattctttccacttggcaaaatccaccctatcctctaagggtccttcttgtccacagtcctctcctggcattcctttctggcactaattccagagtctcgtggatgagacgctgtaagctggtgagctccatggcacagggaccaagtgtgcaaaaacaatcacagaaaagaccaaatgccctaaatggaggtatctgcatcctggccttccaggtttcccaggccccttctatgtttctttgtcgtcactgtagaagaaggcagatgcttcccttctccccttcctccagatttcctaccattttttcaggcctcaaaccttggtagaatccaccaagctcactggctcatatgtattcagtttctctggggcttatgtgtttcctctccaaggaggtatgagggcccttacttggtactcatccccaaaggagctggccgaggctctcttgctcaccctgggtgatggctcaacatggaaacatagccacattccatggggttctgtctctccctataccagcacttaccaaactatatcatggtggagaagtgtgcctgccctgcttgggtggcaggctcctagagccagggccaggtctaatccacctctataagctcagagtcgagctcagagccaagcccagggccccctttagcaagggtcagctgaatgaagtctctgacaccacagacaggaaagagcaggcctggaaaatgagttcaactacatcagactgggatgctcatgtaggaaaatagtaagaaaacagcaagaaggtactaagtgagccatggcgtcacacacaggttttcattttacccctcactggctatgactaaaattataagcaaaaaagacatctataccacatcctggctccagctcagaaacgattttgggaaggacagtgcagtggagtggaaagaacaggggatctgagagcaggtcctcattttgggctctggtcagagaaacttaggttctccaatcagcctcagcagaactactctgatctcttagggtcattgtgagcaccaaaaatgtatgcaaaatgctttaaaaacaatactagtgctacatagattttctcagtaatcataaccatgagaaagacaaaacaagaatctctcaggggctctaagcagcccaggactgtcttagcctcagtgtgggtgtctggggtgtggaggcggggggctgccaaagtcagaggtctctccctcctcatgcagaagaacctagcaggagtgtctaatcttttgtcttctctgggccacactggtagaagaagaactgtcttgggccacacaaaatacactaacactaacaacagctgatgagctaaaaaaaaaaaaaaaaagtctatgcatacatgtcctaatgtttaagaaagtttacaaatttgtgttgggccacattcaaagccatcttgggctgcaagtggcacacaggccatgggttggacaagcttgaaagcataagccaaatgccatggccatccacattagcataaatggctcctcccacagagtttccacatgcttccatggttcctatgaacaggagatttgacaccaggatgaaagagcgtggggtttcagagtgcttctcccaggaaggaaagacccaaccacacaccatagggctggaaggaacacctacaggcccaaggtctaggtgtatctgtggtatccaccagagacaagggaatggagacagtctcaaattctaaaatgctgggcgcaaacgtatgtgcacacatgcacctttgcctgagcgggcaaggtcgacatcaactttaaccaggcaggcagcctctgggctcaacgactataaacaaacccagtctgtctggtatgctggagattctgcttatccaaaattgtgggtccccagatggcctgggccaccacgcaccatcacaaaggagcagttgtcagcatgcatttctgaggcaggaacaggcaactctacaggcatcctcactttagttcatctgaatcagcagctcttgctttgcccaagctgatctgtttactagcacacaagaatacctcccttggatcatcctggggagagaggcaaggaggaggcagtgaggaaaatgccaggcggtggaggcagctgagggctcagggagagaagagaaaagaatcaccaaaagttcttttctataatacaaagttaacacctccctgttctggtccagcctttataaacccagcatatccctaactccatacacattcttctattagcaatagcttacgcttgttgagctaggtgactcacagttactcatacttaatcctcacaacaaactacaaagaaacaaccctttttacagaggagaaagctgaggctcagaaagatgcagcacctggccgaaggtccacmgtgtagcaagcgacacagctgaacttccaacaccaaccactccaacttcaaggccagagtctgctccaccataccgggctatcctgagaaaccacataagcaagctgagctttttaaaaaaaatctgagtgatggttagaaaacagctggctcctaagcccgagagtggcaagaaaagaccagactgaagcctccatctcaggcacaggaggcaagccttgaattagatctcagaagcaagctcacccacagacagaaaccccggaggagctagcaatcaccattggcccctacccaggctcctcagccctcaccctcaagctttgaggaggtctgcagatctctctctttcagacagaaaaacatacatacaactacataaagttacatgtgtcatccccaaactggagttcctgtggaaagagccctgtctggacctggagccagaactgccgggacccaaacctgtctctagtactcactgctgtgtgaccgtggagcactcaacccctttgaaccttaatttctttatctagggaggccatccctgcagcaatcccgatttccaggggtgagtaggaagatgaaaatagatgactgacgctgaggcagggcaggctgaggtgccgtgggcacagcacacaggtactggggagctgactccggaatctgagtgctggagactggccactctcctctgaaagacaggcagcaaggccaggcagaaatcgccgttcagatctctcacacacccaaatgtctccgcaggctaagcctgacaaggaagatgtccaacacctggagcagattcagtcctctataacccctccccacccaaacacataccctctgaaaaggggaccaagtgatatttttgtatttctgtaattcagcatgtaaagtttccttgtatgtcagtcgaggtggctcacacctgtaatcccaacactttgggaggctgaggtgggaggatcacttgagcccaggagttcgagaccagcctgggcaacaaagtgagactgtgtctccctttgtgtgtggtggtgcatgcctgtagtcccagctgctctggaggctgaggcaggaggattgcttgagcctgggagtctgaagccgcagtgagctatgagcttgcatgacagagtgagacccagtctcaaaataaataaataaaatttttttagagacagggtctcactttgttgcacaggctggagtgcagtggtgcaaccttggctcactgcagcctcggactcctgggatcaagcgatgctctgccctcagcctcctgagcagctggggctgcagatgtgtgccaccacacccagctaattaaaaaaaaattttttttttttgagatggagtttcactcttgttgcccaggctggactgcaatggcacaatctcggctcaccgcaacctctgcctcccgggttcaagcgattctgcttcggcctcccgaatagctgggattacaggcatgtgccaccacgcccggctaattttgtatctttagtaaagacagagtttctccatgttggtcaggctggtctcgaactcctgacctcaggtgatccgcccgcctcagcctcctaaagtgctgggattacaggcgtgagccactgcgcccggcctaatttttaaatttttttgtagagatagagtctcgctttgttgcccaggctggtcttgaactcctaggctccagtgatcctcctgccttggcttcccaaagtgctgggattacaggtgtaagtcactgtgcccagccaataaagtacaacttttagctagatgtcttctcatcagaaaaacttaataaagaaacctgaaaacaaaacagaaaactgaccacagataagatggggaaatggctttcttttttggtttaattctgcaactatcataacctttagaagttttaaaagaaagtcttcattcaaggacaaccgcttcatttcaagtcccagacattcacagaatgattttctaaagctttttctcatggtacccttgtaataaagctgtgaggtaggaaaagcaggaatcccctccattttacatatataaaaacaaaggccctgcccaggtcctatgtcaggtgtggcagagccaagtcccgggacaggtgtcctgaggccaaaccaaatgctctttgcaatctagagggctcacagggaccaggaaggagactcacagtgatcactctctgcccagagcaggggacayttggaatcccratgctgacttggcccctgttggggaagtgtrtgctactccaggaggcaggtgttggcrgggatggagggaggcaggacagtgggagaagagagraggcgagccccagtgagtgtacctgcagtggtgggctcggtcgggcttgatgctgcagcatttggggcacttgtacaccacctgcccaggcttcaactgtaaactctcgatgaattctttagtggcatttcctttgggcactgccccctgtaggaaagatgaaaggtatcagggttgggctgggggttctatcagctcyaacattctacagtggggatagttatttgaaagcagcaaccacacacacacatggacaggacactttgataccaacaacatgtggactctgtgttcagaattatgccaacattaaggaatatttattgaccaaaaatttttctgaggagatgccattaggccacattaattctttgatttcttttcttttctttgtttttttgttttgttttgttttttgttttttttagacagagtcttgctctgtcgcccaggctggagtgcagtggtgtggtgtaatctcggcttgctgcaacctctgcctcctgggttcaagcgattttcctgcttcagcctcccgagtagcttggattataggtgctcgccaccacgcccagctaattttttgtatttttagtagagatggggtttcaccatgttggccaggatggtctcaatctcctgaccttgtgatccgcccgcctcagcctcccaaggtgctgggattacaggtgcaagccaccacacccggccaattctttgattaattttctacactaaacagtgacattgttcctgattactttgtattttcattttactggaattattttaattgaatccattctctcctatataacagcaaggatttggctcactgactattttttggtctatattaaatttcctgataacagcttctccctttctaagtttcactggtgagcaacatgtctaacagtttccccagatcaaaatttgcagctccacattttaatgggttgtttgctgggattaagttttacttttaccagtggtattgttatgaataattgtaatctatatttggttcttagtgaatccataagcaactgggagctgctgccctcaggtatttgacttgctgtctggccagagctgccctctgatttgctcttccacctgtggagtatgcttgtgaatacttagcgttctttagagccaatggcagagccaaaatgccataagattctgctctggctgtgcacccatccaaacagaaggaaaacaggcagtgcacaggcctaagtagggtcttaataaccaaccttcaccaagagcctgcttggtgctgagccctgtgctctcatgctcactgctatggactcaggaatcacaggaggtccctgcttccaagacttatagtgttttggaggctgacaaacgattctagtaaaagaggttacatgctgtggaaggtatttgtgttgagggagcacagaggagccagcagccaattaatcaggggaatcagaggagttttaagtagtgatgttcaagggttgtctcgaggaatgtatagaggctggctaggtagacctgtgggagaaaagggattccagcagaggagggcatgagtaatgacaaagaggtgagggtgagcatggcatatctgggagacagggagaatatcagtgtgctgaactgtgcgtatgcagtgtcagcggggaggccggaccgatgggccggggccagcccatgtggtgcgctgaataccaggttgggatgggatttttctttataggtagcctagagccattaggtaacactggtgcttcaggaagagagctcagttgcctgtgttatgtggatcatataagaagagggagagatgaaaattccagacaccacgtaggaggttattgttgatggtccagtaaggaaaaactgaattacgaggatggagcgggagaagtggagaggaaattctgagatctgaatctacaaatgatggtagggaaccaacttgttattgggtggtggagagggtaacaaaaagggaggagatgagccccagtagggtttccatttttagcagctggtaagtggtggcacgtcaaaaccattaagagagcagaaggaagttctgagaagagctgatcagttcagttagggtatgctgagtctgaagtgcctgagggacacccaggaaggtagctgggaatataggtccaagaagtaagagagaagatcagtcagtggcatagcacaaagggttagagctggcttggaagtcccctggccttgctttaaatctgagctctacatttgcgagtggtgtgcccactgacaggtgggcctatctatgccttagtttcctaatcagtgaggcaggactcatcttatctaattcccagcattactgagaaggttaaactagacatagacaacttgcagaaagggctcagatggtactgccacagataaagtgctcagtaatatggtggtctgttttctgggtctggtgttggcaccaatgctgcagcttcaaaaaactacagatgcctagactcttatgcagcactactataaaaaaactaccagggagtatggccctgacttctgcattttttacactccctagcagagtcttctactctatagccagggctgagagctactgtgccagaccagaaactccatgattgggtctaccttgatcagcaccagatgccctggcctggtacacagtatgacacaaagtgaaaggtaaaagatccagcagcttccagcaaaggggtgaaagaagtagtgacaacagggagccaaggatgtgccatcctgggaactctgcctgcttggcccagctcccaaacaagaaccacacctgacacgaggtcaagccacagctatggcattggactggggcactcttccctccatgacccctgtgtcaggtctacttcacagcaagctccactcctcagtaggcacccatgagataccacaatcagggaagtcagtgyaacatcagaaggacagaaactaagactgtccccacattctgcatgtgcccagagtgaaagtacagtttattagggtgggcaaattgggagtttcagatagagcaccctggtctccccagagttggaccgatggattataacaggccaagtgaggggttcccagggcagaagggatgaagactgggtgtcagaacctttcctataaaagaattctgggaagggaagagccactgaagaaacagaaaaatctttaagtgctggaaatgcaagggagctgtggttctgtcttgcactgtgaaaatgactcacagtggattaagattccagctaagaaaactgcagagacaagtcaaccaacaactctctcctgaaggtctacaccatgccgaacactgtgggaagtacaaagaagcgatgggagcccaggcctcatacagctggtgggtggacaggtgcagatgcagtgaggctgctgaggcagagcacctagagaaaggcatggccaccagtgcgtcaggagctaaagggaggcaasaggactgaaagtggggatcctaggaaggccaggaggatcctggtggatactaagcaggagaggagcacctgggaggaaaatcagttcaagcacggtcctagaggtgggcctacagatctcctgtcgtctgctcttcacatgactctttgctgggccccagcccttcccctgctaagcctctgcttctcctgcctcagtgaggacctattcactcctgagatgggcagcacttggctgacctgtcattcagagcaatgacgtgcttccccactgaggatgaggagccaaaggctcacaaggagcaggagacaaggaggcaatgagaaagtctgaaggaacacttgtccacatgcaagcgcacctcagtgctgcaggctcagactgagagtggggtggaaatgaggtcctttatactctttcaactctctaaagcatttcattactttttttttttaagttaaaacagtagaaaaaaaatctggtctgcaaaatgtagtcagatgtcagaaaagcctatgacagaaagttcaaaagcaaacacattttggtgggcaaggaccacatggtatctacaataccagttagaataccgttttggacattaaatatgctataaaaatacacaattattgacacaggaaacatctataacagattttatatacatatacacatacatataaataagaaaaaagaaaaaaaatgtgtggtggtacatgtctgtaatcttagctacttgggaggccaaggtgggaggatagcttgaggccaagagtttgagagcagcctgggcaacatagtgagaccctatgtaggaggatcacaggtacttttaattttcttgactatatttatgaaatattctattagaaacaagtggcttttgcaaagaggaaatgatccattaaaaacaagcaaaacaaaaacaaaaacaaaaacttgaggagccacccaaagtaggaatatgatcaactttcctgaggcttgtaaccaaaatgtcattattgtctcaccttgagacatccaacgggccaccagtgaggcactgtgaagggccagggtctggaaggtttcatgaaggtgaggcagggcccagaccacatggcataagtggatttccaagggggcctgggaagggcactggtccaggcagaggacagggtctcaagcccaaagggccttatttttcattattttttcttttttttttgaaacagggtcttgctctgttgcccaggctggagtgcagtagcacgatctcagctcactgcagctttgaccttccaggcttaggtgatcctcccacctcagccgcccaagtagctggaactaccggcacaagccaccatgtccagctaattacaaaaattttttagagacagggtctcactatgttgcccaggctggtcttgaactcctggactcaagcgatcctcctgccttggccttctgaagtgctgggattacaggggtgtgagccattgtccccagctgtgttctctttcatgtaaaaagtaattgagtttgggcaactgtgtggatcctaaaaccagaaaaccacaactagaagttactattgtcatgtgtataagagaaaaagtgcaaagggacatcctttcccccaaggacatgaagcaacgaggcttgagttttcctaaattatggcccaggtggtttttttgtttagtcccagtttttaagaaggtcccagccaccagaatgtactgtaagccccaggggaccctgtataaaagactgcaagaggaaacctctaacccataaaagggaatcagagctcttgtttggtattctcattacggcctatttattccagaccttgagtagagacatcattcagcagctcagcctttctaaacatgtgcccccacaatgagactccatttgcataaatctcccaaaaggcccatctccattcaggcagggccccacccatccaaccacctgagcccacctctcagagccagagagcagctgggccagcccccaagactgaggagtctgatgcatacactttccagtctctgcctcaggcaactttttgtttcattcttttttaaaatgcatattatgctcttttgggctcatctccacagatttcagagctctttgttattagttcatggtaaggaactttgttctttacaatcctggacagacagcaggagattgaaggcctgagacatttttgtcactgctgtcatgcttgcattactgagaaatgcctatccccctaccccacgttcttacacactccacagggatgtcttgaagcttccacactgctgcaagcctagcaggtcaaaatgcactgactttatctctctcatttccaaagtaatacttgttcatggttttaagaaagaaaatacagatgaaaaagtggaaaaggaaaaattcactctgatttgatcacccaagacaagtactaccaacattctgaaacatattcttaaagtcttttctctttgtactaaagtaaaaacactttaaaaaatctataggctcataaaaagcagatcacaaagcttccaaaatatacatttggccccacagtggaaccaatttaaatctgttttaaaataagtgtgtagaagctgttaaagcttttctgctctagtcatggcagaactccttccacattctctgcacagagctctgagttttcagtgcagaaggaacataatggtacttgtatgtgcacctgtgtgtatttaggggtggggtagggtgtgatgtgcctccatcagccattccccttagtaggtagcccaaacttctagtaccttccttgacccctgcccacttccttttctattttggagcaaattaaggctgctagggttaaatccttctcatattcctcatctcactgcctcactgtccctggactcacgggtacccactgtcttggaagatgaggctcaagtcaatcctggccctcagggcccccataccattacctccaagctttctccttgtgttcttagcaggctctgagctctccctgccctttcatagctaagctgcttgaagccttgtgcacctgatgtctctgctgacctctcccttactgttcatgcacctgtcccctccataccagggaactgttcgcaccaggtcactgagcaactcactgtggccaaatccaaaagtcaattcttagcccttgtcttccttggggtctcctcactgtccttctccctgtctgtggggctgtgcctctcccctcctcttggaatcccgcccatccaggctactggtgttcctcagggttcagggtttcaccccaagactccttccttccctgctcattctgcactctctcctgaacaatcttcaactctacttccaccatcactcggtgataatgctccaatcacaagctccaactcagacctcttgaatctgcagatctctctatttggctgtcccaaaggcactgtgcacagctaaaacggaacctgctgctttctccccaaactgttccctcaagtctccctttcctggcccatggcatatccatgtaccctgtcacctggggtagaaatccagtaaccaccaccaattcctctaatcctcttccccacatcccattcactccaccaggttaattctgcctcagactgtgccttgaatcccatgctctcccctccatgccatcatcatgccttagttcagcccatcatcatctgccccagactattagagcatctcccaggtcttcctgcctctagtctctccctcaaatcctgcaacccacttctatcctttctcccaactaatttccagagtaaactttcttaaatggaaatctgatcacattattcccctggcctaaaaccttcactggctccctagggaccatggaccagagtccaagctcctgggcagggctcttgaggccaccatatctcagctctggactaccaatccagtgccacctccctccgtaaacagtccctccctgtggtctatttggagtttcccaaaggcaacattctaagttttcctttctaccctcaggggctccatttaagcaccaaccaaaccctcacccgctccaacttgccaggcacctccttgcttctagcacccaaattaaaatgcacccagggatcaccttctctgctacttcctcatggccccaggccacatccaaggcagaacccattacttagcctttgtgctaccacagcttgtatgtatagtatggaacacgtcatttaattacacaccatctctcctacatcacaagacattcctggaggacaagacaacatctgtcaacttgtagctcagcaaactgcttagggcctggcacgaagaatgtattcaataactcaagctgaataatgatacatttattgagcacttacaggccaggcatagttccaaatgctttgtgacaaaactgtatgtgttagttacttctgacaacaaacctatgaggtagagattgtggtattccccattttaaacatgaggtaacaaaggcagggaagtcaagcatcttcccaaggtaacacagctaataagtggcagaagtagggttctgacccagacaatccaagtctagaacctatgtcactatcagaagacaaacatatcattaccaggtatttctgttaagtgacttggaaaaaactttattttaattgcctgatgtcacaacatcattctaccaccaccaactacctcagcacactagtattaagattgaaacaggcctaggatactaaggctgtttcaataagtatctaggataatatgataatataaaaagaaacaatggaaagtagtggagacaggttctaaagaaatgccaataatttcaaggactcaacattccatccatttcaagcaacaagaatgaaaacctgcttaaattgtttcagggccatgggatcaaagcccgtgcacacccaccagtctgggtagaaactccaacagctctcccaggagcatggtaaccaaccccaggcctgcatcactggccatgtgtctcctccacagaaaagtaaaaggtagctagttggtccccaaatgggctgctttcctccctctgaagccagaaagcttttcctgttgggatttataagttgctcgggggcaggggtgagaagttgcctggcatgagggagaatgcagcacgatactccaatggaccctcaggcaagtcccctaacctgatgcagtgaatgtgccaatacttctgggcaagatgcacaaggcgcttctctggctgcatccagcacctggcctgctgttcctcttctatgttcccacaggtccaacatcatgctgccatgctacccttccaggaaatacttgccacctgggctctgaacacagcacatgctctgtaaggctgttgaaagagactccagaagggaataccaattgcatgtttgaagtgagccccaatatttccactcaatgacttttggcagctgaaatgaaaatcagtggccggtagtggtctgagatagtcatggaggtctgtttacagcaaggtgttcacagagtgggattcaagaggggtcggggtgggggagcaggtagacagacgaattttcttttccttaacaatgtggttaaattgactataaatccagtcatgcacatcatgatgtttcagtcaatgacaagtccctcaagattataatactatgtttttactgtaccatttctatgtttagatatacaaatattatcgtgttacagttgcccacagtcagtattcagtacagtaacacgttgcatgggtttgtagcctaggaacaagaggctattcaatacggcgtaggtgtgcagtaggctgtaccatctaggtttgtgtaagtacagtctatgatgtttgcacaatggtcaaattgcctaacaacacatttctcagaacttatccccatcaagtgacacatgactgtatattcctccttttctcaagtctcagatttgaaataatttatgaagttaataaacgataagatccaaaaaaggaggggcaaaaatatactgatcataagggtttatacaattactgtcattgtgtaacacttggctttgagcttcctggcagccaggacaaaaagaaacaatctacatctgtcacgtttaagcatcttctgggagacagacattgtctcagaaataaagaagcccctcaggattcctgagggagctcagagaatgaggaatttggaaaagaaaaggtggtgaaaccaagaaatgaggaaaagagagagaagggtagtaagataagggtttctgagtccagtttgtcttcaagaggctgcctcctcaggacacatggagccattctagacttataaacgtctaaagtgtttccagaacacagaaagcccctataatgacattacacaacctcagagtgggcaaggagaaggcgtcaggagaccaaacatgagcctgacttgtgctcctgcccacacccatgctgcctccaggccagcctgcctgtcaagtgaggcacctgccctgctcctctgtccatttgtcctcctccctctgtttagagacctgtcccttttgccctatttctcaaacggctgtctcacttccaagggggctgtttacaaatctgtgagtcatttcccacttcccttttcttttcaagctctatgtggacctatctactgctacattggagtaaatcactgaaaaatggtccagaaggctatagtggttgcaattgttcagatattacacttggaataattattccaaagctgaaagtggtaaagtaactgcttgagggagaccacaaggtttwtatatatatatatatatatgtatatatatatattttaaactagtaatgataacaaaccaaagtgatacacaatgcatacattgcttataacctttggatataaactgttctgaaaaagtatgtgcaacatgaattcttgagatataaaacataatcccattagggaactccttagaaccctgcagtgaccactttctaaaaaaagacgactgcaatattaataaggaacccctaacttacctgcttatcacctgggcttccaactctgctccttggaatcccagggtgccccagcagtgccttaggagctcccgcttctgcagccccacctctctgttttgcatactgggttttgcatgagatatcatgtgctggggatgggcagaggcaggtggtagcatgaagaccctaaaatagggcacatctatagaacatgctctcagttgcttcccttactaatggtagatatttgacaaattcttcatttttggggccagttatctttggggctaccagcaaaatacacctctgggaagctaactgttgtttaggatacagtctgtgcctctcactgctttgggattggaagctggcaacacaccacagtgagaatcatgctgttctgcatccactgcaagggccagctggccaaggtccctggagaggctgtacgcttcaatgcagtgggtaaagaacccatgtatgtgagggcagtgggaatgccagggcagaaggctcccctctcactgcccaacatccagttccctgttttcacatgccttacagaaaccaatgacctccacacacactctctccaaccctgatcctccatcagctccagactgactatctactgcccacctagcatctctccttgcacataatatagtggcagtctgactagaacataagccttgatttctcctccaaaatcaataatgggcaccagtgctccccaggctgctctagctaagactctggaaggtatactctccaatctctctccattctgtcagttctgaactgcattctcaggcctggcctgagaggtaaatgtgagggaaacgtgggagctctaaagcattcgaatacccagggccctgcccccagaccaattatagtagtctctgggggtgaggcccagccatcagtacttttaaacagctctccaagagatggtacaggcaggattgaaaactaatagcttaaaacagactccaaatccaacagcttctctctggtttcactgctctcactttggtccgagccacaccatgtcttgcccggaccactgcaatacctctagtccccctgcttctacttgtaacaccttgaacctccattgcaagcacaatgcaaatcagatcacaccctgtctctctgaaggctgccggctgcacttagaataaaatccaaagttctcatgaggcctaccaggccctgcacaatctggcctctgaggccctcttcacctcttccaaccactcttacccccacctaccatgttttgatcaccctggtcctagtcctgtttctcagatgtgctgagcatgtttctgtctctgggcctttgaatctactcttttctctacccttggatcttcgtctgcctggcttgtagcttcatgccattcaggtcagctcaaaaggcaccacctcagagatgacttcttagaccaccttgatctaaagtagtccccctttgccccagaaagtcaacagcacatcatcctggtcactttgtcttattgtctttaaagcacttaccactttccaaaataccctgttcaatcatgtccttcctacctgaccccgtcactacaaagtgagcttcacaagggcaggaatttgcatctgtcttgctcatagctgtagccattgctcagaaagcaatctctcacagaatgggcactcaggaaacatggctattcattttattcccacaccagtgccactcctcctcactactgccagaaagagacttgtaaaatgacagttttgtttaagatgtgttgaaaatccttaggggccctaaactgcccctcatcatcaaactcccatcctcctccttaggcacctcgcccacatcaccaacctaaatccattctcttcctaagttcccaccactcctggtgcctagaggagccatgctcctgcattcctacgtctctgtgcaagctgctccctctgcctccttcctgtcctcaatgtccactgctcggagaagagctggcttgggcatcgcttcctctaagcagtcacctctatatgttgattaatctctccacccttgttctcccacagcaatccacatttctttctgccaaaccttcatcacacagggttatcatcacctgtcttttctagacagagggcatcttgagggtaagaacagtatctggggcttagtagacagtaaactatgaactgagcaaagcaatgttttttacttctatatccccaatagcaatggtatcataaacatttctgaataaatccttaacttattttcagcatgaccatatagatgctgctgggaaaactctttcatatccttgtgtttggggacacttaggattatacccatatacatggcttccctcaggcgatggctgtcccgcatgcagtgctaaatactaggcaaacaggcccctgcctgctggtgtgtttggtctccctgaggcatgcgcaggaacagagatgctgtctggaccagtggctgatatgtaattgagttgggaaagctgctttcctttgggatggattaataataatctaccacctgaaccggcaggaaatggagccctttgagacaagaactagctcaggcccattatcatcatcactactgcactttccctggggctcacagaaacaaaatctgtatggccagtgtcactgctagtagcagtgctttccctctcttaaacacacacgtcccacgtactgaaacaagccacaggaggtctttatcaaataatgtattctcttgcttttcccatacaagaaaaggaacagaacagagggtttaataccagggtgcacaaacattcaatagccacgtgcgcagcttggcatatttagctaagtcattgagcagaacactactgctttacccacagatattcaccaagaggcacttgctgcggcctgaaacaggcttgtccagcttttcaggaaaagatgcacctcgcccaagcaaagtgaaggccatttccgtgcaggttcctggaattggatgtggctttaatttcaagtccacctagctccagcactgtcttcactgggaagcccaatcctgacccaaccctccagcatgctttctgctctgatcatctggccccagtcttcaaggttayctgtgtctttttaaccagaggccaggtttcccccagaccaaacccctcccagagcaggcccaatgaatgtatatatccatgtacttatagtatcatttaaccaagacagataggctgtggtacaggtgttgacccctcttccctggccagaattccacagaactctgaacaaggcagagatctacttcctcaccctcccctggccctcctatcctccaagttcccaaggtccagggggaacatgcaggctgtggccatgccagagccagaggaggagagtgtgggctggtcaaaacaagcccagacatactcacgggrtccgtcagcatggcccggcagtgggaggccagggccaagaaggccagcaggttgaacacaattccgttgatgatgctatacacgtagtctcgagatggaatcagcatgacaaagaggaccacgaactccgcatagaggaccagaaaccaggtaacgatggcacaggcgatgccacagccgtcacggataaaccacatggttcccacaggaccagggtaggggggtgggacacacttctctggctggaggtattctggtttccgctcaatgtttcggaagtggtgggtggggataagcatcataagctattctgtccatactggcatctgaaagagagaggaaagaatccagaaacttggtgttgtcttgtcatcaaggaggtttgacaaaattgctcccatagtgagttgtgattayttatctgcaacccctgtgtgcaaagccacctaatcaccttgttcatttaaaacatgagttctcttccctgattctgagagtcaatttagccttcttgaaacagggccttcacatgacagataataaaaagggagcctctaaagggtaaatgccttgcccaaggtcagccagagcagaagcaggtgacacagcctgccaatttgtttttttctttttttgagaccaggtggggtctcactctgtcattcaggctggagtgcagtggcaccrtcttaggtcaatgcagcctcgacctcccacctcgggctcaagggatcctcccacctcaacctcccaagtacctagaactacaggcacgcaccaccacacctggctaatttttatatttttttgtagagatggggttttgccatgttgcccaggctgatctcaaactcctgagctcaagttatctgcccacctcggcctcccaaggtgctgggattataggcgtgagccacggcacccaggccagcctggcaatttagaggtggcactagaacctaggtctccttagttattagagatctactgggtagacagtacctcaatagatatgttcaaattttgacttaaaaggcaaggagaggcagagagaaggggagagagttcaaagatgttttcctaccacctggctgaggggtgcttcatgtgccattgtttcctcacctgtgaaaacacctacattccagccctggccacctcctcccaggattgctggtatgaaggttgagggaactggtggaggagcttgtgacgaatgatacagatcataacactctgtacacctcacaggttatgcacatgtattttctctaggaaatacatccattccttctgaaacaagtgctgagcaaagcactctttctctctagaagctgcaattcaagtctctggagacagcaatgaaacaaccaagaatcaatgactaatatctatccacagcatgtgctgcaagacacagaaagcatagatttcccttctcttcttttttcttaccctctttggcctgttgcatcaccaaccaggtttctcagttagaaactgtgatggctcaagctccccaccagatgtaggtgccatggaaaagccactcatagcacaggctacaacacaggcaagaaatatctctgtcttttgagaactcaactacacagcagaagaaatcactcaaaagcagcactggccatgtgtgcttcctgaagactatggctctgaagggcaaaggcaggctttcggtattgttatgaacagtaaggayatgtccaaaaagctaggagggcagaccagtaactactattcaaaatgacagacattctagagtcgaaagttgcacagactaataatgaagaataaggacagggccactcctcccaaggtggcagagaactaatggctgaaaggcagctaaatgtgctattacgtatttgcccaaaggaatatcgactcagcaaatgcagtcactatcactgtgttagggaacaagaagtcatgacacatagagatagaataaccatctcggccgggcgcagtggctcacgccagtaatcccagcactttgggaggccaaggcgggtggatcacgaggtcaggagattgagaccatcctggctaacacggtgaaaccccatctctactgaaaatacaaaaaattagccgggtgtggtggcagtcgcctgtagtcccagctactggggaggctgaggcaggagaatggcgtgaacccaggaggcggagcttgcagtgagccgagatcacgccactgcactccagcctgggcgacagtgtgagactctgtcttaaaataaataaataaataaccatttcaagtagagtaaaagtcttggttcctggtggtccatcaaccaaaattttctaacagagcaatcctgtgctatccagaggacagtggcaatgtagtcctgccagagacaacctaaatgcattaaaagatgcaggcccaccttctgaagcaccaaacaggacagtagaagatcggagatcaggaatgtctgggacctgacctgtgcccagcaaattctaaaattacaaactctgttcaaggaaaaccaaagaaaagaaaagctgacatcacacaatgattcaaaagctgattgaagctctacattttgacaacctccagttgcaagcattcttttggtttttcctactgccatgcagatttatatttatatcacctgtgttctcacaattactatttaagctcaaaaacaataatgttttgttggaccacagccatgtcatttgattataaattgtctctggctgcttttgtattacaatggcaagagttgaatagctgtaacccacaagccctagacatttactccctggctctttatagaaaagtttgctgatgcctggttctaagcagttgttggctatcaaataaataacagatcctgcttccctggcagaacagcttggtgtgatggagatcgtcagttacaactcactgtctcatccacatctgtgacggcaaaacctcttgttatctgcagcctgcggaccacttccccataacctgtacactctatcaaactgttttttttatcataaatggtatggttttcataaatggataatcactgaaaataaattttagagcaattctccttagagacttccagtgattaaattatattcacagaatattcagagtggttgcattcatacaatcaagaatgacaattcctcattcttgattgtatttatgacaatgattcgactaaacaagagttatgtttcatgtgcatggttttgttgaggaataagcccttccacgtaagtaacttcccagataaatgtgacttgtttccaagtagaaacacactttaatcatttggatggttaagatggaaatcttaaaacagaaagggagagagaaggaaggaaggaaggaaggaaggaaggaaggaaggaaggaaggaaggggaggggaggggtattatagctgtttgtcccttaagcacaataatcaaccatttcttctggaatgatttatttagagttattaccaggaacatcacctactggagtgtgttaggtaatgatgtcctcagggctactgaaattcactgggtctcggcttcacatcaactggcttgctcagactgttataattgccgttctggcatctctgtatatgatcctttgtcttcctcctccattcctgcctactcatttctgtgtctacggtcaccagtcatacccacatatcctctatttactactgctaattggctgtgggctagaaaagcaaataaactaagtcttgttagatttatttgcaaaagggtagtcattttgggtaataggccttcagggaacaactgctaagctcttcaccatatagtccttgagaggaggacttattagcccagtggctggcacagagtagccacttaatacatgtgttgattaaatgaatgcatgagatttgtgatcccaggcccacttcttagaggcactgtctgcttagtttcaggactgtgaccatattctgcatggtggagagtgtgtcaagtaggaccatgaggtaagtggactgactcttactcaagtaaccggaatgttctatcttcaaacaacgtgggaccaaagagtgtacagaggagctctgttttcccatgaccctcactggtgagcgagaacctgtgatctaggaaaggaccaagccaaaggtgtacctggcagggccagacaccaagtcctgacctgaagggcacattccacacttagagtttcaaaatatccccatcaaaaccaagaaaggcatactgctataaaaaggttgcttaacccccagacctcccaaaagcaacaaaagtagctttcaagaaaagatttgttccttaaattagccaactgaaaatctgagaaatatggcaaaaaaaaaaaaacccaccacgaaacaaactgtatatgttccctttatcctacccctaacaaaaacaaaaaaggcaaatatggacccccttttccttttctattttgaattagagaaactccaatccttagggttgagcagtagacctctgccaaggacccacctccctacaagtgtccttacttccaaggagctgggcagaactggttactcaggcttctgggacagggccccgaagatgggccctaagccccaaaccacatctgccagcacatgctctcagaagggcagcctcctctagttccccctccctgtctccttcaccccggccccttgccctatttggtctctaaaaactcctctctttattcagttcaactcaaaaagacattcatggagcagccactaaatgcaaggagctgtgcagggggctcacacacgagggatgatgtggacaataatgtgtgtgtgctgccctgctcaggccctgccagttccctcccccagctcccaacctaataacactagtcttatttgctttttttccaccaacctgcaagtctcattttatttagctctgtagcctagtgtttggtatatgtgctcaaatcaataattcctgagtgactggtcacatatatcaagcagacacacccacaataatgctaacacataggtgactaatgaatagcacaaaaaagggacaaatagtaccagaaaaacccgaacaccaaaagcaacaaaaccccaacaaccataagtgaaataaatagactttttcatggcaaggacttctgaaggggtgggctctgagcagcacctggagccaagtgaagcatactgcttacaaaaaggcaaggggggccgggtgggcctggcaggaaaattggtggtactagtggggaagaggaggggcaggatgaccagggctgtgtgcgtgtctgtggacagatgcaggctttgtaggaaagagaggaggtgattcgagatgaggctttataggtaggagaaagttgtgttttagaaagcctctaaacttcataatgagatgggatttcatcctgaaaggtactggtgagccataaagtttctgaggaaagttgtgcaggaatagtactcatgctgtggcaagaccactctagaagtgacaggcaagacagatgagaggtctgcgtccagaggccgacaagtccagggaggcacaagggcaacaggcctgagtctcattttggtggtattaggttttctgttcctctaagtggctaatagttttccaaggaagatctagaacaatgatcattttgtaacttgaattatagtaatctatattgaagttttttggctaagggttttatagcattaaaaagagttagcgcctccatatattagtattccatgttcaaagtaattattattttcacctgatagaagagttcactgaagcccagaaaggcaaaggaactaagcctggggaggggcgggggtaaggaagtcacaggggaaacggatccacaggcccagaggtgttctggagctccctagtgccagyaatcctgataagatgtggtgtcaaaatgatgatctgagctctgtgaggggcagtgtgtgggaagtcaaaggaaatcagctagtattccttcatagagttctagaaaccaaaaccaagaaatgcctgaaattagtgctattctaaaagcaacaacaaaaactgcctgtggtccagagaattgcctccagatccatacataacacacgtgcttcattataccttatcataagtgtgctcttccactaacccacactgacagacacaaatatacttagtgaagtggagtctggggctccatgagccccagggactgggttgctgagtcagccttggggtataccacttatgcctcagtccccatgctgtctctccatggtaggcagctcaaagggtttgaacatcgtggtgctaatgccaagctctcaggccccatcccactgtggcacttcatcgggttggccaggatgaactggcctggccaagtgttgactgctagtgatgggcagaatccagctacatcatttgttgagtgaggggcaaatccctactaatctttatcatgtggcaaaaaaacccaaaacaaaaccctgacccacagtccatgctttatggacagggtcaaagcatgattgtcacatcaaacataaagttctctactgaatgtattagagtcccaaaatgccactgttctcagtccagcaagtgtaccaaggacccccatcctctcagattgccaacaagtcctattcacctgcttttataagacaagatcccacactaaagtcatggagtagttcagccagatctaaaaccaaatctttggaagcacctcaaagtactttgtgaggattacttttctaaaacaccgcatccacccacattctcacatccacatgaacattcatgcactcgtgaacagcacacatcttgagacggtacaaagtagcatcaacaaagggcaattaattcaaccattggagcctgtatgaaatagctgtatacagactggtttaacaaacttgaaatcaggtgcaatgatctccccttggcttagagataaggataatctatatacttaaaacaaaaattgagggattaaactttctggctccctacaagtaggaactataaaatygaaactcaatttcatcagcctcttagcagatgtcatgaacatcagcaaaatagtagaaactctaaaataggatgcttttggcttaagccaaaatttgtttcgagtgaatatgtgacattttaataaatctattattatgctagactgctgttgagggctggtctggtatcctcttgaacttgtcctaaacactgaattcccacctaaactaattcttaccacagttaaatagttcagtctacccttaaacaatcacttaaaatgtccactgaaagagggtagcatcttttctgatatgtctataactctcagctgaaattcactctaatcaatataacattaaccttctatggtttaaatcgtacagtcttaaaaatgtggtgtttgtttcttttagaacttctcacattttagagtgatagtcttaaagtattcacaagccagccctgcaacctcaaagatcaaatagatgatctttgccttagaagctttagaaacaaaattggtcaagtagaaaattaattcacctgcactacaattacctttatttgtgtaaggatccaaaaggattgtaaattttatgcccactttttagatgagtctcagaaaaacaaagagggaatcatgaatcactgtgtttgaaatatttcattaaaaaataggatgagtcactaaactttttcaaaaaggtaagggtgtggtatgaagcctaacagaagaaaggtgccttatcttctgcggcacaccctgctagccaaggaaagtgtccagacaggcagagtgagctggcctgttttataagatctttgctaccaacaagtctacactgtttctctctctatagcaggggctgtctccctctgactgccttttgtctctgtcatactcagccttcaacaaaaaacaaatggaaaaaaaaaaagtaaaatattgtacctccaagccaaaccttacacatattacagttcattgaggaaaccaggaagtggtcggtaaaccgaaatttccttcttgcctcataactgaccaccttcttacaaaacccattcatgcacacactcagactcctaccaatgtccttcatttcagaaaacagtctgggatttggatagctcatggaggctaacagttcctctacttactataactattttattacaattggctattttaccagctcctggctttactaatctactaaaaaaaaatatgcacccgaaccaggtgtagtggttcacatctgcaatcccaaccctttgggaggctgaggcaagaggatcactggagcccaggagttagagaccagcctggccaacatagtgagaccttgtttctataaattttttttaattgggggaaaaaaaagacacactcatgtacagtgtgacataataaatgttacaaacattggaaatccgtagaagacaccactcatttgggtaacacggtctactttcccttttcatgggtatcatttatacattgcaatgaacagaaaaattgagacaagtttaaaacaagccacttgtaagagtaactggttaaaaaaaatcagaattttagagctgggagaaatattaaagaccatgtggtagattttagtcaaattttcctgttttacaaatgtgaaaatttaagtccttttgacattttgttgaaaacttatgttttaggcaaaacatgcagtactggctacagcaatggagatgggcatcaacattaactgaatgcctattatgcttcaggactacgcaaagcagctcgttttaattcttacagcaacccagcatggcagcttttattcgccattgcagagatggaaaaagtaaggctcagaggggttggggaatattcccaaggtcgcattgagtgaggtggtggtggagccaggattcaaaacggctctgcttgccgtcacagactgcactttttagcacagcacatggattttttttttccacccaaagttggaatgagacaaatgcacaagcaggaaataggagttgtacttcctgctcccttacacacatttgagggacctgaggagaagttacttcaacttagctttagcatcttcctctctaaagtgagggggatggactaggatctctaatctctgactctttaaaaaaaaacaaaacaaacaaacaaaaacactcaaaaaaggcactctaagcagactttcctttcactggcttctgggcacccataatacctattctttaaaaacaagtctgggcatggtggctcccgcctgtaaggacactttgggagacccacgcagacagatggcttgagcccaggagttcgagactagcctgggcaatatagcgagacctcatctctacaaaaatcttaaacaattagccgagcatggtagtgtgtgcttatagtcccagctacttgggaagctgagataggaggatcgcctgagcccagaaggttgaggctgcagtgagataagattgcaccactgcactccagcttgggtgacagagtgtgaccctgtcaaacaaactaactaatgaataaataaaaattgagcattccttcttctatgagccccttctggcacctgtctcattaatggagcatgacactcattgggttacctcaatcagacttgggccctcaaaaacatagctgcttgtaaagagactgtgagaactacccgccctgcttccaaattgtggtccactctgttttacagatgagtaaggaagtgaagctcaaggagtcagtggatcttcacagggaggtggctaacttgttttctaggtctaatggatggtaactactacaatctgtttaattgctacgctgccatctccctgcattaacttctccttgcaggaagtttgtaagccagcaggagcatcttcataaaggcaacaataaatgactgctccagctacccaatgaacacttgccgatgacggtgatactctcatagtttgtgaaccccttgtaatccagtgcatgatctcatttgacaatgaactgccttctggcctctgtgagggtaggctccagttctgcttgattgttgccaaagtgtgggatatgctgaatgtagggtggggccctgattctttcctgaccctcacttaaggtgtcaccactgcctccatcagggcactgggctgcttgctacacatgcctcttcctgtttgattctcacatctactctattttgcacatataaatgcccacttccccatcctgcttttagaaacgagaaaactgaagcatgcctacaaccatacttccaggaagtggtggagacaggatatactcccaaagtctgctcttgccccagggcttgcttttcactacttactacaataattaaattttgtctagtaactagaaaataaaagggggaggagtattgatgtttccatcagtgaccttgggttacttacggtttggctatcttgtccacacatggttatgcagaggtggcattatcgagtgggctgcatgcagtggtgctcacaggccacaggcctgaacataagcattttgggctctaaggtggggccctggctgaataccagccaacatttagaataccgatcctgccctaacctaggaggcaggaaggccgtgaagcctcagccagaagagtcacctaggattgaatccctaaaatctgctttggctgggaaatacttcctgtggtgccaagtaacagaatgctgctttttgtgagaaaaaacgcctccccccatgctaggcagagacctatcagcaaaggttcccacctgaggatgttgagaatgacacctgggcccacattgtgtcatgtgcagccacacagccactgtgacatcacttaggctaggccagagcttggttgtttttagggactaaaagcaaaagtgcttagagaaatccgaaagactagctagggaagggagagaaccagttattgcaactgtactaggtactagggcctaaaaaggggagccatttgactttcaggaatctgctggtatcacttattccaggcactgtaagtggcagtgcaagagcagagccctgggaggaacctgggaccacagaaagaaggctgtaatgggctgtgagaaagagaacacagcccctgcttacctggtgaggggctctccagccattcaccagagggctttggaaatagatgggaggctagtgctaaagggaatgaagactgagcttggaatcaagaggccagagtttactcccaatcctgccactcgctaacctcatgatctcaggcaagacagttaccattctgggcctcagtttcctcatttgataaaacaaaggggaagatcacgctgattgctagggccccttgcagggctgagattctatgagtcctctgttctcaggagcaaattcaacgttttctttgttaatatcttggattttacatttttttaccaaaagcttcacttacctcttttcccgatttgctaatattcaaaaagaagcccactagtaactatctctcttagcaatttcctgagcatgtttagttttttcaatcaagtacagcataaaattacgacttccttttgttcatttaatttttttcagagtggaaaaagcactagcaaaatatatcaagtataatgaagtggtaaatgaaagaagtcttaaaaaccccaatttaaacatggtcatttttcaatattcaaatatttgcatatccaggatccattctgagtttaaaaacctggcaagatactcacttgagggcaaaatgagacttaggttaactgacttgttcaaagtcataaagcaagttaatagcaaagcccaaatctttggactaagatgcccggaagtctttctaccatagattgttatcttcctaaacaacctgtctttctagattctctgctactatttcttggtttagaaacatacacttcacatactgaagactttactgcaacaggactgtggccagaactgtacttgtctcattaggcttaccttgctaaggtaagaaagtgatctcactcaaaggcattgcatctccactgaccttgaataggaaatacatattcatatcttgccaagagttcaagtgccaagtcaatacatactacgaagkctatggtttggaggagactatgaaatgatgacatttcccatgcattccaaatgtattaggatgtatgactgaattaagtgggacatgcacctggagccttctcaccttcacagttgacagccatgaatgaactggccatttgtctctggaaatctgcttccgaggaggaaagcaaatgattttttaaaatgcaaaacaggaaggaactaaaggcagcatggcatgagcctcattttttccccaacaggtcaacactgagacatcacccctccacttctacttgagactttgttactttccatggctatcagggtgtgtgtgtttaaatatttctacatttggtaagcaggatctgttacccccttttctcaaatatgccctaatgagacataggaaacatgctgtcactctcccaaaatgaaacacacatgaagactgtataacttttcctctaattaagagtaagctttacccatgtattactagcaatttttctatcactgtaatctcaagttacaatgtctagaagacagatgaagacctgctggccagactatgacagtattctttacagatattcttcatttctatcattattttattacttattttattattttttagcgatggggtctatgttgcccaggctggactcaaactccggggcttaagggatcctcccacctcattcttttaagacaaggtacaggcgggacaaatgcaaagtgtttaaaggaaacagatctacaggcaaaacggtaactgactttgtacatttcaagggtgctgggctaatggtgaaaatgcaaaggaaaaggcctaaaacatggccatgtctgcttaggactgggaacagaaggtttcctgctgggcttttaagagctctctatggctgggcatggtggctcatgcccataatcacagcactttgggaggccaaggcaggcagatctcttgaggccaggagttcgagaccagcctgaccaacatggccaaacccagtctctaccaaaaatacaaaaattagccgggagtggtggcacacacttgtaatcccagctactcgggaggctgaggcacaagaattgcttgaacccaggaggcggaggttgcggtgagcagagattgtgccaccgcactccagcctagacaacagagcaagactctgtctccaaaaaagctctctgcaacatcagcaccacagactcagcattgccctgaagctcttttgtaactggcttttattggtttaattaaccaaggatgggtgggacagagttactccatctctgtcatgttattgttgccggcttgtggctagcagcagctctttaccttttgtatttgatacctggcctgcacaattagcaccttattataggctggcctctcttctaattgccacgtctcaattgagcactttattttattgtcttgttcatgcagtagttcgaggtcctgggctcccccactataataaattctaaactacttttaggcaggtgttgtgttttgagtttatctctttatgcccataagaacaccagggactcacaggcatgcaaacacactgtctggagtttctagatatctgagtatggcatacggttggaatctgggtctccatgcatgctactcaaccctagtaccagatctatcagccatctttgccattgagggctctctccttagctacttggagttaagctcttattctgctcatatataaccttttaccttgtttaaaatattgggttgcaacagacacagcaacatcccatcagcaccacattccatgttcctctagaaaaatgattcaagggatatgagtttatgcttgaacagacttcttgcttttggaattaagattaactatatagttcataggacagttaccaacgccataacaaaattgggatttccttcaccaaataatctggtgaatgtaataaaacctggggggaggctgtgtaaggtgatggttaggagtatgggcaggagagctagactgcctggtctcaagtcctggttctgccatttaccaatgatgtaacctgtgaccctggttaaggcatttaacctctctgtgcctcatttcccaatctgtaaaatagggataagaatacttgcatcacagggctgttgcaaggattgaatcagttattttttatttttatttttttttgagatggagtttcgctcttgttgcccaggctggagtgcaatggcgtgatctcagctcactaaaacctccgcctcctgggttcaagcgattctcctgcctcagcctcccgagtagctgggattgcaggcatgcgccaccatgcccggctgattttgtatttttagtaaagatggggtttctccatgttggtcaggctggtctcaaactcccaacctcaggtgatccaccggcctcggcctcccaaagtgctgggattacagatgtcagccaccgcacctagcctggttaatctttataaagtgcttagaacaatgcttggcatacaataagcactatgtaaattagtgttgaaaattagagtataaggttttagaatacacaaacctacagaatagtatgccccaattcatttattcattcaataaatgaatctaatagtgatggaaaaacaagacggtttaatactgtgccatccttgacttcttgatttttttggttatcatatgttctttgaattacttcaatacactaaaaaagaactcagaatttatggattttaaagacgtccaatgcactattacagcaaaggtgataaaaatgttctggcagcatttaagccgaatgattagtgaagactgtcattgttttagtagacaatttaaaaaggaacattctactgtttacatctctcttacctacttagcctaatatataagacatcgttcataacattatttagcaaatactgcagacccttgtccagtatggaattcccgtcaattgtgagggggggacagttcaaatacatgttctatattttaagacattggaaaatctttatataaagataactccatggtatctgaactcaggcttttcttcctgtgtctttctgatctgtccatttgctgtcacctcttaaatcctcagtctcctcagatatcctagcttctaaaatcccacttccagggtctctcctttctgagcaatctctagcacatctagaaaatatcatttataacatcagcaatctcatgttatcttatcacaacagagctcctcacataaaacccagccgtccaaccacacacaaacacatctaagtgccacaacaggtggggcacctgtgccttcattagggaggaaatccttccggcttcacctctttcagtttccctggaaggcaaagtccaaccctgcaagctgtcttccttttaggtgcccctgtggagaattacgtagagacataagaaacatctaatgtccagtctacgaagaactgatcatcaattttggagctcagcagtttaatgcttaagaatgtgagcaagcacttcctctctataaccttatcagacgacctcccaatcccactgtgcccactgatgcgaccatcatagctctaaccaccatgatctgtggttatgttggccctggagccttcatctgcccagggaacttctctgggcatagtatgttttacttgtcttgtgttctaaaggtagcacaaagcctatctatagtaggctcccaatagttatctgaaactgtatttgaacccactatctgataaataccatttttttttttttttggctgagggtcctcaaaaatggaacatcaggaaagtcatcagaattgctttaacctgccctccttgcttcaactaatttgggttaactttctcccatttatccacacggctcctttaaaacttgcaccatactttgtcagccccgccttaatgagttcctttggtgaccccagcttcaccttgcagatatcctctccgggtatccaatgcccatactcccactcggccatcgcaaggggttggggttggctttttttcgggcaactgctcacagctcccagtaatcacttccatcaagccggggtttccagttcccgctaggaagcgttggggacgtccgggcactgcgcacctcgccagtgccggttaccaagcgcctcctcccccgtctgtgggacaacgctctggtaagcacccgaggcaagaggtcccagcaaggtaatgggacagcgttcggtcacagagagtgagcgagccagcgagagatattcctgggtggaggggtggggacgccttaggactagtgtcccccattcccggacccttcccaccaagaactacctagggagggctgcatcgcctctccagccatcctagggactagagaaatggaggggagaagagcagggaaacagcacccccgggccaatcacgacgtccgcccctccttagtcggggtctctctctctctctctctctctctcacacacacacacacacacacacacacacacacgctcctaagtcaactccagctctgagcaactacgccgcacgcctctcccactgggagtcccccggcccgtgaggctcgcctcaccccagcttcttcacccctaccccagtttcccttcccaactgaccgtgaagccggaggcagttccccagtcccagaccccggtggggctcccgccgccgccgccgctgccttcccctgcagtccccaacccgggacccggcctcgggcttcggcgatggctcctcggaacgaggcgccgcggctctctggactcggccagacaccgggcggcgcgcaggagaagcccatcgagctctcccggcagtggcggcggccgcggctgcaggagcggccgccgcgcaggttgatgacgcgctgacgcggggcgggggggggtgggacgtgggggcgcggtccagaggaggggacgcgcgcagatgacgtgcggctcgtggggcagctcggcagcatggcgtccgtgacgctgagcgaggcggagaaggtgtacatcgtgcatggcgtccaggtagctacagcagcggcgttgggtcggccgccgggttcagcctggccctgcgggtcgcggcctgccctgggtttgccagtgaggaggcagccgagctgcggcgactctccgtttaccttgtgattaaacggttctgctgccggcgtttgcaattcagagctggcaacgtggacgtttttaggactgttagcgcatttgcagttttgcgggtctataagattccgaacccgggcaggaagcttgggcagtctcggaggccttttcttagtgagagagcatcggccccagggccatccattcggcgttcgcgcacagatcttgtccgagcctcagttttctcttcgaggaaatgggagtttggaggtgggcttctggcctgcttttcctcacctcgtggttaggagggcgcatgcgaggtgaacgcactttgaaaatacaaattgccgtacaaataaagggggaagggtttttaaaaagcggctaggacgcctgtaatcccagcactttgggaggccgaggcgggcggatcacgaggtcaagagaccgtcctgaccaacatggtgaaaccccgtctctgctaaaaatacaaaaaaatttagctgggcgtggtggcgcacgcctgtagtcccagctactcgggagactgaggcaggagaatcgcttgaacccgggaggcggaggttgcagtgagccgagtctcaaaaaaaaagcggctaggcagccgatagcctaagtgctgtttccattttgccaatgaagaactaagatccctaggcagctataacctaatgtcctctgtgttctatattaaatccctggttatgaccactccagaacgagggttgaaaaatgttggacctggtaacgagctaccctgtatcctcctccggctgtgtctccacttgttaacctacggtgtggtcctcctatcagagttcttcatcccatccttggcagagttctggcgacagctcctacctcttttcctcatgcctttcctctgtcagtaccaactgcaaagtcagtggtcccgtgatgtagccatcggattgaagcggccagctatcattgaagtcccacaacgtgagttaaggacatgtccatttaaaaatcgtgacctgccgttatcttctgggccctttatatatgaagaaatgccaatatttagcatattatgcctggataataaagtcagaactcacagttgcatattttagttataattcaggattaacaacagtgggacatatgtgtgtattacagggtaacatgtatgttatttgtgtgtgagggggcataaaaatgcccaaaagcagttagatatgtctttccctgctatatttttgtatacactttgttcaggtgatttttatcctcaaagtatttttttagggacacattacggataaccgttttcctctaaatttaaaaacctttggtcttctttgttaccggagcttaccatgatgtagtgactctgtcatgtgtcctattttctctcaacatttcatccctgaaagtggcactgaggcatggatatatctgtaacctcaaggttagagctttctccccagcacccttaattcccacggcagttcattagctatccagcagcagagtcccaccatggtcattagttaattttatttaccaacatatatctagctcctggcatgttatgtgggaaacagcagggatgccaaaacatggttgtgaaataaatgaaagataggagggagacaaacagagagtaaaagtgaataaaataaaaacaaaggtaatgtaagatctatgccaaggaagtggtatagttagtggaggttgaagttaaagtataccaggggccgggcattgtggctcacgcctgtaatcccagcactttgaaaggctgagatgggaggattgcttgagcctaggagtttgagaccagcttgggcaacacagtgagagcccatctctaaagaaataatttttttttaataaataaaaagaattccagggacttgtaatgctctgaaggcttccctaaggaggtggaattgctcccctaaatccatgtcaaggattcctcctctgtatcttcaggactcagtattcattcattcaacacagaactgagctagactcaggggctaggaaggaacctgtccttatatagctctcatgctagaaggaagatgcagaaactataaatgtacttgagtgtttatatataaaattgtactgaatgctatgaaggaaaaaacggacacgatctagactgggaggtcagaggaggcttccctaaggaaatagcatttgaactgagttctcagcatgactgagaattaagtaggcaccagtgttccagaaggaaggggtggtgagtctgtaaatcctcaggtggaggacatgtggagcccaaggggtgggctgggggaaatggtggaagatcagcttgcagaggtggccagaagcacgatcctagaggtcttagaggttcagtcattcgctcatcatggatcttggaaggcaatagcctgttgacttgtctgtatgggggacccttaaggcatagccagtgtctagcacttggtaggttcttagtagcattgaatgggtgatgtaagctttaaagggggaatgagttggatggtgtttttattttttaaattaaacctccctctcaccagtaccatggacatatttgggcacagttgttggtaaatgctcagctctgtgtatcacagagccatgcagagtaatgggcttcaaatcaacgtcttcataagggcttattaatgttggcccaaaatatgccatatgtatagaggagcaaaacacaatttacaccatccaaataaaggtcaggatgcaggtgaatgagcctaccatggaatctcaactgattcagttctgaaatctcctaaacttttgttgcgttggttatagagtgccggcagtgcaccttaagcagtgcctgcctgaactcctgttgcttgtatagtcctagtcattttgtgttttacttttcacctttggtccagtaacgtccatttcagcttctgatgtcactttcccttcagcctttggttcttttactatttcagggaatatttcatcttgttttggtgatagttagaagcagttgaaattaacctcacgatgtgttgaggattcagttgctagtaatggtaaccaacacatcggctcaagcaaaacagtatggattacaaggctgcaagtgtttctccaggaatcctaatctctgctggttttttttttccccctctttgctttgtttttgtctccctacagattggttttctatttcttgggccagtggtagaaaaaatgtggttccttcccagttcctctgtaaaagagaccattccttctcgttcagttctgaactcatgtttccaagagaaagaaactctagttcttttagggggttgagggaaaggatggacagaataattaggctcaaacatggccactagaggatgtgtcacacttgggagaagtcagtttgtgagaagggagggtggatcattttagttattggcagaaaatggaaccctcttcaggtagttcaggagacttttatgatgggactctagagcagtatggggggggtttcagggaaccaataagagatgttgaggagccccaagacaactactgggagtggctactgcccctattccaaaggggccaggggaggaaacagtattaccacatttcagtgatagctggaactgtggaggaagggctgcccaacataagtcatagtcttcgatagatgcaggcactatcagaaatgtggccactagattgggggtgaggggcaccctctgatctggtatcttccactggacaaacccaaccagaagccagcaaagggagtctaggtgatacaatttgagtcaacctggtgaacagatcccctctcccaggggagaacagagaatcaaaaaggtggattaaatcggtattttgataaataatttgattggtttctgttaggttctctttcagtctttgaaggctatatcccattcttattaggtacatattataatttttatttcattgaatatttacaacagttctgaaggtaaatgttatctctatagatgaggaactgagctcgggcaggttgagtcgcttgtcaaggtgacacagtaattgagtggtggcactgggatttaaatccagacctgtctgattgcaaagcccatacttgactctgaggccaccttcctgctgcagtgaaagtcatttcttccatttcctcagtagggatccagagatcaaggcaggagagaatctttgcttcctctacctccttttctttccccctttctctaaaagcttgtggggaaactggaagggaaagagaaagttctaattgacacctcccactccccagtttttctagagcttaaatagtatatggcatatactgctgtattgttttggttgcatttttcccacattgagtataagttcctttagaaccctatattgcatttctttgtatagcttttgtcttactagtatcataaacgatttactctgcccataccatgcagaacttggagcagacttcagaatttttagaatctaggatttatcctcttttctggcttactgggctagatgtgtgttttcctcatccatgagaagccattgctaacctccctcttagcccagggattctgaagccttgaagtgcattttactcacctacaaaatacagattctgaggctttaccccaacattctgaatcagactctctggggctggggcctgagaatggacattatcataaagtgttgggaaatttgggggcagccaccagacattggcccatgggtaagccactgaccagagataaagaaatctctgctctctcctgctgaagtcatatggtttcctgcctctttttgaatgaggctttggagtcagactgagcaggcaccttcaccatttacaataagtggttttacttgcataactgaacctgcttcccttgtgtaaaatggggacttatgcacctggaagtagaatggggttatgaggaatgatgagataagagatgtcaagcacttgggctgtggttaacacagaaaaaatgctggctccctttcaagtttgtttttccatcagaagtgtgactttgtcttaaaccatccacactagatccccagccttcatagtgacctcattaaagattcagcctgtggctcctgagaattaaacctcttttgatttgaaggaatcgggatttttcaattatctcaagaaaagggataggccaggtgcagtggctcacacctgtaatcccagccctttgggaggctgaggtgggaggatcaccagaggccaggagttggcatccagtctgggcaacatagcaacaccctatctctaaaaaaaattaggtgtgtggtggtgtgtgcctgtaggcctagctgcttgggaggctgaggccagaggatcgcttgagcccaggagttggagatttcactccagcctgggtgacagagagatactctgtctcttaaaagaaagaaaaagaaaaaagagaagggggatctgtggcaagagctggaaagtccccagacagctctgaggtaccgcctctcatgggctccgtggattatctcatggcctgtgtggctgtctgtctttatctctagtgacatctctgcttttctctgccaagatttatcccttctctgcagccacttgctgtccagcttcccttctttgtagaatctgcctctgcccaatacctttactttcgtgtggcctctctgggctcctccatatcatgacctgtcagctcctctt

SEQ ID NO: 96189 - DNA, 23691 bp, Homo sapiens
aaaagtattacagctagtcacaatgcagcaaaatggcatctttttctaatcttactttaggcacaatgtggattaaattaatttaaggatctctttctgccaagacagcattcatcttggggaaaatgcattccaaggtccaaattgccaaatgggttttggaagcccagccagttgttcttcctgttttgccttactgcagattgagagggccctcaaaggttagggaaacccaagagggaatgaggaagcttgaaagctgagcattcagaggaaagctggaatagcacaacgccctcctcttgccttcttggctggagcttgtgcagtgtggagttatccgcctgaggcttccaggggaaggagctgtaacacagcatatctttacccctgggtctcacagtgtactgacaaggcttccccaaatccaaaatcccctttcttcagcctgtttgaaggctttctgtgtgggctcccactgctggatgctgatgaccgttctgtacattctttgcagatgcatgttttggtgtgaccttgctcatgttgattctgtagttcagttgtttttgctaagtttcatgatgcaggtaattgcagaaatgaatctcctattaagtcagtgaagatgctttcaactgcaaattatagaaaaaacccagactcagttcgagttaaaccaatgatcctccaactttaatatatatcagaatcaccctattaaaataccaactgctgggccttacccccagagtttctgattcaagaaatctgggatggggtccaagaatgtgcattattaacaagtttgcaggtgatgctaatgctgaaggtctggggccacacacatttcgaggaccactgacttcataggaatgatattttatctcacctaaaaagaggcttggaggtatgtggttccatgatgagttaattcagttacttacggacctcaccaaggatgttctttccatctcttctctttcctgctgtccatgtcttgggtctgtcctggtttcaggttggctctggcagttccaggtatcccatccagatccagattaaatgacactgagaggaagaagtttgtggggctttccctctattgcgtttaaaaacaacaacagagaaactttacttattacacttggatttgaggtcattgggttgagtcagaacttctagattatcatgctccagagtcaaagctgcatagaaggggcatccaagaggcagaagtgaaggggttccttttgagctctgccatttccacatggaatttcttttcatttttccgagtacttgctgcttcccaaatctgggaaggatgtatccttctgtggccctgctttgcatcgtttcccacttcttcgtggtggattttggccctgggattggcccatcccttccttaccatctctttctcttaaagaactatgcaagagtttcctgttctgggtgagggttggaaaggagccctctttccctgccagctcagagaccctgtgagaggctgcaggagaaggattcctgtgtggtctcttctgtgtattcatctaaacagatttgcctttcccaccccatcacctcttgctcttctcctaggtgaaactcgggggtaagtgtactctgtgtgtgactgctcatgtaatccttaggcctgatgtgttcctctccccttccaccatctcatccttccctataatccccactgagtcttggtctctgctccagatcctgcaagccctggggaagtcctaccaccccggctgtttccgctgtgtcatctgtaatgagtgtttggatggggtgcccttcaccgtggactcagagaacaagatctactgtgtccgagattaccacaagtaagaagggatgggagcagacaggacccattcgtgtaggccaagctgatctcagcagagtgagtggtggaaaccgacaaaactgtgtttgccagccgcccttagatcacagtccagcaaaggcttaatggttttgaggggtacagcagggaccttgggaggttggtcgatgccagtgttgacaggaatgggttaaagaatcatgtttagtgaaaaaaaaaaaacaacagagcacagaaaaactaataatcatatttgtagctaggcctcgggaggaatccaccaagccctgtggcttcagcgttacctaacttcacaaggcccctatgcagtgctggttcctaccactcttggtttgcctgggcctgtgctaggcaccatgagaggtgtaaacaaatcagttagtgctgtccccagaagagtgagaggcagccagtgtcctcattgcagctggggagcaaatactaaggcatattccacaaagtgagccaggtaccagtcattctatgagggaggagagcaaggggcaggaggcggcatggaggaaggctccatgtggattccaagtgcaagtctgactctggaatttgctcccagaagcaacatttattgctgctttgtttctccccacagggtgctggcccccaagtgtgcagcctgtgggcttcccatccttccacctgaggtaagatgcccttccagacatgctcccaggggcttctaagacatgaatatctccctgggctcatttacaagatccatgtcctgtccttacagcttttaaggtatccttttaaaaatctcaactctggcctggtgcagtggctcacgcctgtaatcccaccccttttaggaggcccaggcaggaaaattgcttgaggcctggagtttaagaacagcctgggcaacatagcaagacctcatctctacaaaaaattgttaaaaattggccaagtgtggtggcatgtgcctgtagtcctagctgcttgagcccaagagtttgaggctgcagcgagctatgatggtgctactgcattccagcaggtgacagcaagaccttgtctccaaaaaaaaaaaaccaaaaaaaaccccacttcacctttgagataagtcgtgtcttcacccttccttgttgactggcttccccaacccagtacccttcttgtgctgatttgtccccataaccaggtcaaactcccttacttgatactaattcttagattagcagatgaggagaaaggcttgtcttttcttcattttttaaaataagtgtccatgtaggtctttctttcagtgttaactctgacattctagaaggaaggactcctatccctcctacttcccctctcatcagcttaaatgtattcttcttccagtaagtactcctgatttaccttctcctcccaaggccacctacttgttacccccaaaaccctcttccctccccaccccacggtacatcaagcccgacagcccccctaacaggcctctcctatgtgttcttgcttttctctggtcccagggctcagatgagaccatccgtgtcgtgtccatggacagagactaccacgtggagtgttaccactgcgaggtagacccctccccacccagcccccaaagcccattgtagacatccaagagaaaagcatcctgcgttgactggggcaagaggcagtcaacaagattctggcaagggtcagccctctagagcttctgtaggaaatggaatgaaggctggttcttgggggaggtaggagaagatggaaatgctcaaggtataaaggtctttcttctgcatattcagaactatcaagtcctgcaactgttggagctgctctccctgaagctgcagagctaggagggtcgtggagagcatgggtttcaggtcctatctgcgggccacattgtcaggcaggtgtgcgatttggggaagggactccctcccctccagcttgcaggctgttctatctgcctgaagctcctttctcagctgagccctggaaatcatgaagcccctcttggaaacaggcatgtcagctggtggtgtgaaggcgggtggggtccgcctgccccttcctgccctttgtcccaacccaagatgaaggagcactagtacctgatgactgtcaggaaagctagaggttgcccctcaccaacccttgtgaagggtgaccatggaatttcagccacaattaagtgaattcacccatggaaggagattagattcatttggtgaccctgtgggtagagaatgggggtgtccctcatatagacttgtcccactgccaacactgaagaaatgggtgggaatcattgctgctgggaccccaggtgccccaggtcactgcaggagaaaaaggtgaggacatttgctcaacaggcctctccacattttctagaccagtgctatccaaaagaaatataaggggccgggcgcgatagctcacgcctgtaatctcagcactttgggaggccaaggccggcagattacttgaggtcaggagttcgagaccagcctggccaacatggcaaaaacccatctctactaaaaatacaaagattagtgggcgtggtggcacacgcctgtagtcccagctactcgggaagctgagacaggagaattgcttgaacctgggaagtggaggttgcagtgacctgagatcatgctactgcactccagcctgggcaacagagcaagactccgtctcaaaaaaagaaagaactatgagagccacaaattaaagtcatgtatcattttaagttttctggtagtcacaattaaaacgttaaaagaaaccggtgagattaattattttattcggttcaaaatatccagccaggcatgggcccatgcctgtaatcttagcactttggaaggccgaggcagggggatcacatgagcccaggagtttgagaacagcatggacaacacagtgagaccctgtctctactaaaaatacaaaaattagccaggcatgctgtgcctatagtctcagctacttaggaagctaggatcgtgtcactgcactctactctgggtgacacagcaagaccctgtcttaaaaaagtaaaaaatcctgctgggcgtggtggctcatgcctgtaatcccagcactttgggagggcagatcacttgaggtcaggagttcaagaccagcctggccaacatggtgaaaccctgtctctactaaaaatacaaaaattagccagatgtgttggcgcgtgcataatcccagctacttgggaggctgagacaggagaattccttgaacgggggaggtggatgttgcagtgagctgagatcgcaccactgcactccagcctagaaaacagagggagactgtctcaaaaaagaaaaaaaaatccaaatgttatcttttgaacatgtaatcaatataaaaaagttacccatgagattttttttgtaactccacaatttattttatttcttctaaaaaaaaaaaagggatacgtgtgaagatttattacatagatatatgttgtacgtgtgccagggtggtttgctgcacctattgtcccatcctctaagttccctcccctcacccccacctcccaacaggccctggtgtgtgttgttcccctccctgtgtccatgtgttctcattgttcaactcccacttatgagtgagaacatgtggtgtttagttttctgttcctttgttagtttgctgagaatgatggcttccagcttcatccatgtccctgcaaaggacatgatctcattcctttttcccatgagatatttttacatcctctttttgtcctaagtcttcggaatctgcatttacactgacagcacattttaagtggttcacagcaagtgccttgtggcagtgtctcctgtgttggacaggcctccacggggcaggagctgtgtttctgcactggcatttcctgcctatacagaaacacacagcaccctctgctgattttggggactgtggccttcaggtcagtcttgcagtctgttttgttttgcttcccctggacatgtctgcctccccacaggactgtggtctggagctcaatgatgaagatggccaccgctgttatccgctggaggaccacctgttctgtcactcctgccacgtgaagaggctggagaagagaccctcatctacagcccttcaccagcaccacttctagccagagccacttgcagacatcacggcaggggatgaggagccggggttgctrctgctgcttccggtggcccctggggtggaagtggggtaggggaagaggaggggcaggagggagagttcctgtgagcatgtggggggtgcctttcctttaaccagggaggtgaacactacctgcctcctgcgtgtattttccaagtgcttttctctgttgccacattttcctcaggttactcaggaaaatgctccagcatgtgcgagcacatgacctgaggttgcatcatagcaccaaaggaatcctcctgtcccctctgggaacatttcatgcttcagagggagaggtttttattgagcttgtttcacaatatccccttgaagggacagctcagctgccaatacattcaaccctttctcttccttcaggaaaatacctatacccaaatgttccctcccccgacatatatcatggcatgatttaaggcttcttttcacctgagagcttcagttcttctgcagaatggctgcaaatttaattgcattaaggcaagaaggaagctctaatgtgtgctttgtatcctaagataaatttgcttagaaaaccagagtcaagatttgaaataggtgaggcagggtttcctccttagacactgacagcattctcygtaccccttcaaatccttactctcctaaaggcagctgagtccgcgacagaaatttgccctatgtgagtaaaacatactttgggagaagaacttggtgcaggcaccaggatttttttttttgcccacgtgtttgcgctgtttttctctggagttctcaagagttggtgacttggaaggccgcttctgcaaggcaagtctcaggaacccatgcaggtacatcgcttgcacctgtttttagcttatttaatgacgggcttttgggaagagctgcccgcatactgagagacagcttcttataaacaaggagagtttttgtgtgtgcgagatctctaagccagcgtgggagggagcrcctcaggataagttattatattcatttcgttggtttctctcctgcccaattcttggcacaggcattatgtttgaagaaaccaggataaggtacactgcttttgtctgtttaatttttttagttgtttcccttcactttcagtcttccacacacaaaaaatacctcacagagcttcaccaaatcacagattcaggaggaatttggctttcacactggactcagataccttcttcagtgtgttggaaatcactggcttcacacaggcccaactccagctggtcagggcagagtgatcgtaactaaaggtcagtggggaatagatccgattcagtgcttttgccttatgcatttcagcatcctggctccccagggtggcaggagctgaggragggccacacactggcaagatttcaagaccactctctgcactgaagaggtaaaatttgcactgcaagtcacatccctgaggccagaggtcagtaccctttggtatttcgattagaagaagctgcaaaagaaaggcagcccattttaccattgccagccaggccggggacacaggagccggtgtgtgcactctgcctcctcaccttgcacccagagcaagaggactgggtgctgggctgcagaggccggtcagtggagcccctagcacgtgtgaactcaggcttttcattgggcccggctccacttctaggccatgttttgactcatttggtaaccattgcctgtaagcagcacagaattggtgccatggattatcttttccatgttgatggaattcattctgttggaatcctttggccagatgtcacttcagccagggtgtgcatcatcattggttctttttcacaggctgagcctcctgaaaacccatgaacgctggggctggggaagtgaaccctgaggtggggaccctctcttcccatcaaatcatccagctcagtgtggggcgtggcaggggggtaaatgaagccagccaatgtgttaacctgtctctgtcaacctaagaatgttggccttactgacacacctttgctccatgttcaagaccagaagtagctgggatttgtttgcaaattgggtaattagtttaaaaatctgtgattacatttttaaatgaaattttcaaagtggcctagattgaggtgattcagataggtttgcgaatataccattttatattgttgagaaagaacaaaaagggaatttccagatgtcctagaaatcctagcaacagatttctctggttgtcagtttccctggagaaggcgccagataggaatctccaatcagttgtttttctcttcgcttcaggcccttacacaaaagccatgaagagatgttcacctacccggtattttaaatgttctgtaaattattagccaaatagaactgtaatggggttgtatttatgggcgcctagaaagaaaacacaaggacttggtaggccrggaagaaaagattttaaaatttagaatgaatagcccttctgggttttctttttgacaattcttggacttgaggtaaaacaaggaggattgtggccrgatttcagatcccaaagccagcctccatcttaggcctttgcctcattgtgccttttaggttttcttacccaccgtctcctgttttgtcttttttttcttttctcctacccctatcttgggacattcagaaactgcctgggtggtttgagaagagacaacccagtttgatctgcaatacaaggatccattcgtaatctctctctcactgatgttattcccccatctgccgtcttggttcatctcaccacagaagggcatttagtcctacccagccatcggctgcgtatgacagcaggatggcacttcccatttctctgtggttagtgctcgagtgaaaacctctttcagctgagtcctctgaggttctgctgttgagtcctgggtggctgatggaatgattgaggaggtctggtcaccctcaagcgccgtcatcgccttgtttccatgggcttctgtcacacaaaatgaagaacagaaatgttaggacttaagagaatgtttggaattcacacctctttgcagtcctttcaaggctgctgctctgtgctgtgtcccatgcatgtgaaagtagagctgtgatggctgctgggacgcttgcaaagatcatgtgtgagaattgagcacaagaccacaaattattactgcttgatgcgcttgttaaaactctatctgccaggaaaccaaattttcttttcttttctttttttttttgagacagggcctcactctgttgcccaggctggagtgcagtggcgcgatctcagctcactgcagcctccacctactgggctcaagtgatcctcccacctcagcctcccgagtagccgggaccacaggcgtgtatgactggctacgcctggctaatttttgtatttttaatagagacgagtttcaccatgttgcccaggatggtctggaactcctgggctcaagtgatctgcccacttccgcctcccaaagtgttgggattatggccattagccactgtacctggcacaatttttttttgtaccctcctttatgccaagaatcagtcctaatttctttactatgtgaagtaacttttaaaggtaatagaaaaggccaggcacagtggctcatgcctgtaatcccaggcgccgtggctcacgcctgtaatcccagcactttgagaggctgaggcgggtggatcacttaaggtcaggagttagagaccagcctgaccaacatggtgaaacactgtctctactaaaaatacaaaattagctgggtttggtggcgcacgcctgtaatcccagctacctgagaggttgaggcaggagaatcgcttgaacctgggaggcagaggttgcagtgagccgagatggtgccattgcactccgacctgggcaacagagcgaaacactgtctcaaaaaaaaaaaaaaaagtaacagaaaaaagagtgaaatatattagctatcttttattctgagccaaaacttgacagatgtgggaaatcttcatatagtgtatgaaaatttcattgtacagggaaattattttcctctgtgtcttttcttttactataaagtgattcagaattttactgttactataaaattatgcaaagtattgtgacaaaactgcatcaatttgttgactattaaagtgctccttgaacattatatttcctgggtcttttctgtgtgtggagtcagcaaactgttttttgctacctggactttgtcttcttttacagctctggattcttaaaagtaccacataggtagcaaacctgtgaagggtatgagattttaccctacttgcaggctaataaagtgagcacaccacatgggttcatggatcctggcagaagttatgagactcataggtcagagacaaaggacagtttattatagcaatagcagtggccagattatcagcatttacactggttccctgagccccaggccccaagaagagggccaggtgagacctgcacacgcagtgggctgcattacaagaggaacccccatgcttaggggaccctggtatttgataatgggcagtaagcctgcctgacttttgctccagagacagacactatctctgtcatccaagactgttcactagataaacatccttgaaaatataagtctggaacctggcaattggtgtctattcttaccagatgtataaaaatgtgagaggccttggagaatcatatcccaagaatcagcagtttcttttactggacctttaagattgagacttgtaaggtcctgatgcagtgacttgtaaggtcactttgtctctcttgtgaatgttactgttttttctcttctgaggttatgaccaaagaatcctcaaggcgagtgatccttcaggtttgagacagccacatgcaggaagacaggacttgtagagtgttggggccaagtgtgtggttagaatccttggggtggggaaagagtttgttctagactccagtgtagtccttgtggctaccaggtctgacgtgccaaggacacgggaaagctgggagtgaggatactcatagtcatagcaccttacaccagaataaaagttttttttttctttttaagtgatgagagaatggctagtctgattttgccaacatgggctgctatttgcttaagaccttgatggtataaggagtgaagatgcaatcagggtaaaaggcggtctggagttgtggtgtgctggcaaaccagccctctggggcaaaaaattaaaaagccttgatatggagtgtttgctgatacctatgatgtaaatattcccgccatggccactttscagctaccagcaaggcatcctggcaccagggattgggaggagatggcatagtcctaagagtcagccttgggcattgggccatgtgggactgggcagtggggtatctggtctggttctaagtgctgtgatgaagcagtagcagctgtaatagctggcatttcccgtgtgctcatcacatagcagatgttattccaaggactgtatgttctttatcatccctcatttgatagacaagacaactgagacacaaaagggtgaaataaacagtaagtactccatcccaggccatctmatccagagggtgctgtcttgaccactctactactctggttgatgggaggcagtaaattgtccatcagtatacttcttcatcaaagctacatagtcaaaaagycacaggaggctgtgaggagaagctcactgctgctctgttgaagtctgtattggtttcctatggccactcttaacaaattaccacaacctcagtggcttaaaacaacacaaatatatcattctgtcatcctggacacgagccaaaggttgtcggcagaagcgaattgcttccagaggtgctatagggtgctgcccattccttgccccttttccgcttctagaggctgcccattttccttggcttgtggctgcatcattctggcygcttctattgtcacacctcctctctgaccctccctgcctccttgtaaggacacttgggattaygcccatccagataatctagaataatctcccattttgtgattcttaataacatctgcaaagcctcttttaccttgcagaataagatattcacaggttctggtgaggaggacagggacatctctgaaggggagggaagcaggagatagggtctggaggcatggaattggcttcctaaggccaattcaggctgacttcctagaactaagtcaaaaggaaaaccccaactttccacgctcaagtaacaaaaggaccagaggctactccctttgcaacctccccacccccagccccttttstgcatggcaggtgaaaaattgaaagtatcgctaattgatcccctcccacaaccaatcagactggtcttaggccaagtcttcatttgcctaggagtataactttgtaacttcagcctctgattggkcgttttacacaaccagtcagatgtttgtatagggtggtgtaactttgtaactttgcttcagcctctgattggtcccctcccacaaccaatcaaactgatcatggacctctgcttcatttacatagggtgtacaccaagtaaccaatgggaaacctctagagggtatttaaatcccagaaaattctgtaaccgggttcttgagctgcttgggctgctcccaccctgtggagcgtactttcgtttttcaataaatctcttttgttgcttcattctttacttgctwtgtgcgttttgtccatttctttatcaagacgccaagaacctggacaccctccaccggtaacaggaggagcattagtcagcctaccacagactccaacgaacgttttttgagaggaaatgaaagaatattcctaagttattgggtgccttttcttcaggaatccctgaaagtgggggtttgcaattttccctggattgaaaacagaaatgcttcctacacaaacatgattgagaccttgtactctaggtgtaaaaaaacagagtaggtcatactctgtgggttatggtcagagagatctggttagaagttcccaggtaggcgacagccctagatgtgtgacacttctaggagaatctctggctatgtggatacgtccaggtgtgtaaggcagcctcagggactgccaccacttggtcacatacatgtccctccaactaatcctagctctcaaggacaggyggttctgggscctgtgttgcccatgagacttggtccacggcaagcctgtgacggagtgaaagtgaggggacacccaatttgaaaactcggcaggaagccagactccatgacatacaaatagatcaaagtgaatcggctccgttgtttggggaaatacctgaggtttgttgtttcgtgccaagaagattaacaacacggacacacgtgggtgggttaaggagcagaaagtttaacaggcagaaaaaagagaacagctcccccatgcagagggaggaggactccgaatggatctccccattcctggcgggaagcagactgatatatagaggagggggtttgaagaggtggtatttgatttacatagagcccaagggattggtttgaccaggtgtgccatttacatagccctcgaagaaactggccattccaccttgatcttttattatgcagatagggttttttacttggccagagccttgacacctgcacacatggcaacaaacagaagggaggcgaaatcttccatattggatgcacctgtcttmcaggtgcagctrccggcatttatctgtgcaagcttctagcttgmttatttatgcttgcagcttgacttttcaggctgctttctgttggaaaagaaatggttttgggggctgctttttattaaaagaaaagccttaccaaggactcctgtaccctatctgcctaaattttttttaactactatattaaaaggtctgtaagtgggagctggccctaaaagtaggttgtagagattatttggatgtgccaacaagcttcatctgcagcttggactgtctccattggaaggcctctggcagattttgtaaaaagttatataacaattttactataggaaaaacttggctacagatatgaatttatattacccatcattggctggttccttatcctgaacattggtttccttggaatctgattttggcttgtttggcctttaaaaaccccagaagaatggggtttctgccagattattttctggttttcagtctcactgaatgtcacaaaggccttggtttatggttcccaactggtaaagaaacgtcaaactttgcctctcttagttccttctacatgacaatgggtggcagttgctcatatggaagcatttcttttccccctaaagcctatgagacaggctgcaacttaaacccctattttattaaaggagaggaaatgtccaagagcccagagatagtgggtaaaagcatcataaggactagaaatggggtcttcttgttgctaattagtaggggtgaggggtaagtggcagatgtgactgccrtccatgcccagacagggaattgtccttgaacctactcatgcggtgtcttctggggtacagtgagtccacagggcaggacggccttggagtcaagagcccagactcacattctatctcaggcttcataactcaattgctccatgaccttaagccaatttagttccctcatctgtaaaaatggggataacaactgaatttacctcatgggattgtgtaatgcccaaccttgtttttactaaccctgtttttagactctccctcttcctttaatcacctagccttgtttccacctgaattgactctcccttagctaagacagccagacagactccatcttggctctttcactggcaccccttcctcaaggacttaacttgtgcaagctgactcccagcacatccaagaatgcaattaactgataagatactgtggcaagctatatccgcaattcccaggaattcgtctgattgataacgcccaaagccccgggtctatcaccttgtaatagtcttaaagcccctgcacctggaactgtttactttcctgtaaccatttatccttttaactttttgcctactttatttctgtaaaattgttttaactagacccccccctcccctttctaaaccaaagtataaaagaaaatctagcccyttcctcggggctgagaaaattttgagtgttagccgtctctcggtcgctggctaataaaggactcttaattcgtcttaaagtgtggcgtttttctaactcgctcaggtacaacaattgttgtaaggaatgattgaattcatccaagtaagggaattagagcagtttctggcatgaagtaattgctcaataaagtgtgtcaggttttaagattaattgatctttacatcatgataaatggcaacaaaataaatgacaaatggattaaagtaaatggtaaaaacaacataagaacaaaacattaaaaaatcatataatagaagaaaccaaatattagtaagtttgaatatataaagtgaaaattactacaagttcaaatatatatatatatatatatatatatatatatatatatatatttttttttttttttttttttttttttttgagacagagtttcactgtgtcacccaggctggagtgcagtgacgtgatctcagccaactgcagcctccacctcccaggttcaagcaattctcctgcctcagcctcctgagtggctgggactacaggcacacaccaccatgccttgctaatttttgtatttttaaatagagagagggtttcaccatgttggccaggcgggtctcgaactcctgacctcaagagatccacctgccttggcctcccaaagcactgggattacaggcatgagccaccgtgcccagccgttaaaaaaattttgaaaaggtaaatcataagctggaaaaaagattgcaacgtatttaagagttaatacccttaatatattaaaaaatcaaatttgtaagaaaaaattcaatacatcaagagaaaatatataaagtacatgtaaaaggaagttccatattccaattatgaaaattgcaaatcacggttaaatttataatagccagtgttggttagcatgcacgaaaacagagaaacaggtgctgttgatggaagtgtgttttggtttaattttttggagggcagtcagaaagtaacaaaagtcttaaaaatgtccataaaatggaccttacagatgtccacctggtcgttccacctctagaaatttgtaagacaaataattcggccgggcacagtggctcacatctaaccccagcactttgggaggcygaggtgggcggatcacgagatcagtagatcaagaccatccttgctaacacggtgaaaccccgtctctactaaaaaatacaaaaaattagtcgggcgtggtggcacacacctgtagtcccagttacttgggaggctgaagcaggagaattgcttgaacccgggaggcagagactgcagtaagccgagatcacgccactgcactccagcctgggtgacagagcgagactccgtctcaaaataataataattcaacacagggtctcattctgttgctcaggctggagtgcagtggcatggtaacagctcactgcagcctcaacctcctgggctgaggtgatcctcccacctcagcctcctgagtagctaggactataggtgcacaccaccacacctggctaattaaaatttatttatttatttagtaaatagagatgaggtcttgctatgttgcccaggctggtctcgaactcctaagcagcatcattttttctaggtgttaaactgacaaccacccaaattcccagcataaggattctgcttaaaatatctagctctctgatgaaatatcttcaaagaatatttaatgaccttaaatctcagacaaaaaggtaaggagacaaaatgaggaacccatttccgtacaaccccaatttggaaaaacacatgtgcaagtatgcccatgttaaaaaatatagaagaaaaaaaggctttaaggaaaaaaaaaataatagtaatgatttagggtgggaatcgcgttaatattcccaataattttatatattttaaaaatctataattttatcaggggaaaacgttatgttgcggaaattaattgaycgattgagtgattggttaacggacagtgtccgatgactcatataatcccccggttcgagtccctttaggccgcagacgtttcgcgccttctcgggtgtccaagtcgcgcatccatacaatgaggggtaatatactagattacctgaggtcttcttacggtaaaaacaccggtgtcttaaggtktcccagtggaatttgggggccgggttgacttcggagctggagctcgcaaaggccggggctgctgcagattctgacgctttgtggacccctactaccgagcgcagccgcaccgcaggttttcttcgctgctggttagatccaaagcccatcccatcctagtaaactgggacagcgccgcttctcacatcactatgggggcttctgctccrtggcggggaaaggccagaactgctgccttaaatacgcttttgcatcatccggttgctaacctccggccacagcattccccactccaaaatgccacttttccaggtgtgtttgcctaaatttaccccatttacagacttctcaggtgcatcattgggaacagggcgctttgcagtttgcaaaccacctcagacaactccaggtttaaaggataaaggatgacattgtgagcaaagcggcatcaaaatttcagatatttaactttcacattctaaccatacacctttccaaggtcttgtaatactttcacattgtgaatatacatctttacaagacccagtagtacatgggtcaagtgtggcaaaacagacatcgcgagccagccaggagtcgaacctagaatcttctgatccgtagtcagacgcgttatccattgcgccactggccccgacttgctaaagccttctccgtgatagctgatcacccttatacagtttgaacgggcttccgggtaccaacgatccattttgcccttgcgccgcgctcccgctgctctgcctttccccaaaacgcgccccaccaatccgcagcggcttcgtcacggcgctcttcgtcgcactccaacccgccgcgtcggcggcatctctcgcgtgctcttgcttgcgcactaatttgtcctccaccgcctcccgttcaggccggctctcctgcggggcggggaaaggggtgggaagaggctgggagctgcggccgctgtgccagggtgaccggtagagttgtagccgaggtggcggcgcggggcggggcgggcggagagagaaggaaggaggtggttgtgcaggatggcgacggcggcctacgagcagctgaagctgtgagtcccacgggccagaggcctgaggcgcggcgggcggggcggcaggtgcgggccctggcctcggggagggcttctgagtcccggattgcagatagggtgtgggagctcctcgcatttaccggttttcctcagccggcgcggcctctcctaggcctcgcccgagtagccataggccgggaaccagcggctcgccggcctttctccaccgtgctcggccccagcgcccacggctgaagagagaagctgccgactggcccccaccgagccggggtcggcgttatgatgcggcccttcagggcacgcttgtccccactttctatgcagagctaccgactaaatttatctgtatgacttaacagagaaaaagagttttctcttacttaacggacctacagcagcaatttagagtctacgcacaaatcaacaaatctttgttttgcttacagcctatctgggtatcgaagcctgcctgccccctcttcagtgtgcagaaaaaatttaaagtacagtcagtagtcttaaggtcctgaaggagtttactttggtttaaattttaaacagctccagcctaaagcaggttcttaagtcagtgtcgacagccagaggctaatctcggtaattttggtactgcaaattgacttttcggtaaatccaagttcttgagtctttgatacagaggctgtggttgttaagagttataaaataggtgtttttaagggttttggtttgtcttggattaaaaacaacatgtgtttatttcccttagtgttacccattagcatccacacttttcttgtctgtgaataattttgttgtactcacttcgtgtttaatgctttacccctaggctgtttgaaaatctggtggccacagcctgggaatatctggtaggagaaacaaatgtaattttttagaagcttatctatccctgtatatgagctaaaataccttggcagttaggcatagataccgcatttcttttgcagggaaatgacaccaaaatgtggtttgggcacttaagctcctcagacctcaacctcactagtaactttctgaaaggttcagtggaaagttagaggtgcaaaattcagagaggtcatctattccacattgtatgtgttgcaaaaaagatgattgctttttctacagtgcaccccctgtgggtgccatttctgtttactgtaatgttctttgaaaaccctagctgcacacttccctccacctttccctattttctcccagttcccctttgcaaagtgctcacctcgtctttggtgaaagagttgaaggaagtgtcttccactgcgtttctggccaggccactgtcacatgtgctctgctagctaattaggttattgtgtatctgataggcactgaagggtttaatgtgatcctacaccaggtctcaaatgtgtttaagccatatggagccatggcttcatgcagcttagcgtggcaaagattgaataggatggagaacttgagaattatgatgattgtttttcagctgccagaacactaaatttaaccagttcagaccttaaaacaaacccaaatcctcgcatacataaaagagaaaggaaatttgtccctgaagtagtaagaatgatgtttttgtattgatttttgtgagaagtggaaactcttaaattatttgggtgataaagtcaaactggggttatgtgaaagtcattctctcatttgtcagtcctagctttttttccccctgaaaaaaaagtttagagtgtttctgtaaatgtgaaggtacaacttttttgcacctttttctttaccaaggggtttatgagttagagtttccatttttattccttccttttggcccttcctgctctgaggctgctgttgaaggttttcaaatgtggctcctgccctaaggagtattcttttttggatgcatttagaagtgaaattggtttctgtgtaagaattggtaggagatagtagccattttttaaaatgtgtctggagatgtgttttaagaaatatccatgcaaaagagatagttcgattattttattacaaaaggattgctaaaaggatttatttaaatgttgaaatgcttgttttttttttcttttgtttcgttttgtctttaaagagatggggtctcattctgttgcccaggctggagtacagtggtttgatcatagctcactgcagcctctaactcctagtctcaagcgagcctcccacctcagcctctcgaggagctaggactacagatgcacaccaccacacctgtcctacttcggattttaaataataattctgtctgcattatgccatgctttttctccagcccatctctgccttgttgaatttcacctttctaatgctctggttttatcctctactttcctgcttacaatttccagttccatcttactgacctataggatcaaacttgcatttcttagccatctgtatattctagcctttttataatctgtcgcctaatttatttcccgtaactgcccagagccttttccccacttctgcaaaacttggctcatccccttctagcttcaaacttgggtgttattttgatccttctacccagaatgccttcttcctctctgttctctttacatactggtcacatccatggtagagccaagagatctcaggttttgttagtcagaatggatatggattcatatcttaacttgactacttgttttgtgtcctgggcatagtacttaatccttctgaattggtgtttcagtctgtaaaatgggaatgttgatacttcacaggattattgtaaggtttgaaagagagtttttttttttttattatttttgtgagacagggtctcacttgtcacccaggctggagtgcagtggtgtgagctcagctcactgcagcctcagcctcccaggctcaagtgatcctctcacctcagcccccaaagcatctgggactacaggtgcacatcaccatgtctggctgattttttctgtttttcagtttcgccatgttgctgaaacttgaactcctcgtcttaagtgatccatgcaccctggcctcccaaagtgctggaattactggcatgagccaccatgcctggcccaaagagagtttagatgaagtacttagtgtacctcataggtaccttctttgagaaatgttttctttccatgtcttttccttcactgagttctggtaacagtttttaaagccaaaaatgaaaaattattgtaacagggttagacaccaaatgtttacatgatttatgtattctgtctcttaggatcagtttacagtgcatttactttctcatggacaagaggatggaaagctagaatggtcaatccatagtactgtttgaaccactcattttgtcacttagaaatgaaatcattatgtacaccgttatgtgactcttactgacagagatacattctgagaaatatgttagaaatatgttaggcaacttctttgtacaaacatcagagtataattacacaaacctagatggtacagcctactacacacctaggctatatggaatagccagttgttcctaggctacaaacctgtacagcaggttactgtactgaatactgtaggcagttgcaacacaatggtaaagatttgtgtatgtatacatacataaacaagaaaaggtacagtaaatatacggtattataagcttataggaccaccatcatatgtgtagtctgtcgttgaccaaagcattgttacatggcacatggctgtactttgtttctccaaccagtttacaccttaacattttcttctctagtcctcctcagtacctaacatagagccttgtgcagagcagctcctcagtgaatcaactgagtaaatgaaaggaactttccagtatagaccacgtactagcactgcaaaaagaacacagtctagggtaatttggaatgtatcgttttgaagaaacacagcttaaaagtcatttcatgtatattgtcttcccagtgtctctgtgaggtcataggttgataggtatcctgtcattgttgaaaacagtctcataattgcccttggccacaaagtcagatcatacagccaagccatggtagagctagccttggaatacggctggtccagagtccagtgatctttccatttcattgcattatccatatgacctttttttctcttaccagattgctctcgcattagtcctcagacatgccaggtattgaaatgagtcacttacaaccaaatatagttgacatgtccatattaatttccatatgtttaatgtggaaaacagaatattgatttgctcagaatttaaaattcatactttttaaacttccaggcagttctaaatatcctgttaggctccatttttctttttaagccatttgtataggcatggataatgtcagacagtgataaatttgaaattgcaaaataattagactggaaatgtaatttttaagaagcttatctatccctgtatataagctaaaataccttggcagttcggcgtaggtgtcacatttcctttgcagggaaatgacatcaaatgtggtttgggcacttcttaggcccctcagacctcaagctcataataactttctaaaaggttcagtggaaagttagaggtgcaaaattattggatacatttaaagcattttttcttctttttttttctttttcttttaaaaggtcagttgaaactaggtgtaaggcagggaatcctttagttactgcatcaggctgcagcatgcctctgaagagtactgtttcctcaggaaattgccatttttaaaagagtctcataactgtgaggtcatcagtcagggcagatatgatccaaccttgaaaacagatgtaacctaagctaccttgtgatacagacacatataatctgttcaatataatgaacattcatattattcacagaagtctcccggtggagggaagggtgtagggcagctcagattattctcatgagttttagcacagacaatatggggtttgtatccaaagcattagttggctgggagttcaggctagttcaggcttacctaggctcacgtggctagcctaggttagtgctaggctacatcaaatgacttggtatgcttgttttaagtgcgtattccagggccccacattaggcctactgagtgaaaatctctggggatgagcggtggaaatctgcaagtttaactagcta

SEQ ID NO: 96190 - DNA, 131059 bp, Homo sapiens
  misc_feature (1)...(131059): n = A,T,C or G
ttctctgcattgcaaaggctagaataatctgtgccatcgggattctgggtcacaattcaccaatgagaggaattttgtgagattttggaaagtggaagagaagcggaagccatttctcaccctgtagcagtgttgtgcaaggatgaagacttcagccaacagtagaggtgaggttctgccaggatctcctgggtgacctgcacatcattggtgctttaggcagctgaaatcaccaacacggtttcctgatacacctgcacttcagaattcccagaggttaacagtagctttctctaatctgtttcccaatatttcccagcaatattataagcctctgattccctgtattaaatccttcctacgtgaaacaactacagcagtttctgaccaaatcctggtgtattagtttgttttcacactgagactgggtaatttataaacaaaagacgtttaattgattcacagttctgcatggctggagaggcctcaggaaacttataataaggtggaaggtgaagggaaagcaaggcaccttcttcacagagcggcaggagagagagggagtgcaggagaaactgtcatttttaaagctatcggatatcatgagaagtccctcgctatcacaagaacagcatgggggaacccaccctcatgatccaatcacctcccaccagatctctcccctgacacatggggattagaatttgagatgagatttgtgtggggacacagagccaaaccatatcacctggctagcagaaatacggacaagcaaatcacaaacgaaaacatagaaatgccaaataaatgtaaagaaataaaatcataactaaagaatacaaattttaaaaaatgagatattattttttacttataaaattgcctacggtttattttatttacatatattatgtacttgtctagtttattataaacagtcaaagttggcaagagacaaacaataaataagtaaaaaaacaaaaaacaggttctgttatgtactcctattgggagtttatattttacatctacatttgtaaaacctttctagaggtcaatatctgttataacctcttaaatgttcataacctttgttattctaattttagttacagaaattaatcttaaggaaaatttggagtacaatattatatgtaagagtatttatcaatgtggcacatatacaccgtggaatacgatgcagacataaaaaagaattgaattcatgtcctttgcagggacgtggatgaagctggaagccatcatgctcagcaaactaacataggaacagaaaatcaaacaccgcatgttctcactcataagtgggagttgaacaatgagaatacatggacacagggaggggaacaacacacactggggcctgtcaggggatggggggcaaggggagggaaagcattaggacaaatacctaatgcatgtggggcttaaaacctagatgatggggttgatatgtgcagcaaaccaccacggcacatgtacacctatgcaacaaacctgcacattctgcacatgtatcccagaacttaaagtaaaataataaataaataagaggatttaccacagttcaagttatagatcagaattttttttaaagcctgaatatttaaatatttaatttgtcatgacatacagtgtcttagtctgttcaggctgctataacaaaataccttagactagataatttataaacaaaagaaatatattgctcgggaagttgcaaagtccaagatcaaggtgccagaagatttgatgctaggcaagcgcccattcttcatagatgtcgccttctgtgtgttctcacatggcagaagggcaaagaggctccctctattataacagcactaagtccattcctgaggatggaaccctcgtgacctaatcatcttacaaagaccccacctcttaataccatcacctcggaatttaggctacaacatatgaattttggggagaacacaagcattcagacaatagcatatacatagaatagaatcactgtggagctcttataaaccatgttttggtataaatgtaataatagaatgagttcatgatataatataagtgaaaaagtaagatatataattataggtacagtatgattacactcttttatataatgtatacaatgtataatatgtgaaatatatatgtatgcataataaatacatgtacataaaatatttcctggtatgtacatgtgtatatatatttttccatgtatataatttatacacattaacaaaaaatgagaaaatatgacaaatatttaacaatagctatttctccagtggcaggattacagataatttttattttcatacatttctgtctgacttttccaaatgtgctattatgagcataaattttataattaaatacaagtcaataagcattttaatgtgcctataacagcccatcagcaagtgaagagatgagataaaaatgtgtctgcacttggtacacatattgactttcttttccttccatttccagatgatattgacaaagatattgaaaaaatttgattaatatgcctcagcttagatttgctatgcgagagcaaagtcttattgttttaaaggaattatttgctgatcagctataggctgacttgacctcatattcctaccatgatagtcccacagtgtagggatggggtggtatgactcccaagacttggagtatgttattttctcagggcaatgaagatttggaaaaatgatggcaaagacagaattactatctcatcaaagacatccctcagcagtatctgtgggctgtgcagtgttctcagttcgataaaggattagaacacaatgcttctttggagagctgtgacttgatactgcatcaatacctttctgagaattgtttttcattttcttgcctctttaacttcttaagccttaggagaattagttgaaaagccaagtctttggggtagatactaacattaagtcttctactctgtcatttgcaatcataaattccagaacacagctcctaattccattgtgtattgttttctaagggaatgatagacagattctttatttttttaaacctctaagcctaccacacttgccgagttcctcactagtcactaagaaagtcctgccaatcaatgcatgggtttatgtccattgctcagctcttctccaatcagactcattcccccagcatccctgacacaccactctaaaatgcggctgctgatggttcaccttcctcacttttgtctacaaatctcaatcctgctgattccacaaatcctacatcaagcaatatcattttatgagtctttccacaaccaccccttcaggggattcttcaatttctgtcacaccggaagtcttcagagtatcaccctcagagccaggcaagagggaccccggctagggtttcaggctttagagagtccagctctgactccttttggccataggactaatgtgatatgcccacctggagcctgtgccctcctttctagaccatgccctgggactcagaatcccttgccccagatggccacacaatcactttcaggtccattctctctgggcagacaacatcacaaatgtgtgtaccccaaggcctgaggccaagaaggcagctttctggctgtaggggctgaggtgttcacacacatttgcatggcccctcaagacaaagaacaagggggaaagtgagaagaaaagaagcagccagtgatcagggccagctcttgcaacttagccatgttgggtcattctgattaaaccacttagctcaagtgtagtgctcaagacacttagcacattctccagctgaatttaccagtgttcatggactacctgggttagaaatatatttcactataaagtagcatacaaaatgagcagaaagggagttaataagattaataatagagttagtgaatattatgagctgagtttttgagaaacgtaatttctttcacaacactaataacaaccttgtgggggttcattgtctccctttaaaaattaggaaaccaaggctttgccatggtcgcataggagggtcagaatagcatctttatgaccccagagcatactcctctccactccacctacccatgtgtacaactcagacactttctgggatgtccacgtcaactattctttaaagagtaaccaacagatggatagttttctgtttgtgaatcaatggtaggtgactgaaaaattggttctgagaggtcgttttgcaaggattgatggtcacaggctgagaagcagatttgaaagacctacctgctagcagcatgaagagctgctcttccttatcttagtattaactagttaattattggaggtgggtgcaggggtggattatgtgtattcttaattgttgtagagtggggactgggagttacaaagacttttgcaattttcgaccttgcagagctgagcaattttcagttgctttgcttgctgatagcactgcttcccttatctaccatggaacacatcttaatgaagaatttgcattcacagcatcaggttaatgaatacaaaacaaaacagtgtatatccctctgatggatgggatttcggaagcacagacattatacacatatttgatgataaagtactagaagtgcagggaattgaggtcaagcttcctcctaaggggactgaatcccagagagagcaggtgacttagtaatgagaagtggagctgtctgttcaaccaggatgctcctcctatggcacgaaattcagttttaaaaatatattaaattcaaatcaaatgtgttaggtgtgagttctatccctacaggtatgaggcagaggtggaggactttgtatacaatagagaaataaatacatatattaggtcttccatgacataggatttactgaccctctcatgggcattcctctgaggcattttgagatttattgctataaaagagcctcccaaacattatctcacttagaaaaggtaatcatattaatatgattttgttcacaggagagaatttaagtgccactgcttaaagttatctccttgttcctaggtttaaggagacctagtaaataagaacattccactttgtctgcatcaataaagatgaaagatgacttaggaggtgggaattggagtgggaaacatttttctatgttcccgatattctgaaacacatgtgactttattcaatcacaaggtaaacagattatgtaatttaccagaaaaaaagtaataagactggtggtgctaggttttcatactccagctattaatgaattaaagagagtaacactcctgaaaggataccattttctcaagaaaactggaaaagattgtgtggcatttaaaaaataccaaactctgtggccataatgctcttaaaattcatctgtctaaagaaattagaagtgaatcatattaaataaggtttagatatgtccactttatcttcctgaaaatataatttcattacaatcagatttgtcatattttatctgattttacttgctatttaaaacaccttataatttacttgcatatttagaattacaatattcttaatatacttcttgatcttaacaaaacctaggccaaatgttaatcaaatcaagctgttcaaagttactttatagcacattcctatgaacacaccatacacacagcaatatctagcaagggtgtcaatttttcgttatttttaaaagctcatttaaagaagttatttactacaaatgactctacacacacacacacgcgcgcgcgcgcgcacaccacacacacacacacaaacctttttaaagaaacgctagaacccaaccccctctaggccagaggaaaacattacagctgtatacgcacttgtgcctgttgccgtagagtaatacggtagcagcaggagattacggtactagctgggctactgcctgagttacgtcagcgagagctgcaaagttccttgctattcttttctggtgtcggggagctgaatattaaaagggtgattgtggagttaccggttatctgcatttttttttcttttcttattttgactctttttaaaaaatgcaggtaaagtgacagcggttcaggagcttaaagacatcagtggtggaggggtgagtcagcgggtgcaaaaggacaaggatttggtgcctcggagacacggtcccctctccgcctccagagaagagcaggcaggcagctcccgggaccgaagccgggtccrcatcccccgcgcgcgagctggtggctcagcagcggcgcttcaggtgagtgcgccggggccggcgtcccgcagggccgagtgggtgagggcagacctcccccgccgtctggtgagacggaacccccacttttcccagcgcctcccgctttttccaccaggttttataccgrcccctctaccccacccccgattcccttacatcttctgcgaagttgccttctactgaacaagtgtctttttaaccctgtgtttatcaccctcgaggtaggaggaaaagggtttctgcagtggcacgtttttaataccacctgtgaggtctccaacttgcgattttaacaagagtctttgcccgaggtcccacctcagggcccaaccccagaaggcaaggtgggcacttcctcacgccgcgctgtcctgcygagtccctgcggtaggttcgcagttgtggaaacccaggtttcttacgcagatggtggcccccagcccagaaaatcgaaggcggcccctgcccgctggcatgccggcttaatgtttacgcctgcaaaatccgcagtgactgtcrcttgcaaagctccctctgcagagggacgtcctccccaccccgtyccccgccagtcccgctacggctggcagctggagcccctcgggtggccaacagtgaggcttggaaaggcgtcrtggacagacctgggtcgctttctgtcttcgggtccctcccggcttcgctcgggacctggctctcaagccagcttggctggtggacagaccggtgcgctctgcacacccgagtgcgaattccaccggcgtgagartgagcgtgctcgtggtcctggccctgaggtccctgggtcgcagctgttccctctcccaggccgccccctccaggtgactgcgaggcaacctgttctaacggaaaccgagtacatcctccagaattccccggctrggatccgtgcgacacactcgccagccgcagtcgcccctccggggcttcgaggattttaatttcgtggtacctgcgctcgaaatccagacttcgagcgctggagcctggggttttggggatttgttttttttgtttgtttttcgcttcggatcctgaactcgggcagaggtgactcagtagagtgcgctaggcaggttcccagtggtgggggcgcgagatgagctccgaagtcgcctccaccgctgccgggcgaagcagcttctggaccgcagaaccaacccggctcccaactggtgtcccccaacccgtcaagctcagcacagcctctttccctggggcgcctagctcaaagccgcctttctctttgcgctctttcaggtggacgcggtcaaacgatgccccgcagcctcctgggtctcagcacatattccacacctacgtcccctgacctgtgctcctagaagctggagagagcaggagccttcggtggggcagctcaaartgtaggtaactgcgggccaggagcagcgcccagatgccatcggtccctgcctttgagcgtcgacggctgatcttttggtttgagggagagactggcgctggagttttgaattccgaatcatgtgcagaatgctgaatcttcccccagccaggacgaataagacagcgcggaaaagcagattctcgtaattctggaattgcatgttgcaaggagtctcctggatcttcgcacccagcttcgggtagggagggagtccgggtcccgggctaggccagcccggcaggtggagagggtccccggcagccccgcgcgcccctggccatgtctttaatgccctgccccttcatgtggccttctgagggttcccagggctggccagggttgtttcccacccgcgcgcgcgctctcacccccagccaaacccacctggcagggctccctccagccgagaccttttgattcccggctcccgcgctcccgcctccgcgccagcccgggaggtggccctggacagccggacctcgcccggccccggctgggaccatggtgtttctctcgggaaatgcttccgacagctccaactgcacccaaccgccggcaccggtgaacatttccaaggccattctgctcggggtgatcttggggggcctcattcttttcggggtgctgggtaacatcctagtgatcctctccgtagcctgtcaccgacacctgcactcagtcacgcactactacatcgtcaacctggcggtggccgacctcctgctcacctccacggtgctgcccttctccgccatcttcgaggtcctaggctactgggccttcggcagggtcttctgcaacatctgggcggcagtggatgtgctgtgctgcaccgcgtccatcatgggcctctgcatcatctccatcgaccgctacatcggcgtgagctacccgctgcgctacccaaccatcgtcacccagaggaggggtctcatggctctgctctgcgtctgggcactctcsctggtcatatccattggacccctgttcggctggaggcagccggcccccgaggacgagaccatctgccagatcaacgaggagccgggctacgtgctcttctcagcgctgggctccttctacctgcctctggccatcakcctggtcatgtactgccgcgtctacgtggtggccaagagggagagccggggcctcaagtctggcctcaagaccgacaagtcggactcggagcaagtgacgctccgcatccatcggaaaaacgccccggcaggaggcagcrggatggccagcgccaagaccaagacgcacttctcagtgaggctcctcaagttctcccgggagaagaaagcggccaaaacgctgggcatcgtggtcggctgcttcgtcctctgctggctgccttttttcttagtcatgcccattggtaagtcttgaacacccctcactttagcatctgggggtcttcaccytcctcgkcttctgttaccccagactcccagtccgggatggaagaggaaggattagcatttcaaacagcacagctctagggcaattagaaaaggctcccttgtagaaaagtgaattttcattctctttctactccagtctcatttatattaggtcctagagcactttttcgactgtaaagtggcttccaactgatgcagattaattggtctctttaataagaatgtcaacttttcttaatgcctataagcacgtgttcaattwaaatgcatctgctcyctctagtctcagagtctccaccaagtgcttaggctgactgtggaatgccattttcactctgctacagaatgcaaattctcttggcctgaaaataagtaccatgcttattctggacaaatgtgtgattttattattgcattaggttattcataagggtttgttataatggtctgtttatgttctatatctgtgctaattttattttctggattcagtatggaaggaattatggtcagccactaagaaaaaaaaatgattttatgtccaaaccaatttaagccttaaataattaatcatagtatttccaataagtaaatacttatttttttattttaataataagtattaaaacaaacacttctcttatccaaaatcatccgggaagttgcagataacactgtttgaaaataatacagtacacataatgttacaaatccaatttttgcagatgctaaattagctgttgtcaaaattaattagctcattataagtatcagcaagctgatccacttggaatagacatctatctccttcaatgagatcccaaaatggttgtgtgctatttttagtttgtaagctcaaatacagacccaaacatcgattatccaccaactctaaaaaacaaaacattatgcctaacattaataaaagtccatttcaagtgctttacagcctaatttaaatggcatatacttaaagtactttaatttgcaactctgtggaataatagcaactattatttttttgtgccacttatgttccagacattttcctaagctttttatttcatyagtcccctcgacaactcagtgagttatacacaattatcctgcaatcacaagccatgggaagggattcttcaggttctaataccatagccaccagccawggatagctatttaaatgttaattgaaattaaataaaattctttcagttcctcaattcctcagtcccactgaccacatctcaagtgctccatagtcacacgtggccagtgactactgttttagacagcagagatataggtcatttctatcattgcagaaatgtctgtcctgtagggctgccagagaggccctccttaatccaatacctggccttccattgtgcytgcccatcattattacttactctgctcctggaagtacatcacagctttgaaattatagaaattacactctttacctgagcccctttgcacacgtattcatgcgtgtgctcgctcaacaagtatttatggaccatctgttctaggcactttggatgaacagggcagaaaagtccttgccaatgagacggttgtatttggaaagggtagacataagcaaatgattgtatcctaaaatgtcaagattaacatgcactatcaaaaaatcaacaggatgagaggctagaaagtgacaaagacaatgagggcctgctttagtgggtagtggggaaaattctgtctaaagaggtgatatttgagcagagtcctgactggactgaagagcaaagcttgcaagatctgggaagaagagcttcctgggcagagggagcagcgagtacagagatgggaaagagcctgacctgttcartgaagatcacagaggccagtatggctcaactacagacagggagggggcagtcaagttcaagaagagattggagagatagacaacaccaaagtcatatggggtctttcaggccaaagtaaagtttgcatattattctaattgtggtgggaagtcattcaagggtgtttagcaggtgagtggccagtctcatttatatttttgaaggatcattctggttgttggggggaaaattggctgtttgggggcaagagcagaagcagagactagttaaaaggctattagaagtcgaggggagagaggtcatgacatcttggactcaggtgagacaggtagaggtggtaagacgtgatcacattcagcacttattttacaggtaaagttgatgagtgtggacaagggtgtgagaaataggtaggtttagggcctgaatagctgagtaaatagtaatgcacttcactaaaactggcaaaaccaaagagttatgtggctgcaaggggctgcagggagtgagaagtatgagcctttcttttgtatcactgtgttgagaaacattcattagacatggaagtagagatggcaagtagggagttatacactttacatagatttggagcttagagaggaggcgggctacagatataaacttgggatatatcaacatctttaaagctacaagaatggagaggttgacaagagaaaagataaagagagtaaagagagataagaacagagcctctgcacctttagtcccagctatttgggaggctgaggcaggagaatcgcttgaacccgggaggcagaggttgcagtgagccgagatcatgcctgcactccagcctgggtgcagagcgaggctccatctaaaaaaaaaaaaamaaaaaacagagcctctgggggtcaggtcaggaaaaacaggagaaacagccagcaaacaagattgcaaaggagtagccagggagaagaaaaatcaggagaatgtgatgtcctggaagcctagtgaaaatgtttcaagaaggcaggagtaatcagctgtgtcacatgcagctgagaggtcaggttagaggaggactgggagccaacactagatttggcagtaagcaggtttttagygataggaggaaggcacgtgaggctcacaggtccagaggagtgatggaaccaaaagcctgattgtgtactttctagaaagaacaaaggataaaaaaagtgggaacagggaaaatagacaactcttctgaaaggttttgctatacactggagctaggagatgcggtgtagctggaggggtatagagagagctttcaatggtgggaggtggggatatgacatgatatttataytctgatgggaacgatgggatagagagaggcactgatgggataggcaaaagaggcaacgggattcagtgcccaaggggagcattgggaagtgacaaggagagcaaagtgtgtgagccctgaggcaagtagagacagagggagagagatagtgatctctttaggatatgtttatgtcctcagtgaaatatgaagcaaggtcatcagctaagagagagtcaggaatggggaacgatggcagttttagcctcagagaaggtgtgaaagattcatctttgagagtgggacagtaaacattttatggaagtttggtagagtcactgggaagtcctgaaggcctatctgagatttacggtcataacattaaagtacagcgggaaggagggttgtgtgtttttctctaagagctaagcagctgagggatacaggaggcaatgctgaggacctactgtgagtcccagagagtgtgtgtgtgaagagacacagactcggtcaggttagggagcatccacagccaggttgtagaaggagcccaggtgacgatgggtrgcctgagagtttggagcttgcagtggtggctgagctatgcatagagatgagaaacaatggcctgggtcctggagtcatctaggggaggtggatgctctgwctagtcatagcccgctcttggatttgctctcccagggagtcagcagtgtggaggagaagatgttgtggtggagagaagtggtggtagacaggagccctcggaatcactgggcttcttttaaatcctagtgaggtgccaggcrcggtggctcatgcctctaatcccagcactttgggaggctgagcaggcggatcacttgaggtcaggagttcgagaccagcctggccaacatggtgaaaccctgtctttactaaaaacacaaaaattagctgggcatggtggtgcacgcctgtaataccagctacctggtaggctgaggctggagaatcgcttgaacccgggagacagaggttgcagtgagctgagtcacaccactgcactccagcctgggtgacagagcgagattctgtctaaaaaaaaaaraaaaagaaaaatgatatgacaggagggaagtagggaacatacagttcacagggtctgagtagctgctcagtagtgcaaaggatccctgaacctgccagtctgtggctctcaatttcttcctgacaccaattgagtaagagatgatttcctccaagaatgtactggctatgyaataagcaccaggctctcagctacacagaataaaaaagatgaataaaacacagtgccctcaagggcctcacagtctagttaaggagacaaattgtcaacaattattgcaagtctrtgacataggtgctcagagtgatattattacatggtgctcaggatggtgctcagaatgatattattacagtgtgctaaggaatatagcagttcattgtgccgagaggtcactgagaagcttctacatgcatgaccattgacagagcagagacttaaagaagatggcactacttctgctgggtcgtcaacgagatgttatatgtttttttattaactgtcttaagtatgtttttcatgcaaaatgtgagcagaagaataaatatactatcatattattatattcaagggacatayattcttaaatatgacgtgctgttttggagaaaagggctgtcggtctgcactaggctgcgggagaggaaagagattaaaaactgaaaccagggyagggatgagtgtgctatccacagctgagaagtgaaacacccatgtttaatagggactgacccaggaaaatcaggtgagtaggctatttgactgcaaaggtccttcctgtatattgtgagaagtctcacgttcccttttcccaagcttctytccactaaggctgggttgcttgctgcattgaatagcatgactgttgggaggaatctgacttgcctgcttccaagtctaaatcttgctaatcttgttccatttttgcatcctaaatgtttggttgaaattcagaatgccttcaagggaggggggtgccatgtgcagttgttaacagtcatttatactttggagcaaatgctttcaaaagcaaattttggccatggagatgagtagagagactatgacggtgtcagccttcaacctacaaaagagaaggaaggataagaactctgcttctcaggaagctccagcatctaaagcctatgaatcatctttgttgatttcatctcattgtctagagcccactagttccagaggcagtgtgctgctgaatggagaaactgttggcctgagatttaaacctaggctttctttttcatataacaggggatgttatataggtcagctgcccagcatagtgcctaactcagagtaaatggtaataaatgttcatcttaccagaattcaaatgattcacagaccattactgatgtatgtcaacatgcagatgttgccatgaggggtggatgtccttggcattctaagaaatagaaagcattggaaagaagatgaaaaggcaacaatcactgaaaacatagttacgtgtctgaattctggatatgttatctgatttaaacacaaaacccagcgttattataggacctaagccattgattgctgttgccactgaatcaaaggaggcagcattgggctgagatgtggcttacatagacatagaatatttgaggattatgtttataaaagaacagraggcagcacattgatagagcagaaaaatgtgttttaagattggatgtttgaggagggcacagctggcagtggatttatcaggtggaggcaatgaggcagagaatgattcattcattcattcagcagtttcattgaacatatactgtttgccaggaagctatagaatcactggagataaagacaaataaatccctgccctaatggagcagaacatctgaacaattagatacctagcaaaggtatatgaaaaatgacaaggaaaaaggacaagtacatacaatgatatatgataatcccaaaccctctgcggatgcccaagataaccaggggttgagggttgcttcactgcaggtacaaagggagcagttccctagttctcatggaaaaggttcacctcttagagataatgrtgtgaagaaaaactagtgccattaggatttattttattttatttatttatttaatgacaggatctcattctttcacccagactggagttcagtggtaatcatagctcactgcggcctcgaactcaagtgattctcccacctcagccttctgagtagctgggactacaggcatgcaccaccatgcctggctaatttttatattttatttttatagaaatgggatcttgctgtgttgtccaggctggtcttgagctcctgacctcaagcaatcctttttctttagcctcccaaaacattgagattagaggcatgagtcaccacacctggctagaatttattttaagataagaagccagygtttcagttactcttactacaccacagaccatcccaaaaggtagtggcttaaagcagcagccatctatgtctcatgattctatggtcaaaagtacgtcagcacccagcttgcctggcaattgaagctggctgtgagtcttggtggcctctgttcccttctaaaccaccttcttatagcatggcagctctcccccaagaaagycaaggcagaaactgtgaggcctttgaagagctaggctcacacctggtccagcatcactgctgtttcattctgcagtcacagcaagtcaggagaccagcctaggttcaaggggaagcgagacagactcatctcttgatgggagagcagcaagtgtgtacacagaggggcagatcattgtagtcctcttgcagatcaccgacctcacaagtgtgccaaattacatttctctttaatccatcagttatattgagaacttcccatatgccaggcttcatgcaatgcactgagtaaaaccaactgggatctttgcctccctgcaggcttctaatctccagaaggagatagacattaatcagatagccacactaagttatcgaaaaccgtgtacagagcaatgaagggaacataaatggtgccttgaaaatatgtcctgtggctaagggtggtcctggactgggagggtagaaaggtctttctgggaaggagggcttgactattaagtccagatctattgaatgagtaggtgtttaaaggcaaaaatggggagggagggaagagaacgtgcgaagactttagtggggctggcttaatgtccataatgactttctagaaggycactgtggccagaaacaagaggccaagagataactggtgtccagtgaagctggaaagggaagaaccagactaaacaaggctttatagccattatacaagtttgtgtttttatccaaagatgagcaggaatgacatgatagagtttatacagcatttcaagattatcaaaggcttagtgaaaacaagattgtggatagaccagttgggagacctttatgcaggacaaggggagctgtatcctgccaagtgcaatccttctaccgtgccatttaaaaaacttatttccgtgagctgccacatcgttctggaatgcctcttttgtcactgccttcagagcttagatttatgasaaaagctttctcgtgatcagaaatagtataaccagacttggctttaaattaattttggctctttccacaagacaaatctgtcaatgaagatttaccatcattttcaaaagaacgtgctgcaggctcagaagacatcaacaatgagctctaacaatgctttgaacaatagctgactctttcaagtcaggctatagacaagtgagttattacttggatggagtaataatccttagtcacttagtaacaaagtcattgctgtgttctgtcacctcatggtttcatggtggatatgaggacagttttctaaggcattttctttgtctaacaagtttactgtattttagccctgctatttggtttgccagtttgacacttgcctagtggcttttcatttttatgttttctatttcttcgctatttgaatgtttcttttcttttcttatttttttctttaagttctgggatacaagtgcagaatatgcaggtttgttacataggtgtacatgtgccattgtggtttgctttacctatcaacccattatctaggttttaagcctggcatgcattaggtatttgtcctaatgctctccctcctcttgccccccaacccccaacaggctccagtgtgtgatgttcccctccccgtgtcatgtgttcttatttgaacatttctttttatatttttatccatcacttatatttctcctcttgtgaaatttcctatctgtgctttttggccactttttatacagcagtttttctgtctttttttttttatcggtaagctcattttatacattgaagataaatarttacttatttatcacaaatcctgggttgccagtcttctcacactatatgcaaatgtgccaagaagatgtagcttattttccaaaaacggatgtgatcttttctacaaacttccatggaaatacacatatgcatgcactcacatgcacacacacacacacatgcatgcacacacacttttagttaaatttaataaactcattcaaatccaataatttatgcatcatctttgcatattcagtctcttggatgccttggtgtcctagtccattcaggctgctataataaaatgccatagactgggtggcttgtaaacaggaatttatttctcacaatcctcgaggctggaagtctgagctcaatgtaccaacagatttagtgtctgaagaagacctaccttcatctttatggatggtaccttctagctgtgtgctcacttggtggaaggagtgaggcagctccctggggcctctttctgcatcacctcccaaaggccccatctcctaatatcatcacactgggggccaggattccaacataggaatttcgggggtggggcacaaacattcagaccacagcacagggcctttcagatctgccctctaagatactgaccacgcctaggggcttacaaatgtcatagtagtcagagagggtttgactatgactccattgtttcctggctccagtgacactggctctgttgctgttggccagggagtcactttgtccctgcagccctgtgaacaactttgacaacctcctgcaccaaattctcaacaatgtttccatcccagtctcagggcacagagagcctggtgggttccttccacaccacactctctaccccaccacactggctgccacaytaacaggtatggtggctctcatggaaaggactgactayacccagaatggagaatgggagaaagcacctctgcctgcyccccccscccgccccgctttaacttcaggcatttttttgttccagacatggtcttgctgtgtcacccaggctggagtgaagtggcacaatcatggctcactgcagcctagaaccctgggttcaagtgatcctctcttctcagcctcctgagtagttggaactacagacatgcaccaccgtgcccagccaatcttcaggcattcctaccactcttgttgagagagagggctcagaacaaatgccaactgcctctttccactaccttcttccccacctttctcacagtccctcagggaagacagggaagtctttcctcttccttgttctggctaaaggggacactcctcctcctttccagagtggcatccaccttctatggaatagcaaagccaagtggacagcagagagagagagaggcagagagagagagagaggcagagagagagagaggtttactaagaaaagaataaagatgaggaatattttaaaatattataatccttatacatatttaaaactatcttttccacttggttatttgcattttgttgttttatggtttttgcaaatgtttagacatttaaaatatttatatagtcaaatattttcatgttttttcattgaatgtgccttctcagggatgctcagagagaccttccacaatgtaagtctgtttcctcctcattcttttagagcatcatttgtaatctacctggaattcatgtttgtattttggyagattatgcctcacagtatttattttgaaatggttagccagatagtctcaaaaggcttatcaaataatccatcatttcctttcttatttggaaaaccacatttgttatattaaaaagaattttggatctattttggaatacactcgcttcttttccatttatctgtctctctgctctagtattgctgtcacattactttaatggctgtggttgcataatacattttaatattctctagkttaaggcctggatgaatattctttttcaaaattattttgtctattgtacattcattctgccaagaaaactctggattcattttgtcactccatttacttcccaaactacttttgaactgttgtttagactttagttttaagcacatctgctaacatctcctggaaaattgattaaacaatgawrttgggaaatgctgctttgatattttgacagatatgacactgtccattggttttagattgatatactccatcatatcaaagaaatatctttctagagtttacaaaactatacagatctagatttaaaatgtattttaatttgtttgcatttttaatattattcaataaaaatgaatttttaattttgttaaattaaacatttgctttattgatatccatcaatataatcttttttcattgacattgatttgataaaattttatttcatattattaacctttccatgtattcttggattaaattctactcagtcaggtgacatcaccgttattcatgttgctgtatcacaggaaatatttcacttctcatttgcatctgtgtttctgtgtgaaatgagtctattgttttacgttaatgcactgtctttgttacattttggtagcacgtttatgttaatttcataaagcgaattgtgacacttttcattttttttctataaacygtaacagcttaaataccgtaagaattatgtgttccttgaaggtttgaaaaacttgcctataaaacattcgggcccagctccttttatggatgcaattctttgagactggtttctatttcttccatggatagtggtctgttctgatcgtcagatttgataatctttattttcgtattttccatttgccttctcattgaggttcaagtttttagcatagacttctacatgaaattctgtaactttttatttctttgctatctttcttctttctttttgtctttgctcagactttctgaaagcctgtatattttattaatttttttcaaagaatccaagtcctgaatttattagtcattttaatctctttyccagtacattaatgtaatctctagagatttctctcttttattttctggttatattttgcttttcaatattagcttacccagaatgtttagttcatctattttaattctttcttgtctaagattaaaaacaatccaagctgtacatttgcttctacgcaaagtttagtttcttcccttatgtttgggtaggcagtgctgtcatccaatcagtctgccttcctgcttttaatatttcccttgtcctgtgtagacaggaaaggattcattgtgttgttgttgttgttgtttgttcatttgaaaatcattggtaattttatctcccactttctcaaatgtaatttctaatttaatgcattgtggtcagagagtgtgagctcaataatttttagcttatgggacttattgagattttcttaatgacttaatatgtaatcaataattaatacacaatagatttaatctttagtgtatatattaactaaacattaatagtggtgttttccagatcttctttatccattaatctttatttatcttaccattatctattatatactttacttgccaaatattgagagaagtatgataaagtttccctttgctaccaggtttcttcccactatttcttacatttttaacaagttttgctttatatatgtttatgtttttgcttcatgcataaaagatcaaatcaataatatcttcatttaaagatagactttttgttctatttaattatttttcctggatatgcacatttaaaaaaataatatttcaatctctaatctatttttattcacatttgttcaccattttatatagcagcttgtgtacttcacatcaaatggatttctcataatccatgtttctaatatgggtatttgtccttaataaggatttaactaattttcatttattgtgacagattatttggtrtgatttttgtcaacttatcatatgctttctggctctatgcttccttcgttttcactattttcagtctttcgtaaaacgggtaacttttttctttgctttttaattctgtggtggtttggaaagcttgtctcctgtttttaattttactagacataactttctagtttttcaaaagcatgtttaaaccttcagttctctctgttactccaccacccacctttgcccatggaaggtgagaagtttagcacactcttcttttcccttctctttaaaacctctatcttttagttaataaaatagtgcattttaaaactagattattttyattaaattttgtattgcctctcctgtcttttgtatctctctataatttagtttaccaattgtcctcctattatatattatgacttactcactcctgtgctctggatttttcttaatctcccagatggaacagaggtcggcaaatcatggcctgcttttgtgagtaaagttctaccagctaggttggccatgccctgtaattgacatattgtctgtggtgcttccatgcgacagtggtggacttgggtagatgctacagagactgtatggcccacaaagtttaaaatatttattattatattagagaagactatagcaccaaacaaaattttacctataaagatataagcaagggccatgtgcagtgactcacacctgtaatcccagcaatttgggaggccgaggtgggcggatcacttgaggccaggagtttgagacaagcctagccaacaaggtgaaaccccgtctctattaaaagtacaaaaattaggcgtggtggcacacacctgtaattctagctattcaggagcctgaggcacaagaatcacttgaactcaggaggcagatgttgcagtgaactgagatttccacactgcactgcatcctgggcaacagagcaacactttgtctctgacaacaacaacaaaaaagatataagcaaaacacattttctcagcccttccaggcctaaaccttaacacatgaaagacaacttatgtgacatagaattcaagtgagggttttgtttttcttttttgtttgtttgttttgcatttcaaaatactcttgttgcttctttgtttcttggcatttaatgcttcataaatgacgtgaggtccccttgattattgtttttttgtcaagtactctctttgtgtatttatttttcaactaagatgtttataaaatttttttctctattaaattaaaaagtatatatactggggacttctgtttggggtaacttttcattgctattgcttgagatccagtgcaccttttgctctaaagccaaaggcagcctcctttaatgatgatgtcctctgctctgatcttcctcttggaatttcaattcctatacctgccctgttttttttttgttttttgttttttgtttttgcatttctctctcattagtcacttttttactatttttttttwaatttccatttgaatttctcaagttcatgttccactttacttatttggtttttgtaatacacaatctccatattccctccatcccactccatrtggtgggcacactgtccatcttcgtcaccccctacacttgttttgtgagcctaatagctgcttaagtcttgtttgaatacaatttagagatcatcctccgcatcaccattttaaaggtgtacacttgctctgattcctgggatcaatctcctctattgaatagctgaagcttttcataggaacagtactttttctctttttcttcaacctcatagagggtgacctggtattaaaatttgaaatgggctttgtttgaaactgggtaggttcctcttcaaatctttcagatccagattaaggggagaaggaaatggattgtctttgttgtgattcgaatctgccagagtacagaactctttatccttcaagagatggaagtaacatgttttgattttgcacagcaaaggctgtttctcttgtctgtttggtgcagggtgtgtagtgccctctcctccgggtggcatgactgaccrcctgggcacctgttgtagagaacctccttygtctgctgaccttgcctgggaaagttcagggtccttcccatcctgcctggatgtaagcattgagatttacctttgacaagctggccytgatcctgtgtgtgtcgcagtttctgctctctcaagcccctggggctattcctgagaagctactggagccattccgtctttcccgtcttttgttgatgtgaaccgaggattcatcagttttttattcaggctggtcctaaccaaactatagtttcaagaaacttctcagagattctggcttatgaactttggctttccctaaggtttttagcagggaggtaaaatttcacctgtatgtgtattcttttagatagattgagaatttagaaagaggacctgagagttcagctccgtctggaattcactgcctgtgtgcaggctccttttcatggggatatcagagtgtgaagcagaagtgrgtcacccgcagtgcgattctctccttcagtccttcagaagtttgtggttcaagacaaagcagacccatcctcctatagcctttgattctcaacagttagaggaagacaactgtgcagtgagacagtaacagaatccctacacagttcagtaagctgagctttcccttgtggctgtgatcacaagaggattgtgtgaaacgtgtagagtttaatgactcttttcctaggaaagaagaagtgaaaccattcacasacctgaggatgtgtgtgatgtcaagcggtagacttgtcagctcaggctgccataatggaatacctgggcaggtatagactgggcagcttaggcagctgacattgatttctcagagctctggaggctggaagtctgagatcagggttctagcattgtcaggctcttggtgagggttctcctgctaggtcacagatggttgccttctccctgcattctcacctgatgaagagagagagagagagagctctctggtaccttcytctttgtataagggcatgaatctcattatgagggttcaccctcgtgacatcatctagtcctaatcacctcccaaaggccccacctcctaacaccatcacactggtggttagggtttcaacatgtggatttggggaggacacaaactttccatccatattagtggtacttgcatggcacttactgtgtctaatttaaatcccagaagtagccaggaagatggaggttgctatgctcatgtagagataaggaaactgaggcacgcaagggattagtgacatcttgcaggagctgcctggctgccttccctgtaacagaggaaaggggcctgtctacagttaaaagccctggaatcacacgtggtccygccctttgctctgcactcyggtgtcctcatctgtaggagaggggcttgggttgagccagtggctttcaaacttctcagcttcagaactctttgtgcaaaataaatcccactcagaaatccaagacataaaatggataaaggcagcactgcgctggtgaagcagccagggaaccctgcgtcctgaacactcagccctcccttcctgctggcagcggctgctgagggggatctggagcacaggttgctctctgtgctaacagtgtctgatcccagactcattaaatggtatcagaagaagtttgggaagaagtgtggtttgtattttcaaaggagaaggaggcaaggttgacaaagggcacatgagctgtcattatactggaatgctggcagagcagtcgtctttgcccaaaaagggtttgaaaagggaacattgcacattcactttttttatgtgctatccacatttagcttattgccagggcattcgttgccagtgagaaacctactgtctacaagtggactgcgtagtttagttcctcttaatgaaaaakgttttggacatttacctggaattttcatgttgttttgtttcatgagtttgctgtcatttggaaattactaaagaacaatctcagaaatgggtttttaaaaagaaactttaggagaggaaaaaatcccaggataataaacttttcctaaagaggtcacattagtagttctcaatcgggggtgatgttgacctccaggaggcacttggcaaggtctggagacgtttttctttttgtttgtttttgtttttgttagtgtttttcttttgttttgtttcttttttttatttattattattatactttaagttttagggtacatgtgcacaatgtgcaggttagttacatatgtatacatgtgccatgctggtgcgctgtacccactaactcgtcatctagcattaggtatatctcccaatgctatccctccctgttccccccaccccacgacagtccccagagtgtgatgttccccttcctgtgtccatgtgttctcagtgttcaattcccagctatgagtgagaatatgcagtgtttggttttttgttcttgcgatagtttcctgagaatgatgatttccaatttcatccatgtccctacaaaggacatgaactcatcattttttatgactgcatagtattccatggtgtatatgtgccatattttcttaatccagtctatcattgttggacatttgggttggttccaagtctttgctattgtgaataatttttgtttcgttttttgagacgatgtctcactgttacccaggctggagtgcaatggcgcgatcgcggctcactgcaacctctgcctcctgggttcaagtgattgccctgcctcagcctcttaagtgggtgggattacaggtgcctgccaccacgcctggctaagtttttgtatgtttttagtagagacagggtttctccatgttggccaggctggtctcgaactcctgacctcaagtgatccacccacctcggcctcccaaagtgctaggattacaggcatgagccactgcgcctggcccaagatctctttctgtcatagtgtcacaattggggtgggagatgctgctggcattgtgtgggttagaccaggggtgctgccgaatgttccacaaccacaggacagcccccacaacagagaattaaccagcccaaaatggcaatagtgccaagattaacaaactctggtttatgctacaggaattcctgaaatttacaaaaatacatcagaaacagcacatttaaagcagacatcarttattattattgttcagmttttgtttactgtgttgccaacatcttagctagtgattcaaaacaaaacaaaacacatgaaccaaacaaaccctgaggtctccagatgccttgaggtccccaaagaggcaatatttgtctactcactttgttttaattgtaattaaattcacataacgtaaaattcacaattttaaccatcttaaattgtaaaattctgtagcatttaatacattvgcaatgttatccaactatcaccactatctagttccaaagcacttcatgaccccagaatgaaatctgggtcccattagcaatcactcggcattccccactccccaagtgcctggcagccatcaatctgtatggatgtgctgattcctgatactgcatatgaatgggatcatatatgtgaccttttgtgtatacctcttcattttgcataatgttatcaagcttcatccatgttatggtatgtttcaggacttcattccttttgtatgactgaatactatttatttgtatgaatgtaccatattttatttatctrttgctccattgagggtcatttaagttatttctgccttgtgaccactatgaatagcattgctatgaacatccatgtacaagtttttgtttgagtaccagttttcagttcttttaggtatacccctaggagttgaattgctcggccatatggaacttctacgtttagctaattaaggaactgccaaattgtttttcacagcaaacgccccagtttacatacccaccagcaawgtttgagggctctagtttctctacatcctcaccattacttgtcattttttaaaatgatgtccatcctagtgggtgtgaaatagtatctctagtgaygttgctttgcatttccctaatgactaataatgctgagtgtcttttcatatgcatgtttggctattcatgtaacttctttggagttatatctattcacatcctttgcccattttttaattgggttatttgtctttttattgttgagttgcaggggttattaatatattctggatgccagaccctggtcagataattgatctgcaaatattttcattcgtgggttgccctttcacattcttgatagtatcctttggtggacagctgtctttaatttttatgacatccaatttatctactttttcttttgttgcatgtgttcttggtgtcatatatctaaggagtcattgtctaattcaagcttgtccaacccatggccaggacggctttgaatgcagcccaataaaaattcataaactttcttaaaacattatgattttttccaattttttaaagctcatcagctattgttagttttagtgtattttatatgtgtcccaagacaactcttcttcttccactgtggtccagggaagccaaaagattgaacacccctgacaaagttgcaaaaatgtatccttatgttttctcctaagagttatagtttctcctaagagttatagttacacttaggtccttgatccattttgagttaatttttatacatgataggaggtaagcttccaatttcattcttttgcttgtagaaatccaattgtccaagcatcatctattgaagaaattattctttctcccactgagtggtcttggcacccttgtcgaaattcaactgatcatagataaatgagttcatttctggagtctaaattctattccatcaaatggaattgtattccacatttcatatgtcctttatccttatgacagtaccacactgttttgattactgtagctttgtagtaagttctgtaattactacccactattttttacatctctaaaagtttaatagaaactttcaaaaagactacctctttttaaagaaaatgatgtagaataggacaggtacacaatgtctgtattcctaagttcaaaagctctgaaaattgcaagttctcgattaataatttggggccaaaatctgaccttatcagaactcatttggcagtgaactcaatctgaactcaggtgagtccatttgtagattttatattttacacgttgtgttgcagaaatatttctgtgtttgattgtagggtgctgacccatatcccactggtagtagtatacaatatacaacatatgatccagatgacctttataaaatctgaaaaatcctgatttccaaaacacatctaataccaaagtttttggaaaaggaatggtggacctgtatcacaatacttgttatctcatgatgctcaaaactcccatgatttttaaatctttgattagaaaaacacaaagggaaacaaataatcataacttgcttyatgcactaacatttatggcacaacacgtgttcgccaatttattaagcactttaccactgtgtctctgcagccattgtggtccgtttgtgaattccttcagatatttacacaatgtaaaatattgcacttgaatcagttcctttgttttaaactttgcccttctggatcatcccttaagatgaaaatgcccagcttttccatgaggcagttgcactgtgattctggtacatccaatcctatattcttagcccattactcattattcatttaattccatagttcctctatatgttgatgaggaggtatttttatcctcattttatctgacaaaaaaaattttgtctacatagttttaactgcctcatagagccatgttgatcatatggcaagcaaggtgttcaccatggccatcagttccaagagaaaatagacaatcctacactctctactccaaccctgatcagcccatgtggtttactggacaaagggaagaagtggacaaatgagaggaattgaagctgaaaagagccaggagaaatagagggatgagcaggaaactaggggacaaagggagtaaattattaacaaggcgagtctaatgttcactgagctctcagatgttgtcacatccagttcttatcctgcacttgctgatgaatcaagacatgttcacaaagcactgagcatctgctgcgggctcggttctgagctaagtcttctggaggtcaggaagaagaagagccactttcttcaagtctaatctggggaaaaggatagcacacttgaaacaatagtcatcaggacaagataacactcattataaatggtctaggaatccagaggggagatatgccaggcaggtcttaattagggaagtttccatagagggaaggagtctttaactgggtcttgaaaggtagaatttgaaaagccaatagcggatttgaaaagccaatagaagctccaagacaggagtgaacacagcacattcatgagcttgtgagataatccttgagtggtgtgtgtgtgtgtgtgtgtgtgtgtgtgtgtagaaagagagagagggagagagagagtcatggaaaaccagacttggtgggacaatattattatccagacttggtgggacaatattattgacccagaccagggatgatattattctgggtgtctttttgaaaaccagacaaaggttttggccatgaaatcagaggaagtggggagccactgggggtttgaggcagggaagcaacattgcagagcagtgttagaataagatccggtctgcagtgatcgcaaggtgtgttgaagtgagagattcaggctggctgtttaggtttgaatgaggacctgctcaggggtgtggcagtaaaatacagaaggtcggggagagaacagggatatttcaaggcaggtcaatgggaatcagagactgcgtctgaggaatcagagtggaattaataaaagaggcttttgagctttgcatgcagtagggattagttgtccatagacagagaggctgggagaggagttggttccagaaaacctttagtattgatcatattttgcctgaaatgatggtgtttaagtgaaactatctggaactatgctgtccaatatggtagcctctagccacatgtaataaattaaattgaaattgaaattagataaaattaaaaattcagttttgcagtcaggctaactgcatttcaagtactccatagctccatatggctaatgtccactgcattcaacagcccaggcagagaacatttccatcctctcagaatgttctgttggacagggttgacctagagatcagcagaaataattggcatttggtgaagaagagctcttgagatgagagtcatgggaatagaaaatagcaaagctaagggaatgggtcatctcctaaggagggctgaatgttagaatatgttggcatcagtaggcagaagaaaaaacaagcagaacttgcacaacgttttggaaaagtgggagactcaccacagcataaaatcctggcaacaaaaagaagagagaattttagtgaagagaaagtggcgccaatatcaaatgcagcagagaagtcaaggggaaagaaaaggagaaaaaaaatagcgtttagtaatctgaggtcatttgtgacctatcaaagctgatgcagagttgggaagagatgtcactaaataggaatgccaccagctttctcttgtgctagggtaggagtttgggatctaggaacagtttcagctgaatgttagggacaggaggcttgtcatggaggatgtggaaataaaagtggaggtgaggaacagagccaggacctgagaggacaaagcaaagggatgaaagattgtgctgtcnccatcaagggctccaccaagggtccaattttgtttttgtttttttccaagaaaagaaaaatgagtacagaaggaggggaatctgcaggcagtggttgagaggatttgaatgcaaaggatatctgggaaagcccgatgccttcacagttagaagggagtaagaaaggaggtgcaagggtggggtaggctttggtggctcagacagtgggtggtaaaggaaactgtaggtggccttgagactgtggtcctctgagattggaacggtcacttgaagccaacctgtcagcgtgatctgcctgctacttcccacttcccttccactggattctttttgtgattgctttccatttggatttcagtttatgctttatgtgctttatttcattgaatccatgtgaacatttgggggcagttgggcattttgattctcatttccaacctgaggaaactgtggtagagggtggttaagtaactggcccaggatcatgcagcaagtaagtgacagagtagaaattgaacctgttccctctggtgcccttaatgtcctctgtaktcttcacccagtgcactcatgcaaccagcctattcctgctatcrtgactggcttgctacaactgtgatcatgcccacataaggctgtgtttgctctctatagccataattctcctgtcattactgagaggtggaaaaatgtttgaggggaaataacacaaataacacttcctggtgtcaacccagcctccrtaggggacaaaaatgcttagcaactctttcaaagtatccaagacaaaacttgacctttaagcggtttctccatttagagttaaatttgtctttagcaaatatggtttgaataaatcaagacttcctgttttagctatttaatggggaaggtaatawttccaatctgattttaaatttttcttttgccaaatyccacagggcaagaaaaaaaaaaaaagaacgctaaagttcaggataaaaaagaaacttcccaagaagtgcattggtacaaaccackgctgtggtcatcataaatgtcttttacttttactttccaaaccaaagtctagggtttccatggtaactgctttggccccagctggtttgcatcatgttgtttgtatagaagccagtggagcagggctcgactgtgtcacaaagttcaggtgtcaatatggatctcccgggacaaataccagaaagaaaaatattgcatgcaacaccttctcctacccaaccgctactttcccaaaccccagcactctgctactgtgctgaccaaatgcccagggatttccagtctcccatcctctcaaagtcaaacctccagctgcatccagttgtgacttctgtatatgtctaactgtgtccattggaagggaattaaagcagcaggcttttaatttacaaatgttgcatccattcgaatgttcttgagcaatagtgtttcataagggttacaacatagattcaacaaccccagccaagtgcaaacttgagaaattgcagattgccttcctgtgattcacccagaattccagatggaaattatttctcaaggtcagtgcaaagctccgtacaaaggtgtctcctatagagaacatgtggtgtgaggctggaccgagggtcaaggcttccattcctgtttgctccttgaccttggcagagttagcctgcctccgagagcttctctctagccrtaggggaatcacatagtttgtgcctttcctccccacacacccttcccaccatcccaccccaagacctgctcctattttctaggcttggtgagggcactaaggaagaaatatgcctccttccgccaaattacttccatttcttaaaataaatcccagcttttctcttctgggaagccaccccagagtggactaagatctcaaaatatcttttatttactttattcaagaaacattgagagtctaccaggcgccagacaggaacagaccctgacttcaaggtggagactagcatgtaattaagcccaatraaggaccaaaatcattgtacaggtacagtcagaggaggctggttttccagtttgaagtttaggaagtcaaaaaacttcttcaggccgggcatggtggctcacgcctgtaatcccagcactttggggggccgaggcaggtggatcacaaggtcaggagatcgagaccatcctggctaacacagtgaaaccccgtctctactaaagacacaaaaaatgagctgggygttgtggcaggagcctgtagtcccagctacttaggaggctgaggcaggagaatcacttgaacccgggaggcggaggttgcartgagccaagattgcaccactgcactccagcctgggcgyagatcgaggctccatctcaaaaaaaaaaaaaaaaaaattcttcacagagaagtgaagcaccacttaactagcacccttattactttctaataattagcatgcatagtccatcattatatcatatgctttaaatacacaaatttgcttgcaagtctatcttgatatctattgaaataaaaatctctaatgtaaagacctggttttcattatactgggtttaatatctgacttgtccaggatagagctagtcacatggtgagggtcaggtggccttaactctggttccagagctgaggggacacattagaggacacactggtggtttacctgagggggtggccctatgcagacattaaggagggaggcctttcctctgtgtccaggtaaggaatggatccacatctaaggccaaagctacagaatagggacttgcacacagtacctttatcttctaccacttttttgatagtaatggcatctacatttttaccatttcaaatttttgaatgaccctggttctcccttgctttgtgccattgggaagcttccttctctccagggctcagttcttcaccagctgaatgatgaaagtggcttaggtgatcatcttgtaagctctaaattgtattccataggcctaacctgaatcagtcttatcagcttggaatcctcagggcctaagcacagtagtaagtcctgaataaatatttgttcaattaaattgaagagactcaaagtcaagtcctgcattattggagagcatagagattccagttattgtcctctatttcagatgagcagcggggtgaagggtctggattttctactcatcactaagcctcggaaggtggtgtcagtgactgggatctgcttgtaagctgctccaacttggcttcttcagatatagattcatacagagcctagacctgtgccttgctttgttaaatatctgaatgtaaaaaggaaaaatacatcaattgtccaaagtacttacatgtggtcttataaactaaagaaagtaaccacatagatttctggtgcctgaaaaaaagaaaacatgttgtagaacatctgtatcattaaacgcctgtcctggtttgtactcaactacttggcttaactttgcacagtcctgagaaatacaagtcttgtgattggtatagacagccaactggagcaactcaagccggaaaaacaacacaattgtcctggttgtacattgcactgcatacaatcactaaaagacaattctaattctgtcttccgtattactttggtagagactaaagtaatgtattgagataggaatcaaaggcagtaaaagtgggaacattctgagcatacatgggaggtactgagcttctactcattgagccttctccaaacatgtcagctcactcaggtgtgtgtcagaatagcccttgcaaaattctctcataaagcaaagcttttttccytgtgctataacacatccccactgtgggcaccggttaggcctcrggctatctagcccaatggctactgtacactttttttttttttttgagacagagtctctctctgtcacccaggctggagtgcaatggtgccatcttggctcactgcaacttccacctcccaggctcaagcgattcttgtgcctcagcctcccaagtagctaggattataggcatgcaccaccatacctggctaatttttgtgtttttaatagagatggggtttcactgtgttggctgggctggtctcaaactcctggcctcaagtgatctgccctcctcagcctcccaaagtgctgggattaccggtgtgagttgccatgcccagcctggctattgtagactttaataggactcttaatttgactttaatgtgactacttctcttcctatctgtgcttcttcatatagactctgcacckcacytggagatattttatcccacataatcaatgtcagacaaaaataaatttaaaaagcttttttaaaaagcctgaagaggtccaggcacatgcctggtagaggaaggtgaattctatatgcttttttttttttctattgacaaggacaaatatctctcagcacttatatactagccattgtatatctacctttgtttagtaatcacagttctattaggcagagtgaggtgagggcccattacccagttaggaagtggcaaagctgagattcaaaccaaaacccttggattctggaaccaagggctttcccctgtactatgctgccttcctgggctggtcgtttgcccttctctcagctctttggaactgcattcactggcacacagtctgaagggacctaagsactccccttcacttgccactcagcccaaataccactgctggcccctcctgaagagcacagagaagagaatctccttctgaacaatgagcagagattttgtttaaaatttctcacatctctttgtagtttatttttgtaaacttggcctataagacgctacttatttgctcttatatgtgttacctgcagttttaagaaagaactaccagaccaacaatatcacttkggttttggtttatgtagcctaaataactcgctacacgtctcttcttaaagtgtttaatgagagtttttagtgaaatttgctgttttgtggaaatattcacactaggtgatggattatttgaaattttcttcctaatgcagcgctgctgtgtaagaacatcatcattgttcagtttggtgggttttctcttcamggtgtagataacagtagaagggacttttgcaggattagcatttacaatgctttgtcagtcagggtcatgggattagactcactgagtcagtcatcagtagctccattaactgagacataaacagattcattaaagagtggaatgaggtccaaagttgatgtctttgctgagggtcacactgagctaccagctgcatcatgagcatctttagaagtcagcaccttggcaaaagacatgaagaccaaaatcaagaactacaagactgccccttttgacagacgcttccccaaccagactaggaactgctggcagaacttcctggacttccacctctgtgagaaggcaacaaccgctgaagggtgtgatgtctctatgtgtgaatgataccagtgtgtgtacaagttcttctgccctgctcctgggtttcagtctaggatgacagctgggctaaaggcacatttcctggaaagatctgaactggctgcatcttacccctcctatgtccttcatccttctcccaggcaaagggaaacctgggtacatggtgatcctcaccctggggccctgaatcatgacttaactatgaataaaaatgctttggaaaagcagggggnaagaagtggaaataacaaaaaataatgaatcagggagggcattccagggtgcattccagctttgtcagtaacccctttgaccatgtcactgaatatctctatgaggaattgcatttcctacctgacatagtttgagtatatccccacccaaatctcaccttgaattgtagttcccataattcccatgtgtcgtgggagggacaagtggaaggtaattgaatcrtgggggcagtttcccccatgctattctcrtgatagtaagttctcacaagatctgatggttttataaggggcttctcccttcgcttggccctcattcttctctctcctgctgcsctgtgaagaaggatgtgtttgcttcccctttcagcataactgtaagtttcctgaggcctccccagctctacrgaactatgagtcaattaaacctctttcctttataaattacccagtcttgggtatgtccttctagcagtttgagaacagactaatacactatgtgagaaattgggtttgtaaaaactgccccaactacctcaaaatagtgttgttggagaggaaaagaatttgcacactacaaaaagttaagtgttataaaaatgtaagattgtcttgttacttagatcacaaggcataaagaattgctagctaaagtagtagccagttcccttgtgatgagttatataatggtgcagtcagttgataagggtcaggccaccaaagaaaataagtgtttaaggacatatacggcaacatgacagagtaacttgatttctatgaaatgtagtaataaaaataggggcttgtatttgcttgacattggctttctttttaatttcattgtttatgatttatttttcatacacttaaaaaacatcatggtgcacaatggatttgagaaaaactggccctttacacgatgatttgagagcttggtatatgtggcatcaaaaatcccaggaaacaagtgaagaattaaaatagaagtctgyatgttttacctatccagcaaaaggtggaagtggaaaaagtccagagttccaactggatgggtcagttctctgccagatgttggtgtcctgtagacccrgccagaggacatgctttgatactctgcccttggagatgcactcagtattgtcagaggaatacaggtccaaagtgaagaactatctgactgcaggggctgatggctcttctgggctggtgggatctacgtggagattgctgtgctctacaaggctaaataacactcatgagaatctatggtcaactgaggaaagagagaatgttaatttccatgtctggaaacatcagaaatggctgaataatcagcagatgtcctgatttgtgttttggtcttcctatctgtagatgaatgcaacttaaaaacacatcctaatatcaaataggaaaagctccccctttccacccatctcattttagtttttcacctataattattcttccaggtaaaatttagaattattttgtctagttytaagtaaactctttgttgaaatgctgttaatttataaatcagaatggataaaactgatatcttcacaacctaaagacttcgatcccagaatgtattacttctttcaagtcagttcatctttgtagctttctctattgtttattgtatacattgcttattaaatgtatcccttggtattttatagttttgttgctactgtgagtagaatatttacattctaattacaattaatgctggcatataagaaagctatagattttaatatatttaacctttacccagctaccttcctgctttcttattacatactactaataactttttccagctaataacttttgagttatccagacatacaaaaattatcaatgtttactaactctgctcctcctccttctcaatacatataactcaccttttccttggctcattgcattaactattatttccagaacaatgctaaatacatgaagatatcctattgaaatataaaaggctttcttttcatrtcaacagaaataagttattttgaagccatatgccagcttcctcttcctctccatagtttcttaaacacttgctgatagaaacaaaatctcattcagagaagtatgaaagacagtcttgaggaaaatatgcaagccgaatgaattgtctctgctttgccttagcaatatggtgctaggagaaggtgggatttagggactgattgtatgtctacttatcaggttcctacatgttttacagcagcttaattgctctcaagaggagtgactgagtcattgctgagcttcttagtttgtgctgggtcagagcagttgcctgaattttccagcaccctatgcaaagttctgccatggagatagctgggtgtccttctgaggtgtttactttgaattttatttttggttccagtttgaacccatattcaaggtacccaaccctgacaagcaaaagggagacaaaatttatctcttggttctattcccaacccattcaaaaatagaaggcagtcagagttctcaggagctaagacgatggggggctgggttgcatggcttccatgtggcgaggtcaagggaaatcatccggccagtgtcactgctgtaactgcccaggctgagagtcttgtctgtttcccactggaatggggtccagtgagkcttcagactcaccagtgttagaaataaattttatactctgagaatcagagaccctcttttcttctgcctactctcatcctttatcgatttccacacacacgtatatctataactttactaatatacatacatgtgatcrtgcacccgtgcaatgggcgctgcagtgtgccttctgtgtcccttccctatggtgctgggagggccaatgcctggcagctcccaactgtgtctcactcctggtggctgcccactgcaaatgagagtctccttcttcctgcaggcagccaacatccaatgactgggcagctgtccagagcaatgctgccttccccgggatgggctgaggcttttgtcctgactgcatggcagcccagcttctccttccaccccatcctgcttgcctccctcccccacaggtgtgacaaggagggcacatcctcctgcaggcaaacctccgtctcagagtctacttcccagagcctgtttctcagtctacttccctgccctagacaatctgcttgaactgttaaagtgtcatcatttttctcattttcttttcttttttgtttgttgggagcgactaacccctcttcatctcttgtgccatacaccatcttcagcttccttaatttctcccaagaaaacacatgtccacaacctgatttgtgtctgccagtgttttcattaagttttctctgaacggtgtctgtagtctattgtattcctcctttcctctatcaaggatacttatctagtttccagacttttgcctccgcaaagagtgcacattgtttacagaggtccctttatacctagatgcttttacttctatgggagagattcctaagagggggatttctggtttaaagggaatgcgtgcttgcaattttaacgatgttgccaggtcactttctcaggcgtctgggacagggtttcaccagcaaggcaggagagcagcctgctgcttgttctcaccatgagcgtcccacctggagatcccacctgaagatcaaagggctaatccactccaaagacttcgttcccaacttcaacatttctcgctgcaaaccgaatctcctcccttcccttgtgaaaggaaggggagattgggagggggaagagaaggctggtgggccagaggagcgtccctggattctcagatggctccttcctctaaatggatgagaaatgtggggtgagaccagcaggcctctgtccccactccagcctacaaaccacacggccaggcccaggtgtctcttagggagaggtgggagccagcctggagcacaggactccacagggcagggagcccacagcgcaggggcggtggctgctgacagccccagagaccatgacaaggagcactagacagcaaagaagatgcaaggatggaaaggaagctgcatgcagcgtgttccccccaaggcccaaaagggtccttcattccctgcgagtgaaactatgttcttcttgtcctggaaagaaaacaagaagacaattggcatgtggctgatctacccaggctggaaagaagaaagattgaagtgactattctcaaatttaggaaaatctatttaggatatttggacacagatgtacctcctccagtgtctaggacattgggtgtgacctgacacttccgtgacctctacaccctttccaaactggccatgatcagtggtggggtgtgggcagggggttggtactgggcaatcccagcagagctcagtatcagtctgcccacttgagcactggccatggcatagcaggctctctctctttctctctctccttctctctctctctctgcctcgtcatcattggcatctcttctccccttacttgtgtgtgaaattaagctgaccytatatgctgtttttgtgacacagaatcatccataataagcatttcataactcaatctgtttctgccaattgttttaaatctctcttattagctatgttaggcatgctattatcttaatcttcttaacatccatatgagagtttgacaagtcagcaggggatcttgcctttgctgccaaggatatgtgattaggttacagctccagagactgtgatggcagagccccaaccaggccaatctcctaagtatatttctttaactataaaagacctcagtcccccaaagtccaggaagtaacagtgcatccatgagaacaaagacacttctacagaccagtatctggggctttcatccagtcatttaactttgtgtatataagataaaaagaaaaaaggtgagaaagactccctcccgcccgcaatgaccctaacctcatctgggaggctactgcaacaacccagctttgttctggcaggctacagaaacaattttaatattccaaaagagttaacacaagcccagagggagtagttgacactctggtagaacttgaatcatgctttcccctaggatcatctcagggtaagaaaataatttgagttttggcagctgtgatgactgtgggtagaacagcttatttcttggttaattccttaaataaaccttcatctttgcaaattcttgttacagccacaactgatgagaaggttcaactatgctgtctctctagccaaaccgtctttggtttaaccctctgttaactcttcccctttctttgttaggagaatattgtctggcttcagggtgtcatcttttcatggccatttatttccctgtggtccagtcatgtgttatcctagaacgaacaagggagtcttgattagtacatttgggattctggagatggcagaagaaaacaaggctccaagccagctttcagactgcaagatcttagggagcatcataataccacagccaagttcctcccctttcttggaaataagggtttcaagagctgccttcaagctttgagggcaggtgcagaagaaataaaccatgaagcatctcttccaataccagtcctgtgtgtctacccatccttcggctttctctgcaggggacctgcctggaagcaatctgagaagcagggtcagctctgggtgggaggtgatacattaacagttttgggctaggctgggttattgacagttctgacacagatctcagaatggagtccattagaggcccaggacagtgctcactctaatatacacttagtgctgtcttcaaacatccgacattccttctccctgaaataccacaatccttccccacccacccccaccccccagacacacacccttgacatttaggagtgtggagccactatttcccaaatgtgttgacctctacttggcttgtttgtaccttagctaaggattttcatgttcttctgcaaaaacttaccaggggcagcgtggggctgtctataagtgatgtgttatggaattgctgatttttttttccaggtttcaattttctactgggttgtccttctgaattccattgcagcctttctgcctatatttataataaactccaaatacagggagtgctccttgtttccagatgtggaatccaggattatgtaacttggagctgtatttctttgagaggtgattaagcatgttatcatattatcatattaccgactattcacttgttatttttcctttcgtcattcattcaatcatccttctttttcctaactatattttttcctaagggtaaaatttataatctaattttaagtaccaaggaaaattctattagaatgacatatttattaaaaatatgagatggattgggatctttgccatatctttgctttaaggagcacacatagcttattgtttcctcacttttgagaaagttccccaggcaccatcttgttttttgattgttcctttcccagggcagttctgttttatacacgccaccagtagccacttgaatttgccttgctttgtagccactttttgtcagcctatatttctctctctctttatatggtcttgtgtcaagcaggatttatctagaccctggctttggcattaggtgagtctcccgagcattgtgagtggaggttcagtgcctgctctggtgacaactggaaggcaccactgctcctagtgtgtttcccagctcccagcagtcatgtatgtcatgtggctctgatgtactgccatgtgacgcttttacaaaattatcacacaccagccactatacacttgatgggcaccatctcatgcataaaaccttataaagcaggtactgtgctttttaaaattataaagaagaaacaaaagaatcctaagattaagcgatttggctcacagggcaggtatttgggaaaggcagggttggaatgaggtcctgggctcttacccagaattcctgcatgtggttatcacgtgtccctagcaaatagccataggcatgatgattgttttcagtgttcaggtcaattgaatactagatcactgaccacaaaggcttgaaataattgaaatattcaccctgtgacttcatttaatcaaggagagttcgacagagaatgtgatcctctaaaatccagaaaatgttgtcatattatgcgaatgccagtatcacagaaaaataaaattaacagaaacaaaatcagtcctcggcatcacagacctgtgcctctgccctacattcttaaaccctcccttctttccccagctgatagagcttgctctctggagacaagaagcacatttaggttaaggtgttaatgactgaggaaggactcatgtattatccttctaggtgtgtagtgttttttattttaacagggatagggaaaagggaagggagctagcattcttgagcctaacaccaaagtttgtctctaatgaggacttgaagctttcgtaaccatggatgagtaggaggtatttgtttagacagtcatctttattctcgacaaaagaaaaaaaagaaaaggcagactggtgtcaagcactccaagaacagtttcttaatacttgtgaagtaagtggtattattatctgattttacaaataagaaaggccaggtgcagtggctcatacctgtaatcttagcaccctgggaggcccaggtaggtagatcgcttgagctcaggagtttgagaccagcctgggcagcatggtaaaaccctgtctctaccaaaaatataaaaattatccaggcatggtggcacatgcctgtgstcccagctactcaggaggttgaggtgggagggttgctggagcccagaaagttgagggggcagtgagccatgatcacgccactgcaccccagcctgggtgaaagagtgagaccctgtctcaaaaaaataataataaaataaagtaaaataaaaacaagtaagaagacagagtctcagtgctatgatctgaatgtttgtgtccwcccctccccaaatttgtatgttgaaacctaatcaccaatgtaatagtactaggaagtgagacctttgggaagwgagtaggtcacaagggcagagcgctgatgtttgggattcgtgtctttatggaaaaagcccaagactgggcattcctgttgctaagaaaaaataaataaattgagcattcttgttgctaaaaaagaaaaaaaaaagaaagaaaagaaagaaaaaccccagagcgctgtcttgtcccttccaccttgtgaggacacggatagaaggagccttctatgaaccagaaagtggacctcaccagacaccrcaactgctggtacctggatcttggacttcctggcatctagaactatcagaaatatgtttctgttttttatatgccagctagtttaggacatcttgttatagcagcccaaacagactaagacactcagagaaattaagtaagtatcacatgtcactaagctggcaagtggcaaagctgagatttaaatccacatctgtctttaacatttccattcaacctcaacatttcccataaacaagttttggctgcaatgagacattatgattatagctatgttatcatcttgtggcagtttttagaaaaacgcaagtatttcataaatatgaatcattgttgtattgtcataataataaaaaggttaacctttatttagtgcttacaacatgccagatactattttaagcacattgcatgaatcatctawtttcttcttcacgcagtaccatgagggagattcagttcttgccctccattttacagatgaggaaactgagggttagtgatttgcagaacgggcacaatcatacatagctgtgtcctccctcagactgtgtaactgtaagttttttcatttttcctaagatagtgaaatgaagaatgctatagtaattgactgaggtcttatgagattatctcttgaatctatttccagttgggaactcggtgtttctggttggcagatagctctcctactggtcaaattcaggaatcagactgggagaccctcgccctaggcaaggcttggtgtaatgtgctagggagctagcaaaagacccaagatcttgctgtctgtctggggaggctaacaggaacatgccaagaaggcaaagcaaggtggcacatgctggatccaagggcatagggtcgatgagcaccgcaggggtcagactgggaggtaagcacagacaaagatgagcacaggtccacaagagttttaaggcctcatggaaatgtttctatttctttaaaatcaagataacaaaatagactttttggccaaaaaaatatatttatatacaatgtagtcatctttataccaatagagttataaaatataatttttaattttttgcatggaagaaggagcccatgaaggcaagagtcactggagccataaaagtcataatgtgaccctgccattgccctctggatgcaggtcactccaaggcctttgcaggtggcagagccacaagtggaaggagcctgggtccctgaatttggtctgcaggagaattgtttgccagtcagaaacacccaactatccactggaaatagatgcaagagatcactcatgagactttcattaattactgtagcattcttcttttcattgtcttagggaaaaaaatgaagaaacttaaggttccatggcctgaggaaggccacagaaggaaactcactttgagctgagctttgaggggcaggaagtactagctcagctggaatgcaccctctgttcatgatctccatgacgaaaatgaactcattgtgtaagtgagctggccatcttctcaggaagaagaggtaagcactctctggacagaatgtgtttatgtgtttttggcatggccagtgcccagctcagcacttgggacattgtaggaattcaaggaatggggctcatgtcctcatgcaaacaccagtgcgcagaacttggaagtcgattttctgttttaagcaggtatcaaacaggcaatcaacactgtgcctagtatcgaaccagaatgcccgcaggatacaagggagactgttccttaaggattgttaaatcaggagggagagtataaattagcgtgcatgygcaattcatatatcattacaagctaaattttgatttttcctaaagaatgacagttgctctgtgaaggctgacatagttgaaaaagactttttggaggaagtgaagcttgatctgggattagtgaataagtgggatataagtatcaaaattaggaaattttgacaaggatagctgacaactagaagttggggtaatatggcctttaggggatgagaagccccacgatgaccagtgaaaagtgttcctggtccccttataggaaacgaagtagggcggrattagaaaacaaagaaactccatcttcctccctacccaccctccccattttttgtcaaacaaccaaactctcccacttgagtgtttcatggaagaatggttaaaggcaggaagaagagagaagaaaagaaaargagctgagctacaatcagaaagaagaaaacaagctagagagtgaagatatctctatgacccccattccctaaagaaggaactgtctcctctctcccaacacagatgtggggaccgaggccctggaaggcctagcaagctcagggtgggacatgtgggggctgggggtctctctggagcatgcaggcattgttttatgccatgcttgaattctgaacaaccaaacgctgtcagaaggaagctggcatgttgctccactggtaactcaattccacactgcagatctgccggctagttcaagaagaactacgatgccatcaaaatccaatgttcaatcagagaaggaagctgccttctctttctgcagatgattaagaggcagacatactcatgcattggagagtcttgctgtcttttcttccaggaataaagatgggctcatttaacatgatttctacctgttctcctgcaattagtgtttaagtgactgtctctgggtattagtcactctgaggaaatgaaatgatgctatggtaattggccatgtgtgtgttttttcttttcttttcacttccctagggatttcacttggctcagaaagcattttttaacataggccctgtctgcactctttatttagctaattagagagcttaagggagcatgctggcattgagcaaaaagggaggaagggggaggggcagcgtgttctactgggaagagcactcgattgaacaggaatatctgggttctagcccaaactcatcaattttctcttctattaagctcttaaattttggtcagctgtgtgacaggcattaccttgttcgatcctcacaataaccttacaatgttggtatcatggcctcctttcagagatgcaaaaaacgaagtttgaaggaggctgccttgaccgtggcttcccggcgggcatgcaacagggctgacacggagactctagttggccttaattcctatgctttgccatcctttattagtttttgcttactagatagacccctgttacccaggatgagtcacttcacttctctgtccttgcttgcttaaactgttcgtgattctgtaaaaatgctggctcttctgaagttctaagtgcctttctttctgaacagatggaaaaatattatatatcctttctattacctttctaatacctttctctttccttgccccctacctattttgttctgcttttcttctctctcctactacatccagacagtggccagtacagcaggtgtgggggctgagcaagaagaggcagggggaggagaaagaagcagctctattcattgggcactccattttccagcccagggcaatactttcttctaaatgagcccagagtmacatagcgtggaacaaagacccaaagaaaggcttggagtatgaagatttcatttccaattctgccgctgtcttactatattgtggggttttgaccaagccatagtcttatggtacctcgggttcttcaccttgacaactataattataacacacatcagagagtggttgtgcccttgaagttgcaagaatatgaggtgtcaagtatgagtgatgaaatgatggtcctggtaggggtcctaggccaactagtcctgatcctctgtcttataggaaaaaggaaggtgggcttcctggtgccacttagataggtggtgacacaaatatgttgatagcccaagcagcctgatccttagcccagcgctccccgaaccagtgcatttgtcccaacttccaagatggaggaaaggttttgttcttcatagaattcagtttttatgagagaacaataattacctgtcaatgaaacacctctgctttctctagctaacattttagaaggtatcagagatacggctcaccagggacaaagatattacactggtgtgcattcccattcatgacctatcttgatgatgaattctgtgaggctgtgctccatgaggaagcagatggaagtcaccgcccatgcccagcccccagcacgtgacagtgtggaaggcagacactataccatgtggccaaagaagcatgtgtcacagacaagagcacactttgcagaaaggctagccacatattttgcttcatgacactgccctcccccattttttgttcatttcttgctggtgtttgytcttctgttaatgcctataacaaaaaattacagttcacagttggaaaggagagaaaaactttcttggcctgtgatatggtttggatctgtgtccccacccaaatctcatgtcaaattgtaatccctaatgctggaagtggggcctggtgggaggtgactgactcaaagggtggtttctcatagtttgacaccatcttcccttggtgctgtcatcatgatagtgagctgtcatgagatttgtttattaaaagtgtgtggcacctcctcccaccactttcttgcttctgctccagctatgtgcctccttccccttcaccttccaccacgattgtaagtttcctgagatctccccagaagcggaagtcaccatgcttcctgcatggcctgcagaaccatgagccagttaaacttcttttctttataaattacccagtytcaggcattcctttgtagcaatgtgagaacagactaatacagcctgtatctaaaccatccttgagtaagttattgtctataaatagcaccttaggttgtatactacaatgtctttcatgcagttttcttttgcatttttcttcattctgcatcaaccttgtgaggattattgtaatcttcattttgtaagaatgtaaatctgtgctgtctgatatagtagccactagccatgtatggctattttaatttaagtgacttaaaattgagtaaatgaaaagcttcacttcctcaatgatcctggccacatttcaagttctgagtagttgcatgctaagaacttgtttgtataatcccttttagccctcagacaatttaacaaaacattttatgaagtaggcatagctttatagacaaagaagctgagtcttggagagatttgctctcatatcaagacacatacaactcaaaagtggtggatatctcttggtttggctccacagttttctctctcaaccacgataccatactttggaaagactttcacaaattcttaaaaatatgaacatgcaattaccattcaacccagtagttgttcttctggccacatattctagagagatgaaaatttatggtcacacaaaaaacytgtacaggagtttttacagcagctttatttgtaatagccccaaactggaaacaatccagatattcatcagtgaatgaagggttaagcaaatggtaatacacccctacttagcaataaaaaatagcaagctattgatatgtgcaacattctctagatgaagtaccagagaataatgctaagtggaaaaagccaatcccaaaatgattgcatactgtatgactctatttacataacattcttgaaatgacaaaattatagaaatagagaacagattagtgatttccaggagtgaagatcggggtggggcagaagrgaagtgggtatggctataaaaggactatttgagagctccttgccaggatggaactattctgtatcttgactgtatcgttgtcaatatcctggttgtgatattgtaccgtagttttgcaagatgttgccattggatgaaacctggtaatgtggtttgaatgtttgccccctccaaatctcgtgttgaaatgtgattcccaatgttggaggtggggcctggtgggaggtgattggatcagggagttggcttcctcatgaatggcttaacaccatctccgtggtgaaaagtgagttctcagttcactcgaggtctgcttgtttaaaagtctgaggcctccccactcccttgctctgtcttgctcccactctcaccatgtgatatttcctgctctcccttagccttccaccatgactgtatgcttcctgaggccctcaccagaagcaaatgctagagccatgtttgtacagcctgcagcaacatgagccaattaaacctctttctttataactcatccagcctcgggtatttcttcatagcaacactaaaatggcctaatgtggccaggcgtggtggctcatgcctgtaatcccagcactttgcgaggccaaggtgggtggatcacctgaggtcaggagtttgagaccacctggctaacatggcaaaaccccatctctactaaaaatacaaaaattagccaggtgtggtggcacctgcctgtaatcctagctactctaggaggctgaggcaggagaatcgcttgaacccaggaggtggaagttgcagtgagctaagatggcaccactgctctccagcctgggcgacagagtgagactctgtctcaacaacaacaacaacaacaaaatggcctaatgcatatggtaaaggttacactaaatctgtctgtattatttcttacaaccatatatgaatctacaattaactcaaaataaattctatttttttaaatgtgactagatatatatgctcattacctatagaagctgcattttcccagaatctcagtgtcatcaagccgattctgtctaacaatgctcgcatattggcataggcatgtgggcatatggtgcatgtgcccacaaatacatggatttgtaaggtgagaaagtgtaaggtgcaaagagccagaaaatgctcagtctatgtcatggggaaggtggtgaaaagtctacactgagaagagaatggctgtactatccagccaaagagagacaaagtaaacctgtggtgatcaatgatgtttagtcaagaaagtatccctggggctgagatttagatgtacactttttttccagcactattgaggtaataattgacaataattgtggtcaaaaaatgacttgatatgatttgaattttcttaaatgtgttaagacttgtctgtggtccagtatatgatctatcctggagaatgttccacctacaattgagaaaaacatatattatgctgctgttggatgaaatattctgtacgtctgttagcatttggtatgtagtataattcaagtctggtatttctttattgatttttcatctgtatgatctatccattcttgacagtggggtactgaagttcactactattattrtattgctctctatttctcttttcagttttggtaatatttgcttcatatatttgggtgctgtagtgttgggtgcacttacagttatatcttcatggttaattgacccctttatcattatataacgacctttttttctgtggtgacagatttttacttcaagtccattttgtctggtgtaagtatagctacccctgctctcttttggttaccacttacatgcaatatcttttttccatcacttccctttcagatgtgtctttaaagctaaagttagtcttttctaggcagcatgtttttggatcttgttttttaaacccattcaggtgctctgtgtctttttattgaagaatttaatccatttatatttaaagtaattattgatagatagctacttactattgccaatttattaatttttatgactgttgtgtagttccttttttcctatattacaatgtttctttatgatattttgtagtagtatgctttgatttctttctttatcttctgtgtatctactaaaggtttttgctttgtgattaccatgaagcttacatcaaacatcttatagttgtaacaatctattttaagctaatagcaatttaaattcaattgcatacaraaacttaccctctaatttctctcccccaacacacgtttgatttattgatatcacaatttacatctttttgtattgtttatttattaattattgtagctatattttaatacttttgtattttaacttttatactagagtaaaagtgagttttatattttcatatgattttaaattacttattagtatccctttatttcaacttgaataactccctttatcatttcttataaggcagtttcatggtgaagaattcccacagcttttgtttctctgggaaagtctttctctctccttcaattctggaggacagctttgttggcagtctttttctttcagcatttttaatatatcactcccctcctggccagcaaggtttctcctgtgaaatccactgatagcctcatggaattttcctgcttttctcttgctgcttttggaatcctctttgtctttgacttttaataatttgattataatgtgtctctgtgtaatcatctttgagttgatcttttggtggaagtctgaacatcaaaagtctggatgtccacatcctttctaagttttggaaagttttcaaccattctttcttgaaacaagctttctgcygctttctctctctctctcttttcctcttaaattcttcattatgcatgtattattttacctgataacatttcataaatcctggagtctttcttcactttttttattttaatttttttactttttcttctctggataacttcaaattactggcctttttattcacagattctttcttctccttgatcaagtctgctgttgacgctctgtacctcatttccagaggtattaatgtattatccagctccagaatctctctttggttcttttttaatgtattattcagctccagaatttctgtttggttctttttatttatagtcatataaaacgaactaggaaaattttgccccttttcctatgtattatactttgagatagttaagccatcaattccttgaatgtttggtaaaactcatctgtaaagttttctgggtctattgttcacgtgtaggaagcagcaagtgcagttttttaaaaatgatttcagaaaattttayaaacaaaaaaatgttaataaggttgtctttggatagtgacataccatggaattctttttgacttaatattatttcatttttaatattaagatttcatttatatagactaaaatttatctttgtagtgtccagttctgtgagtcaaatttctgcagtcacatgccatgaccataaaaaagacagaaaagttctattacccacagaaattttctcatgtctgtttatagtcaaaccgtctgtccacccccatccttggcaaccactgagttttctttctctatagtgttgtctttgtaaaaatgtcatataaatggagtcatacagtttgtagcctttggagtcaggcatcttttactcagcgtaatgtgtttgagattcatccatatgttgggatgttccttcctgttgctgagtaacattccactatgtggatacaccacagtgtattcatcaatccccagctgaaggatgtatgtctgtgttgattccagattttggctcttgtaactaaagccactgtaaacattcacatacagattttaaatgaacaagtttttatttaacttgggttaacatcagcaaatgaatttctgggtggtaggataagcctattttgtttttgtttttgtttacctgagataaggtctcgctctgtcacccaggctggagtacagagacaaaatcacagctcactgcagcctcaacctcccaggctcaatcaatcctccaatgtcagcctccctagtggttgggtctacaggcatctgccaccatgcccagctaatttttgtattttttgtagaggcagcatttttcatgtttcccagcctggtctcaaactcctgaactcaaaggatccacctgccttgtcctcccaaagtgctgggattacaggtatgggccacagtgcccggctcgtatgtttaactttataagaaatcaccaagctgttttccaaagtggttgtatcattttgcattcttttaagcaatayatgaacaatccagtacacaaaattgtcaggatgttcttgttttcgttttggttttagccatcctaatacatgtaaaatggtatctcattgttgctttagttttcattttcctaaagactaatgatgttgagcatcttttcatttgcttatttgacatttgcttatctttttggtgaagtatgtgtcccaatatttatttcaattctatttttattgaattgtctgttttcttattacttcgtttgatggttttgtatattctgaatacaagtcatttatcagatatatggtttgtaaatatttttatcctagtatatggcttgcctttcattctctcagcacagacttcttaaataacagtttttcattttgatgaagcccaatttatcttctttcttttatgggtcatgcttttggagttgtagttaagaaatctttaaccccagaatccttgactaactccagatgacaaagatttttytactacattttcttctagatgttttacagtttggagttttacatttgagtctatgacatgtttgagttagtttgttgcaaagagtgagagggaggttcaaactcctgtaggatgggggctggcatgccaggggctttcatagggtcttctccatattccgctttaggtcttcccattgtgctacaagaagtgtgtgtggacaaggtactgagcagctggtgggcgctgaggtgccacatggaggtgtgagtgagccagtgtccactcgagtgtttgtgtgaccgcacaggtgctctggtctgggtgccatgcaggctgcctcagtgtgttaggcgtgtgcacatgagcgtgtgcacacaatgtggatgcacacacacacacacacacacacacacacacacacatacaccatgagcacctctcttgttgtttttgcccttctcccagccatagaccactgttacttgttactcaatgtatgctacactggttccaggggcagcacatgggtgggctctgatgctctggttaagtctctgtccttggcaggcaytgcatccttgggtctcaggagaggagtccctcagtgatttgctttgatcccaatcaataggtctgaacccagcaagtttatcccaccttcatggaatacggtttttctcatgcccttccccagtttcagtggattttctccaattccttgaaggtgacagggtttgtgtccttcccacaccaatttaaggcttttgttccaaaggaaatataggaaagacagatccaggtgggattttacatctatcctgtagggctgctcctccccacgccctcaggcctacactaagagggacgactcctcgggatgctgctgtgaggcactgtttctgtgtcttgcctttctggagatcccaaagagtgaccaaatgggtacagctgccatggaaccagcgacttttcaaggctcatgataaagcaaccagcagcacctggacacgccccctcccttgcttctcatcctgccctgtctcatttcccttttctctcattccttctgccctggaacctctccagagaagcattagcacttaatcactcactgccttaccctttgttttatagggaacacagacagctactttgctcattaattttcagccttcttcttctctgatagaaatatttgaggctgcacatttccaattattgctttggctgcattctacaagttttggtatgctttatttttattcttgttcagtactcaacagagacctttctctcccacaaacagtatccaggctgagactgatcaggttcctagtcatctacctttcactaaaggcctagctctgtgagggttcaagcttgcatgtagggatctctgtttattttccttccaattttatgtaagcccaaggcctcatcttctgtcctgatgtggtttatgcaacccacatcacttgattgtcaagaccaacaaatcccataaggtagcttgaaatcagtgttacattaatacttaggttttcgctacctcttgttttagtgctttggataattttttgctcccttggaaaaattttactatcttgcaaacctaaccatgcatgtaaaagaaagcttatcaactttttccactctgtctaggtgttctctggcaaaatagttttcagtattctagaatgccctatttccagaaaaggaaatctgcatgtgatttcaagtatctayttaagactgttatcctattatagtttaccacaagatttaacccagtaagtcttggtgaggatttggtagtggaaatttttgatactttggcccatgcgtctaaattatattgaccaataaaagaaataaaacatgtttttctaaattactacagtgagttaaatacataaggattgatatcaggggagaagcctgtctaataaggaagctcaaattttcacatttttcttgttacctgaaaaagggcattcaccattaatttagatctcacttaatcacatccattaaaggttcagttcaagagataaaagaagagagacatattttaattttaaaggacttcttaaatgacaaggactaatgttatataaaaatgaaatatgttgagtactaaaaattcagcacagcaaaatacaaaatagaaagttaaaggtcatctaaaattccaccatcctaaagtaaccaccattatcatttggccaacacaaatctagacatctctctagatggaagggtagatggatgagtaaatagatggagagaaagaaaattataaaacagatgatatatatttctttattttaaagaagtgttaaatttaaattatttaacagaagtaaaattaaagctaaatgaaaggaatcacttggccaggcacagtggcacatagctgtaatccttggcctttgggaggccaaggtgataggattccttgaggccaggagtttaagacmagcctgggcaacatagcaagaccccatctctacaaatactttttaaaattaggcaggtgtggtggctcacacctgaagtctcagctattctgcagtccctactactcaggaggctgaggtgggaagattgcttaaacccaggagtttcaagctggagtaatctatgatcatatcactgcactccagcctgggcgacagagcaagaccctgtctctagaaacataaataaatgaaaaattttagaaaggaatcatttaattctaggaagtatgtttttttttttcaccataggagatagtaatcactaaaaccactcctttaaagctaagaaaaaaactttataaaaataaataagcaccctctttttgttaggatcagccagactcaaattttatgtgaaacagtctaattttaaaacttggcaactaactcattattttaaaaatattgtgctagctaaacaaaccacatctgtgggccccaagttacaaagcttggcctgacctgaggatcactggtttggcttggcaggtccatgtcacttgtagagaaatctttcacctgctccaagtcagatagaaaaatgttagctgtcaacatcatccttcactgtgtccaggtttttgagcctagtctaaaaagacatttacatatgaaattgctttttgtttttaatatcctattttcccagtgtttggaaaaaaaagcttaaaaaaatgggaaataaaataatgagaaaaaatgccaccttatcaaaactagctattgattactttctaattaggcaactttgttaccttgtcagaactgagctggctgcttggcttgtatgaattccatatcactggaaacactcaagcataggatggatgtccacagtgtaacccaccagcctgggatccaggccaagcacctgagggatggttgactggattaataggtggatggatggatggatggatggatggatggatggatggatggatagatgcaagaggaattaagatcccttttaaccacaggttttcttgcaagtagggtcttaattaattcatttatttgtaagaaggaagctcaatgaggcagaaagttagataagtgggttaagaaagaaaaaacaaaaggataccttatagttgttttgccttcttctcaatcctgctttaaaaagcctagccccacgatgtcactgaaaatrattttaactgctcctttggtgacttaggttaggttggtctgctgtgtttgtaatagaaggaagcaaatatttagtttccactctcatagcaactgaacaactttctgaaactgtaactgaaaaacttttccctagtatgttttactattaatgcaagtgtagtcttttattacctgtcccttagctttcaattgacaggaagggtatgagtgaaaaattgtagttagacgatagcgcaactctgagaattatatatcaaactagaggtctttatcagcatttttaaaaaattaaatgtattataaaaaggcaggccgggcgtggtagctcaagcctgtaatcccagcactttgggaggccaaggtgggcggatcacaaggtcaggagatcgagaccatcctggctaacacggtgaaacyccagtctctactaaaaatacagaaaaattagcctggcgtggtggcgggcgcctgtaatcccagctactcgggaggctgaggcaggagaatggcgtgaaccygggaggcggagcttgcagtgagccgagaccgcgccactgcactccagcctgggygacagagygagaccccatctcaaaaaaataataataataaagaaaataaataaataaataaataaataaataaaaataaaaaggcaactcccttttttggatgtattaagaactggcttcacaagaaagatgctcatttatgattttctggtactgaaaatcagttttacccactcaaaaactatctcctgaactttactgacttctaaaatttctccacagagatagatccctgtttcctgtaaataagcatatatccttaagaaagtagtgtcattattatttaaacctattagttatttgattattcaggagagtagtgtaaccattattttaacctgagtatcagttattcgatattaaattttctgagtggttatgagttgacagaatatggagatagtatgagaaaagcctcagaagaaaaataggtcaccaggagttgccactgctaagagtgggagcagaggaggaggaagaagcaggcatgagaatgtcgaagawggaaaaaacatggtttttgcacagattacgtctggatgcatctaatcaggtccagttttctcagcctctcatttcattagatctcattgtcttcgtcttccaagctagaaaacatataatttattaaattagaaattttgatttctttagaaaagacatatcagcccaaagatatttgtaagaatgtttttggctgctttatttgtaatatttacctattccagtgcccatcacctgtggaatagstaaataaattgtgttatattcctactataaataaaaaggaacaaagcactgatgcatataacaatgtgaatgaatcacgcagaggtaatgctgagtaaacaaagtcaggcacaaatagtacgttccacgtgacgacatttacgtcaagttcaaaagcagatcgaactaagctgtagtgtcagagattggaatagttgttacctttatagggagggagcatgagggagccttctgaggtgctggaaatgttctatatctgaagatttggaactttacaaatcttaagttatatccatctaaaacatagaagaaatttaagagtgatcgcaaaatctcaaactttatgctcccatcagttgagaaaggttttctgagtgggctctagtggactggagtttagtggcagtgacaaggagagattggtgtaaataccagtttgtctttagaaagctagacagtgagggccagacgcggtggctcacgcctgtaatcccagcactttgggaggccgaggtgggtggatcacgaggtcaggagaccgagaccatcctggctaacacggtgaaaccccgtctccactaaaaatacaaaaaattctccgagggtggtggcaggcgcctgtagtcccagctactcaggaggctgaggcaggagaatggcgtgagcctggaaggcagagcttgcagcragccgagatcgcgccactgcactccagcctgtgcgacagagcgagactccgtctcaamaaaaaaaaaaaaaaaagaaagaaagctagacagtgagacccaaatggacagaatccagccttcatttctatttctcaccctagggcctcacacaaaaatgatgataaagaaatgcacccaaggttcatctatgtttgctagtgaactgtttgataaaccatgtcttgtatggattcaaagcagttccttcatctttttctattaatttacttccaaagctggttgaacacaggagcacaaatgtgggaaatgatgaaagactaaaaagtcatgcgaagtgaatcttggatttttttttktcaggtaattgattttwyaactaattgattaatcatagttgaaattagggcaattctctttattttacttacaaactatttcgggtcagttgagtaggaagcatgctcattaagaataactgcaaacgtgccatccaaggaacaaagatgtgttggtcatatatgattctatgggagtgggcatgctgaggttgaagagtgagacctgaaaaaatgagtccaggtctcctctaaagtcctgtgccagctctccagtgagctagctaatattttacaatcaaatcactagccatattttaagctggaccatgccagagctgcctcactagtgtgacatagcagtgggatattgttacttaaagctggctttcttatttgaattgttttaggtcatcccgtaaatactgttaccttcaactaagacccttgaacaattctccattttattctccattatcacactgctgcaagattctagcagatggtttcattccaggtacacatgcaatctctctccccagtgaaatagaatggctgtttcaggcttgttgcctgtcaccaagtcttaggacggatcaagggaaaaaacccatagtcatgatgacattctgtagaaactgctttgggaattcagaaatgcagcatgaaattaacccaacgtggaatttgccctaaattactagaaattgaatggtgacccttttgtaaaaatttactktggtacttgtgttgaccacaattggtcaaaaatcttggctttattgattcgacctctgagtttattaaagcattcatggttaacaaaaattatgtgtctgagccagtggagctcagttaaaagaaaggcaggaagtaataagggcagccggttttcaagggcagatctccctcttagaactagagttcctctgctgggataaaaattgcaaactgagacacagaacagggtataataatctaagaagaaagttccatgaacaatctaggaagtctaaggaccaaattgttcaaggaactttgccaaaattatatagcgagctatttagagaggtaagccatgtccatgattgtaacccttttatcttcgtgtgagtagatgacatccttctgcatttattgaggctaaatcaatagattcaataaggccacagctttctcttactcagcgctttgtgggaagaaaccattccatttgtagcacattgctcagtgtatagtagaggtaggagtttaatacatgtttatttaattgaatagaaatgcactacatacttcactacagtttataagattttgtgcttttataaatgattactaattccatcattccatgggatcctccctattatccaataaagttgtaagacaagtatcattctrgcctccaaggcaggatgtcatggctcactgggaaatagaatgtgcagttctggatcttagagtctctactctttctaggctcatgagagctgagaaatcagggttctggttccatttcctctactgaggaagttgctttcttttgggcctcggtggtttcagggtaatcagatagaacttctcagaggtgctgggccttggaaactgttggcttttcagtacctgaacagagtaacacatagagacagaggaagaatattctaggcagagagaatggcataatccaagtcatgaaagttaaatagtatatctggacaatagttcaaattagctttggcagtaaagtttgtttaggggaataatgggagataagattggaaatgcccgttgaaattgtattgcagagataaattcaacaattttttactgaacacataccttatgcccagcatcatggcaggtggtaagggtattgtagtaaataaggcaggtgtctactcctaaagagctcactcatcaataaagagaaagcaagtttctcattacaaacagcaatgtacactttcttcattaggcattgggatacctctaatggcagaaaaatgatcccacccaagttgtgagatgtttcctaccaaagctgtctagattattgcagaagacatgtaagagaaaagtggaaaaatcagttatttatgacaataagaataaaaagaaaggacatatgtccaaaatgttatgcaagaaaacaatgtgtttgttacacccaatggatgtagagttcaaggcagagaagaaatcacaggcaactgaagtttcttatcttagtgagtaggagagagaatgtgacatctcagtgtatacttttcactaggaaaacctcctaagcaaaggaggagaaaatgaggtcaagtttagagttgctgttgattgtaatagatcaggaaggcagctagaagcaggaaaggggatgcacaccgcaatggggctttgtcatcagcatagaagtgatctatagagtcctaagaattgccaagatcaccaaagaagaaaaggcatcaacaatcaggtaaaaggctaagttaaaaaaactgttcaaaattttagttattcatttccacagtgtatataatgaaaaaaatccagcactagaagattagttgaataaactatgctaaatacatacaatggaatactacacagctataaaaaaggatgaagatctttacacattgatagggaaaagaggaccaggttgtattaagtggaaaaagcaatatgtagaagtatatgtagtatgcaatcttttgtgtaggaaacataagtaaataatatatagacatacttcttatatttgcataaaacactggaagaataaaaaagaaactaattaaaaggattatgtctagggattgaagggggataggggaaataaagtcaagggtataacaccttagagtataatttgttacagtgttctcatttttgagccacgtaaatgtattacttattcaaagtatgaacttagaaaaaataagtgcagaatgcattgccctgtgtctagtataaagagcttgggaactgtggttccttttccaaagaggagcaggaggtgatggtgtagagagggagccacattgtgaggcttggaccttgcaaaggaggaggggagcagaatttataggtgaggagataaggtggatgggtcctggcctctttggtgtgtctcttgctcagtactcctcaattcctgttttccacccacgctgccctctcctgtcttttcctggacattctaagtaacttcctagtttgcatcatgctacattcccaccaaaagaaacacccttcccaatgttttccattattccaaatcttcactcattcttttattcaataaacatccaagcacctttatgcactacatgctataatgagacctgaacatgctatggtcctccccactttgaaggttcactgtctattaagagagacagataccaaaattaacaatgcaacatgatctttgagaacagcttctctgagagatgacatttactccaaataataaaaattgaccagcagaggggttccctccagttctcatacactctttctaacttagtggtgccaaacatttgtattgctttgatttcttcagttaatatttttagccacccatgtgcttgtcacccttcttgattcttgtaccttcttattatttaattatcaaaagaagcagccctgtgaaaatctgaaaatcagtatgatcaccctcatgacattgataaagaaggggagactagcagagctcagtggcttgcccagggcccaaagctaattccttttaggaggctatgcttaatggaaaggggttagatttgtgattcttatgaagggtaatagttacttgctgtgaaaagtattacaaggcttctttttgtgtcgtttctacttgatacaagaaacttgataagccaagagttactggaattttagtaagctcgttcagtgaacatgtttatttttatagcactttacccccgacataagtttgacattattaacagagccaaagccaagccactttggcccttggtaaagacccagcttatcagagtttgggtccagctccctctaggcatcttctctcattatcacagatgccrgccccctccccacccactctgggaagctgagggtgtggctggttctccttttctaggatgttccatgaggccacttctagcagcagccactgcacgtgctcttcctatttcctccttccaggcatgtggcagctttatgtaatgaccgaactctcggttaagccagagtaaagagacttagggagaaacctcggactctctggcgattagagaggttccattctaagctataggccatttcatttactccccagtgtgaggcatgacatcttcccactaattaatggtggccctccttagtgatgagttgctatctggattcccacaccatctggagaggagtctggacactggagtttctatttttaccaggctctggcattgcacttacattccatttcaactgagccagaggccacagaaaacttgaatcatgctctttttttttccttacctaaggccactattaacaggataaagggctttttgcaccctgctatctgttatacagtaagggaagagcaaaacagaaggcagctttcgaaaaaaaaaaaaaatctttggtgtaaacacccagcttctggggccagttccaccttgtctgaaggaaggctgtagggaagtgattttgcagttaggaggctgcatgaattgcaacccagttaaaaacagggcagtgctaataacccataatgggtcattcttggagtaaggggaaaagagaggcaggacagaatgggaacattcgggagttcggtcattaggtaaagctgccacatgcctggaaggataaaataggaagagcaagcacattggcggctgccacaagtggcctcagggaatgtcctagaaaaggagaaccagccacaaccctcagctttccagagtgggtgtggagggggcctgcacctgcaacagtgatagaagatgcctagggggaagggggcacaggctctgataagctgtgtctttatcaagggccaacgtcacttggctttggctctgttaataatgccaaatctatgtgggggggaaaatggttaaaaataaatgtgttcaagtaatgagcttactgaagttccagtaactcttggctcatcaagattcttgtaccaggtagaagcaacacaaaaaagaaagccttgtaatacttttcatagcaagtaattattacccaccagctctggagctggggtaccagagttcaaatccagttccatctctcacttgttccatggccttgggcaagttacttagcctctcatgcctgtttcrtaatctgtaataacactaatgtcttggtatcctcctagcatttttggaaaattaaatgagctaatatatggaaagcgtttcgaaagtactgggcatagagtggacacgcagtaagtattcagtcttgtattacccagagtcttggtctcccttctctaagacaatgttgtagcrtagtagacaagtgatttgcttcatctttaaagtgggaataattcccaccttgtagatccaaaccagaaatattaattcaatgttaacttactgtctagctcataacactcaaaatgtaagaaagcacaattaataaccatactgaggcaataggtgtaaattgagagtggacaaatgaggaaggcgacttcacgtgaagagccaggtaggcagaggtgagagccccattcttggtcgtcacagtgggacacaatataactgacgttttaggatttgattcctagtctagaattagcatgcaaacaaccaacagcattagaaacaaaattcagagccatactctttatctccagaaataatgtctatgaaacctgagtggtgtatgtttgtgtgtgtgcatgcatacgagcatgtgtgtatgtgtgtatgcatgtgagagagagagactgactccgaagcttattttgatgcaaatccttcattgccctcactgatgagctatgaaattataatttcaggcttatctctagctattaataacaaacaataagaataaattaaatttatatcagatyttataattactattatttttcacacaccatctcatttgctctctgacataaccatcctcgaagcatcatatgttcttccaatgagacacacagaggttactggtrttattctggagttagatcccaaactcttagtttagaggttgatttttcactttatatgatcatttgtccatcaaatagtgatatatgtcagataagtcagagcacaactctgacacccatggaatccatggagttacggattctgtctccaggcatatacagatctgattacatcactgtagattatcttgctaattctagactcctacaatgtagaaaatcatgcagtaagaatcatcatggccacatggctgtcattcatgataatgattgtgagatgcatgtcacatgtatcaatagtctattcttttttattctagagtaataggtataattttgtatactttcacatatcgatgaaatttggactgtttccactttggggctattccaaataaagcctctttgaacactcatagacaagcctgcatgtggatgtgttttcatgtctcctgggtaagcattaaggagagtaatgggtcctaagacagatacacatttaacttctcaagaaattcatggcttattcccataaccccaccactttggggggccaaggcaggaggatcacttgacccttgagtttgagaccagcctggacaacatagcaagaccccgactctaaaaaaaatttaaaaattaaccaagtgtggtggcacacacctgcggcctcagctacttgggatgctgtggtggaaggatctcttgagcccaggaattcaaggttgcagtgagctatgatcttgccactgcactccagcctaagcaacagagtgaaatcatctcaaaaaaaaaaaaaaaaaaaaaaggaaacttccaaaatattcttttgcagagtgattgtagtaggtatgtggtagtatctcattacgcttttcatttgcatgtccctgatgactggcgatgctgagcatcttttcctgtgctcatcagctatttgtatatcttcctatgtcaagtgtctattctagtctttcatctgtttttaactggacttttaaaattattgagttgtagcatttctgcatatattctggatacaagtactttgttagaaatttatattgtctgtattgtctcgtaggctgtgttttgtctattttgttaatgccatcttttgatgagcagaagtttgcattttgatcaagcttatttatctacttttacatttatcactttccaagtcttatccaggaaatatttcactactctaggatcacaaaggtatttttcgatgttttcttcttaaagctttataggtttagcttttatgtttatgttcagactccatacaaattaatttttgtgcacagtataagtatagttcaagagtcatcttttttcatttttaatttttatggatacatagtaggatacatttatggagtacatgacatattttgatacagtcatatactgtgtaataatcgtatcagaataaatgaggttttcatcacctctagcattcatcatttcttgttttacaaacattccaattgtactccctcagttattctacaatataaaacaaattattgctgactgtagtcactctgttatgctatcaaatactagatatcattcttcatatctaactatatttttagattaaccatccccatttcccatcttcaccctcccactacgcttcccagtcactgctaaccatcattctactctctrtctccatgagtcagattgttttaattttgagctccccaaaatagatgacaacatgagaagtttgtctttccttgcctggcttatttcacttaacaaaatgtcctccagttccatccatgttgttgcaaacgacagaacctcattctttcttatggctgaatagtattccattgtgtatatgtaccacatttgtattattcattgagctgttgatggatacttagattgctttcaaatcttggctattgtgaatagtgttgccaaaaacatgggaatgcagatgtctcctcaatatattgatttcctttattttargtatatacctagcagtargatcgctggatcatatggtagctctatttttagctttttgaggagcccccattctgttctccatagtggctgtagtaattcacactcccaccaacggtgtatgagagttctcttttctccacatcctcaccagcatttgtcattgcctgtcttttgaataaaagccatttttactggggtgagataactcattgtagttttgatttgcatttctctgatgataaataatgttaagcacattttcatatgcctgtttgccatttgtatgtcttcttytgagaaatgtctattcatatctttcacccatttttaatcagattattgtatgttttcttattgagttgtttgagctccttataaatttcggttattagtttctttttagatggayagtttgcaaagattttctcacattctgtggattgtgtcttcactttgtagattgtttcctttgctgtgcaaaagcttgttaacttgatgtgatcccatttgtccgttttttttgctttggttgcctgtgctttgggatattactcaataaatgtatgccagcccaacgtcctggagagtttctctgatgttttgttttagtagtttcatagtctttaatcaactttsatttgatttttgtatattgcaagagataagggtctggtttaattcttctgcatatggatatctggtttccccagcaccattcactgacgagagtgttcgytccccagtgtatattcgtggcacctttgtcaaaaatgagttcactgtagatgtatgaatttatttctgggttcttcattcagttttgtttgtctgtatgtctgtttttatgccggtaccatgttgttatggttaccatagctctgtagtataatttgaagtcaggtagtgtgattcctccagttttgatctttttgctctggatacctttggctattctggttttttgtggttccatataaattttatttattttatttcattggtatttcgatagggattgcactgaatctgtagattgctttgtgttgtatgaacattttaatagtattgattcttccaatccatgaacatagaatatctccactttttgtgtgtcttcttcaatttctttcgtcagtattctacagttttcattgtagaaatctttcacttctttggttaagtttattcctaggtattttattttatttgtagctattgtaaatagaattactttttaaatatctttttcaaactgtttgctgttggcatatagaaatgctgctgatttttgtatcctgcaattttactgaatttttaaatcagtactaatagcttttcagtgtggtctttagatttttttcaaacataagattatatcatctgcaaacaaggataatttgacttcttcctttccaatttggatgcctttactttctttctcttgtctgattgatctagttaggactcccagtaccatgttaaataacggcagtgaaagtgaacatgcttgtcttgttctagaacttagaggaaaggctttcactttttccaattcagtttaatactagctgtgggtctgtcatatatggcttttattgtgttggaatatgttctttctatacccaattttttgaggctttttatcatgaarcgatgttgaattttatcaaatgctttttcagcaacaattgaaataatcatacagtttttgtccttcattctattgatatgctgtatcacactgattgatatgaatatgttgaaccatccttgcatccctagaatgaatctcagttggtcatgatgaataatctttttaatatgttgttgaatttggactacaagtgttttgctgagggtttttgcatcaatggtcatcagagatattatcctgtaattttgttttggggttttttatgtctctttttgatgatttttcatgtgttttggtagcaaggtaatactggccccatacaatgagtatttggaagcattccctcttcttctattttttgaaatagtttgagtaggattcgtattagttcttctttgaatatttggtagaattcagcaataaaaccattgattgggttccaggattttctttgctaggaaactttttattatggctttgatattattacttgttattggtctattcagatttttgattgcttattgattcagtcttggtaggttgtatgtgtctgggaatatgtccatttcttctaggttcaaggatggtcattttggcatataggtattcaattactcttacaccatttgttgaaaagactttcccccattgagctaccttcctccattgaattayttttatactgtttttgaaaaatcatttttcacatcttggcctgttcctagagtttctgttctcttctattcatctattagtctgtctttaatgctaatgtaatattgttttgatgatgatcattttttctctttttttttgagaccgagtctcactctgtaacccaggctagggtgcagtggcacgatctcagctcactgcaacctctgcctcctaggttcaagcaattctyttgcctcagcctcccaagtagctggaattacaggcatgcgccaacatgcctggctaagttttgtatttttagtagagacagggtttcacaatgatgatcaggctggtctcaaactcctgacctcaagtgatccacaatcctcagcctcccacagtgctgggattacaggcatgagctaccaagcccagcagatgataatctttttaatacatcatgaagtcaagtaacataactcctccaactttattttttycacattgaattggcaattctagattacgtgcatttccatgtaaattgatttattcaaatgttctttcttcttaaatcacttttgaaaatttgtgtacctcaagaaatttgttcaattcatttagtttgtttaatttactggcatacagtctaaaatattcacttattgtcccagagagctgcaaactcaacagagactccagatgtcatacatgacacattgaaggtgaaacaagctacagtagagagcttgttccataatctgggatcagctgagaccccagaaaagtatatcttagatcagcattgctctagccttaaaagtaatggcaaagcttaaggccatgcctcaaagaatcaaatgaacccacctactggtattcttgtaggcaattaccctgtgctkgcactgggtatatttgaccacagattcaaatatttggctgtagtttaactgagaaccagcacacagattcactggaagtcactgcacagctctctcctctgtggcaccttgccttgcaaatttcacccatctcagtttccctgggtgacaacctctgttttctccacccagagatcagtttcattagggcacaacttctctgtgccacaatttagaaaatgccctgaaggagaaagagtaacattgagctcatctcatgtgtttacttctccagaggatcaaaatcytaaatgcttaaaaacaaggacttcatatattgtaatcaattacatctttttttttacagcagaagagtatatcatacccattactrtgtcataactggaccccattaatgaacttttgaacaactatatacattaaataaacaaatgcaatcttgacaacatccggggcttttttagttcattaaattcaacatccattattgaaacttgctagatagaatgtaccatgtaagggattrttggaaatcaaatgggaataaagcaaaatacctgctctgcaagatatccctgggcagagagagaaaaaagaaagaaatgtaacaaactgtcatacatcagagatgttggtaatactatagaggaaaatggtagtactcgtgggagcacaaggagagtgtttaattttgkcatggggatggtggtaggtgagtggtgttttaaagtgtttcttatagaaataatcttatttgggtatttaataatggtaacctacataacccccaaaatcctctttttgtaaactttagtatattctctaaactttgtgtctttttcacaggcagataccattctagttctatttttcactagactcctgatagtcaaatgacttggcttcccatgcacatgcattaaatgaacatcaagatactgaattatcatctctgtctggggaaataatttaggaataaaaaaatgtcctttgaacaaaagtaaatgagaataagcaggaggtaggtgagagctgacacagtttatgacttgtgtaagcaaagggataagtatattcggatctgcttaacatattgagtccttttgagaaagcattttttctttatgggttaaaaaagccatgcttttctgagtgagatttagaatctcgcccatctaattctctgaaagagcaaatcacttggaacatcactagaagttattcaagactagccaggtacagtggctcacacttgtaatcccagcactttggcaggctgaggtgggaggatcacttgaggtcaggagttcaagaccagccttgccaacatggcaaaaccctgtctctactaaaaatacaaaaagtagataggtgtggtggcaagcacctgtaatcccagctactcaggaggctgaggcaggagaatcacttgagcctgggaggcggaggttgcagtgagcagagatggtgccactgaactccagcctgggtgacaagtgagattccatcccaaaaaaaaaagactaacttactgtcgatgcagatgagaatttgtatctgaatcaaacagacctccaccttgaccacctgaagacaccttgtgtccttctacttcatgtttaagaccttggactttatgagcacttaacrattatgtactgacgtaaacaccatgtcatgatcacttttcctttgcwattcctcttgaatcccccttctccatagcctcaataaacactcaaatgtaggaattcccagacctgttggtcttaagacccctctacactcttaaaattatataggacattaaagagtttttgtgtatgtagactctgttgatatttacaatattcaaaattaaaactgagaaatttaaaaaatatattaatttctttaaaataacaataataggtcaggcatgatggctcacacctgtaatctcagcactttgggacgccaacgctggaggatcacttgagttcaggagtttgtgcccagcctaggcaacataatgagaccccatcttcacaaaaaaaatcaaaaaattagccaggcatggtggctcatgcctatagtcccagctattcaggaggctaagtcagggggattgcttaagcccaggagttgaaggctaccgtgaactgtgatcgcaccactgcattccagcctgggygacagagcgagacgctgttttaaatataaataaaataaaataaaataaaaataataaacccattacatattaacataaataacatacttttgttaaaacaaactggattttccaaatttaaaacagtgagggggtaatattgttctacatttttgcaagtgtctttgatgtcaggctataaatgatagctaaatcctcatatctgctcttcatttaatctgttacaataacacacatcatttcatctctgaaacatttcactccactctcacaacagaatgatagtggcaaaggcaaatactgccttagtatcgttgtgaacatattgttcaccttgcagaccctttggaggagaacgctgagagaactcatgctctaatacgactcccttcatttcactctcaattccagtctcatcyctataaaaatttgckcagtgagggaataaacctctccaatatgtcctgaacatatctgcctttaaaacaaagccatatgcaaaagcttcctgtggtcacacattacagaggctgcctgataatcatggtatcaaatctatgtgcctgtgcccgatttcaggggtgtcccttcatcttgtacccccctttcgaaattaatcatctctctatccacttttacactgaccctcctttagcatcattccccttcatttaaaataccctccactccactgtctcatatgtccccatggtgtctgttctctgcggccacgtgtaggatacatttgtcctcgaatctttcctccttgtcttcacggtactgtaggctgtgaattaccataggatttctaccagtctttgttcattcataatgaatccaggaggctgggaacaaaatcccacctctttgtgtccttcacagccctgaatgcatttggctttcaagcaggatgaattaaaaagcaaacttatttatgaaagctatttaaaaaaacttggaaatgcagatgaaggtagcgaaatgttgtaggtaatcagtgagttattttttagttatgtgcttttattcttttttaatattttaagtatttattatggatattatcaaatgcatacaaaagtagagacaatcatgtaatgaagctgatgtacctataacccaattttaataattgtaaactaattcgtaggcagttttattttattcagatttctcactccactcaggttctttggaagcaaattctagagagcatgtcatttcatctgtaaatattttactatttacttctaaacattactctttttttgaaatgtataacaataatactattatatctaaacaaaagctgacaataattttatattatcatatatcttcaattttcttaggacacttttagaacttttttatttgaattgagatccaaatcaggtccatatagtatgaatggtttataagtctaagtttatttcctgtacaagttctcccttacgctttctttttcttggaatttctatttaattttcctttgaataaacaattttccgtagcctgaattttgctgacttcatcacagtggtgtcatttaatatattctcctccttatggttcctgcaagttggctattagacttagaaggatgtatcactttgtctgtttgtttgtggtaaaactaatgcttagatggtatatacttccatcaggaggtaaaaaatgttttattgtttttttcaaaatattgctaattatagtaattgcctaaatttattaatttgttttatttttagggttgcaaagtggcgatattctatcattccactttcatttattagtttgaaaacacatagatggagcaacttctgctcatcaaccatttgattaactgaggtgtagattttacaagaaaggtgggataaacgcctggttctttacttatcagttttcaaaataataaggcagttattagtttccttcaaaggtaataaataaaggtttattttcccccagcatcgagattttactaattgaaactcattattaatccttgcagcgatttttaatcctttgtgaatgcttatcgagtctcacattgtctcatcattggccaatggttgttcatttaagttagttccttagctcttttgacacgatactgcagtctcttgtggccacctgaccagtagcaataagtctgttcttgtatgtttcctgcccagacctggaatcagccatttctccaggaagtcttggtcctttttagtaggagatggtgtttgaaggacacaatctaatggaatattcattgcaactgccctgatcattgtttcttagtttttttagaattcaaagttaggaaaaaagattttttwaaaaatacaacgtttgttttccaggtaacaaattattatagtacacaggatacacgtcttaataagttgccttttccattatttatatctgctttcttttcttctctcattaaattgacttaatcttctagaacattgttcattaattgtaattttagacatctctttcttgttcataataatattcttaataatcaaagggcagaagaaacacttttgttcttaattccctttaaagtgagggataaatcctaccttagatgttagctaactagagctcataggtcaaatccaacctgcctccttttttttggtatggccacatgaattaaatacaattttttcatttttaaataatttttaacaatcaaacaaagaatttattttgtgacacaggaaaattatatgaaattcaaattttagtgttcacaaataaagttttgttaaaacacagtcacacacattcatttacctaatgactatggttgcattcaagctacagtggcagarctgaataatagaaacagagaccatacagctagcaaggcctaaaatatttactatctggccctgtatcccaaaattcatgcaagattcatgaaccacaattctgaggccagaagaaccacacagactatctattaccagagatagcaggcttctttcctcctaaatttcactttttctcttaatttattctgacaacaatgaagagacagataaagttgcatgaaaatgatgcagaatctaatggtgtatcactgaatacaaaaagagccacctcaggtaacaacttcaatccttgaaatgaaagtgttcccttcckgttaattattccattattccctaatgtttttaataataaaacttaaaaagtttgccacttcctgycctacttgatcatggtttgtttttacttaatagactggtagatataatcgacaactttcattgtatttcaacttcatttctaaatgatacaagtctgtgggattgtttgttttgtggtgacagtgggttgttcatatttactttttatttgttttcttttgatttggctctatttctcagttttgagatcaagattatgctagctttgaaagtgaattaggaagcatttttacatacttaaagactctgaaaatacttatatagcatgaatataaattatttggatccaacagtttctaaggataaattttgtcaatttttgtgtcttctataatcattatagttttcatatattatttctccttgaataaaattagacaaatatcttcaaatttatcaaaattcttcatgttatctgcatacggttttttacttgaaattgctttcacttttttcagcatctgaaaatatattatttcttattactgatggacaattatactcttcctcttactttctagtcaggcttgtcagaggcatgtccagtttaaagtcttttcaatgaatcagcttaaatgtactaatwaattctaatgattttctgctttttaattcattaatttttgcttcctttgttttaatttgtagttcttttccaacttatttactctaatgcccaaattaagctatttgtgtctttcttgtttaaatataaccatctaagacttcacagaggagaataactttggcttcttgcatgaagctctcattttcagtattttctaagttgtcattgatttactcttgaactgaaaacttgatacatattttgttgtctgtatcttagtcatctacttcaagtaaaattttatcaatttttaagcattttaaaaatatacatacatatacctatgtatttgctatctcttggtacataaaatttaataaatatggctctattggtaagcatgacttttatcaacctaaaataatcctgtctattccatgaaatgctttatgtcatggagtctgctttgtttaatactaatattaccgtctcagtttattttttttacctaggcttagtatatatttccaaaccatattatttttgtaaccatgtcttttgtgtctttcataacagtatatattcaatttttttcttaattcagtgtgagaggctttattttttaacacagcactttaatccatttacatttatttttgtaattcacatatttgaacatgttcatacttaattttactcatgaaagggtgagcatggatgtactaaaaatgtaagcaataattaatgaatggttacaaactcattattttacttgtttatgttatatagtggtaataacaataatcaccaacgtatatgaccttactatgtgccagacactgatctatatattcctgtctacattaattcatttgatgcttacaaagtaaacatttrctacataaagaacctaaggcaaagcatgagtgagaaagtactgagttaaatgtctatgtttttrgtagttctttgtgaaatattgtgatggaacttacaggtcttctttgtgctactaagagaatgtccttccagtctatatgcattaaaatgattttatccagaattggtgatgaattctacttaatgtctttctacatctatcaaattaatcatgtattcttcttttctacctgttttcttacctggcaaggatatatttagaggtctaatacaaatattgataaatacaaaaaatgagaaaagatgactaactaatggaaaaaatgggcagaggtaattaacaaaagcagaaatacaaataactaataaaatattaaaatatatcatattttacctatcaaattggcaaagagcaaataaatacatactgctgctgagggtgggataggagacatcctctgtagattgcaatgattaaagcaagattcaaaagcgcacttgggttccaatcctgatggctgctttgtagctttcctttcatatgggcatttattcatcagccagcaagcatgtattgtattcctactgtttaccagcctccattctagtgctccttgtccttagggaaattacatttcataagtgaaacagacaatttttaaatgtttcagaaaaggacaagagccattaaagaaatacagtgggctgatgtgatagggaggctggtgttagggatattgggaagtagggacagaagtatcctttagattacatgtttagaaaatgcatctttgtggcacccagcctcactgaacagcctctgagctgagacataaaagagaaaggtctagacctgcaaacccaagggaagaacatctcaagaagagggaacatgaatgaatacaaaagctttgttaggaaaatctgggcagtttaagaagtaaaaagcactttggcatggctgttaaatgttttcttaccaaatggcagaggccaggtcaggcagacccttgtagtctttggcaagaatgtctttcttagttcctatgcagataaaacctgcctatataaaacaggcttcgtggcacccaacctcactgaacacatgggaaaattagatcagctgctgcatgtgaagctctaggagtttagcacccagtgggcactcataatttactgccatcatcatcrccatactgtcattacttttcactgctggataagtataagtaggkatakcctctccagagagcaatttggcaatacggatcaaaaaccttatgaaatttatattatatgacccagaattctttctctagaaatgtaacttaagaaaatactccaaatctatccacacaaatatttatttcatagttatttataatagaggaaactggaaataaccaaaatattcraattagcagaagtagataaattttgttatattcatgcaatgaaatactaagatgccatgaaaaattgtgttctataataaaaataaaatagcaaaatgttcatgacatattacataaaggctggtmaaaagcatgtgctctaaatacaatcatagttgtttaawatctgktcttatttctagattgtagcatcatggttgatttttgtattgtgtgtgtgtgagtrtgtgtatgtgtgtgtacacatgcacctatatgtgcatgggaggcataccaattgtggataccacagattgtaaaaatttagcatatattaattttgtatcttaaaagacacagtaatttttaaacatggttgctatgaccttcttcaaactgttttggtgcctgaatatagatcaaacttattccaaagagaaagtcactataatttctatgttaggaagtttttaacaatttatttttattttatttctttaattgacacaaaataaccatacatattatatttatggggcacatagtgatgttttgatatatataatgtatagtggtcaaattagagtgattaacatatccatcacttcaaacatttataagatcatttctttgwgttggaaacattcaaactgttctagccatccaacaatatatcacaactttttaactatagtcatcttatagtgctatagaacactagaacttattcctcctatctagctgtaattttgtatcctttacccaatctctccctatmcccctccccacgattcttcccagccttcagtaaccactattctaatctctgcttctacgagaccaacttttttagcttctgcatatgagtgagaacatgtggtatttatctttctgttcctggcttatttcacctaacacagtgtcctccaggctcatccatgttgccacaaatgacagaatttcattcttttttagggctgagtagtattctattgtgtatatataccacatttctgttatccattcatcttttgataaatacttaggttgattccatatattggctatcgtgaatagcattgcaataaacacagaagtgcagagatcccttaaaggtactgatttcctttcctttggctatatacccagtagctggattgctggatcatggtagttctacttgtatttggttttttgaggaaccaccataatgttctttacaatggctgtactagtttacattcccaccaacagtgtataatagttcccttttcttcccatcctcaccagcatttgttatgttttttctttttgatgaaggcatttttactggggtaagaagatatctcattgtggtttggatttgcatatacctgatgattcgtgatatttttatatattggttagccatttgtatgtcttcttttgagaaatatctgttcagattattttccctttttaattggattatcacatttttcactgtttaatagtttaarttccrtttatattctggatattaatctgttgtcagatgcatagcttgtttcctttgctgtgcagaaggtttttagtttgatataatcccgtttgtctatttttgcttttgtttcctgtgcttttgaggtcttgtttattaaatttttcccagaccaatgtcctgaagcatttcccttatattttcttctagtatatttatagtttttggtcttacatttaagttttgaaactgttttggtgaatttttatataaggggagagataggagtttagaagtttcattcttctgcatatggatatccaattttcccagcaccatttatcaaaaatactatccttgccccactgtatgttcttggcagctttgttgaaaatcagttagctgcaaatrcatggattgatttctggattctctattctattccattggtctatgtgtctatttttacatcagtaccatgctgttttgatcactgtagcttcacaacatattttgaaggcatgtagtgtgttgcctctagctttgttctttttgctcaggattgctttggccatttggggtcttttgtggttccatatgaattttaccctttttaaaaacaatttaggggaacatcacacctggaggcctgtcaggggtggggggaaaaggggaatgggggcattaagacataggtctaatgcatgtggggcttggaacctggatgacgtgttggtgcatgcagcaggccaccattgcacatgtatgtctgtgtaacaaatgtgcacgttccgcacatgtatcccagaacttaaagtaaaattttaaaaatatatatttttaaccataaaatttcttaataattgattcaaattgctttgttttgttgtctaaatcaggatctgatttwgccagtgaaaatttggcaataagcacacagcactatacagcagtagagaaaccaggcagtgggttgtagcgcattcggwgttagcaggtacaggacagggtctggagccaggcaagcatgggtttgaacccagcttcactcttattggctgattgttttttggcaaattattaaactccccgagtctcattttcctcatttgtaaaatggggataaacaatgcctaccttacatggttgatatgaggagatgaggtggtgcatgaaaagtacttagcacattgctggacagttgaaattactaataaattacatctactgttataattactattattagtgccaccatcatcaccctcatggtgctaggaagaactctccacatgggttatgagatcatgaaacttaaaaacttctctaactctttttcaaaaattatgtctaatttctgggaggctttttctctaaaagtgacaaaaagaagaaacaaagtgccagatgtgatagaaagcccaggtatccatggaagaaattccagcaagaaatcctatgtaataaacatatggcctcagctctagagtagacttagcacaacttgtagaaacacacctattatttacctgattagattcaacttagccttgaaaaaaatcccaaataaataaaattataccttatctttctgtagccacaattaggtaatattggacaacaggctatgcaagaaatgtgagcacatttctctgtgaatatgtcttttccccagcactctgaataagagaaattctcttgaaatacttggggattctcagagcagctgacaggtgtggcatctgggtaaccattgtgtaaaccagaaccacacatccaggggcatctctgcaggaagatrtactcaatgtccggtttctgaccttggaaattatccccaaatgttaaaaaaaaaaaaatagacaagatagcactaatgactgagaagataccctgaaagtagatgcagagctgctacatgcagaggaaggaaactgatcatagctctgggatagcaaatgagcaaatgcttacagccagacactgaacttacgtgtgccaggaaactgaggcayasaaaagggaacaatcttgccctcatccctgaactaccaagtgagctgtcgggatttcctccctggggaacaagtactaagaactaagaagtctgtgtcaggcattgatatttttatgcagcacacgagatggtaactatttctgttatcatctctccttcacttttcccttctytccatatccaagaactacagatgacagttctccttttattcctacactttcacccagattttgtcatacataacagatcatactttctgaccaatcttacctgattgttttttaggcgtactttattagttgcattttgtcaaagtcttttcagacagaatatagtatgtgtgggttttttttccatgtccaaacawgtctattctgaacaaacctaattattaacattcgagaattttatttttgtattaataatttgaattacacatgtctctgctttctgaaaaaataggacatggaatgtgtgattaattttcttggctattctgatgattgtctttgttttgaacttcaagtactatggctctgtgcactattttcactataaagccagcaaagcagtgacagattcgcagatagcatcatctagaaatttaaaacatgagtttgggcatgaagcctgaatttgaatctgagctcagctattttccttagttgcaaattaaactccttaagcctcagtttcctcatctgtaagatgaggttggtaatacagtcacatcatgttcttgggagaattaaatgggataatgtttgtgtaatattttgcatgatgtctggcacataatgagtgctctataaatattttatccatgaacgaatacttatttaacaactacaatgtaccaggcacaaatcctatctttatgaaatttacatagggagatawgttgaacaaatcatcacccacataatcaaataagaacaattgcttgagctatgaagaaaaagtttaggatgctttgataacatttaatgagagacccccccccccaacccagcatggagtctgaggtatatggatgggtggaaggggatcaaagatctttcccctgaggaagggtgatttaagctaagatataaatggtgagtggaggggacagaggttgagaggacactccatgcaaggagaagagcagaagtgaagggcctggtgcagagaagtattccatagatcaagagatcaggttgtgtaatcccagcactttgggaggctgaggctgaggcacgtggatcatttgaggtcaggagatgtactcaatggagtacatctcttgcaataatgagtcttattattcaacatggtgaaaccctgtctctactaaaaatacaaaaattaactgggctatagtagcgtgcacctgtaatcccagctactcgggaggctgaggcaggagaattgcttgagcctgggaggcgraggttgcagygagccaagactgcgccactacactccagyctgggtgagagagtgagaccttatctcaaaaaaaaaaatttaaaaataaaaataaaaaagagrtcagggtggccagagcaggggatagggaagagagtgaaaggcaggccaggagcggaaggcaagagcagatcatatggccctatggcccatgctatggacgttgggcttcatctaagagtactggaaagtgtttgaggcctttaagtggaaatgtcaccraattagagttgtattccataaaggtcatcctagggaaaagggaaggtgacccaggcatgcaggagatcaacaagaaggcacttacaggtgacaggtgttgtggctgagtagggcctgacaatggagatggagagacgtggaaagactggggcaatactaggagttctgatctactgaagacgtcaagaagacatcaggactgattgtcactttttcttaacagtgagtgaataccaaatataattkataaagatgggaaatgccagaatcaagcagactagcatgtgtcattttgaacacattaaccctgaggtttctgtgagacatttayatgaagaggcatgtatgaatcatgagctgaaataagcaargactgaagccaytcgcttgatggctgaatgctagctgcagatactcagcttgaatgtattcatgtttttttagagtagggtttctgagagcccccaaataattggaggatatttctactcttgcaattgaaaaaaaaatcaatgtgtcaattaaaagaaagatttctaaactggaaatctgaagaacagagtttttaacctagtcgttttgctcactggctgtgtaaccctgagcaagttcctgatcttttctgaatgttgacatccttgcgtatttgtagtccagacgtcagctcagctcttgttgccttaagtgtttatatgaggtgattataaatgrcttcaacaacaaattagatcaaaatgtgtgtaatgaatgctaaatggagaaaatttaggagttattgaaatacatatagactagtctcattctcagaaacagataaatcatgctaaataagttgtcatgtccaataatatatccatattcttatatatatatgccccttaaaatgcttctaatgtacaccttattgcaatattaaaagggaagcaagacattcaattttttcattcattcaacattcattcattcaacattcaaaaaacaatcaactttctctccaccaataatttttgctttctcaataagttgtaaaatttcaggatttaaatgtcccctaaagagtattttaataggatgctgtgtggtacttaactccccagtctctggcctcagtgagtgggtatcccgcctattctgagatacttttcatgtatcattgatggtaargccaagttccagggcagcccaaatcagtcttcctatagctttcagccatcggttagagctctgaccccaaaccaatatgctagcctcctggttggtctccctagcagccttcttctttagttattcttagatagtataagccttatgaaaaacttaggaaaatagagtcatgccagatccccaggttctaacacattctgaaggcagtcacttgctaacaccaattcctatcttgagatagaarctcttctaactctccaaaatcaaatctgaataaacaacaatagtgagtctcattattttcattttgacgaactgtgtcagctttcttttcttctcatgaacatttttctgtgagtgagagagagagaaattgataactacagttgagtaaargttttactgcttccacacccacctggggaattagtacatctgtgctgagattgctgaccaacactattgttctctaacagcacatccagaaactattattggtggtgatctgatatgttctgaattaatcacctaattggagcagatattgggtgagcatttcagaggggaatcccgacagcgggaaacractttttcttagaaacatggctggtgtgaggtcacagaaaatcacaacgggtaccagggattagtccttctgagacagcctcaaatgcacttgtttctttgtttgactatttttcttcaacttttattttaagttccggggtacatgttgcaggatgtgcagatttgttacataggtaaacttgtgccatggtggtttgctgcacagatcaacccatcacttaagtattgagcccagcatccattagctattcttcttgatgctctcattcaccacaccccccaaacaggccccagtgtatgttgttccccccatgtgtccctgtgttcattcagctcccacttataagtgagaacatgtggtgtctggttttctgttcctgygttagtttgctgatgataacaggttccaactccawccatgtccctgcaaaggacatgatctcattcctttttatggctgcatagtattcaatggtatatatgtaccacattttctttatccagtctatcattgatrggcatttgggttgattccatgtctttgacattgtgaatagtgctgcaatgaacatacacacgcatgtatctttgaaatagaatgatttatattcctttggatatatacccagtaatgggattgctatgtcaaatggtatttttaccacttcccatgttgatccttcaggtatttttatgcctgtcttgggtcttccaggttttacaaaactttctgaatcattgtcaccactatctctggaacagttggaaaytcattctgaatattctttggccttcrgaagagttttttagtggacacactgccttataggagaygtatatttatttcttaaaattaaattctgatatctcaaccactataaccctaacctacatcctagtgaacaaaagatgccacatcgctcagctgagttaacagtcacgcaaatgatcacatcctggaggatgtaattctctgctcttctatgacactgactagagtctctgggtgggcacttggattaccatgctctactacctacttatccagccaagtgaattttcagtctcccgggcctaataagttttcatatataactcatacttcatctttaattcagtaaagaatcattgaaatgacttactcaagggagggatagtgtcatgtttgctttctcagaatctctctggcaagagtgtgagaaatgggttggaagcagataagaccagaagcaggaagcccagttagaaaactgatatgaggttctagctagacgtggtggtggccagaactggaatggacaataacaagtgaatacaggtttcgtagtcagggctgggtgattggatgttgtggaagaggttggagagtggacggttgaggatgacagtgggtttctggcttggacaagtgagaggaaggctgcccaaagtgaagcagagaagcaagagtcggttttgtgagagatggtgaattcagtttgatgatgttaaggatgagatagtttggaaacatcaggagggatgtctggtaatagttgtgtgtgcaggacggagctcaggtggcagagatggtctaggcatagagatttgcaagtcatagggaaaagaaagaaactaaaggtatgaaatgaatgagctgccctgaccttgatcttccccctgaaagtaccagccagttctcagatgagaatgcagaaggcttcattaagtttgaaaagagcaaggatgtctcttgcaagcaaagctgagatttctaaatgtgacatttatatgaaagaggaaggcatggccaattcctattttcaaaaatgtctataatcaaaacagtaccatactctattgccttttaaaattaaagaggaaattgccccaatccctttctgcgtgttaaaatttggtctgcccagctatacttagaagccatattatagcttccaaaaagacatcctgcatgttttaaatgagctattaaaattcctatatatatgtattatgtccatttgaatacaggacccatgactgatagaggtcaggccctggtcaggtgttctagtccagatggagcctaggactgtttacccaagtggctggggagaaagagcagagacctatagccaatcttcatccctagcttaatccaggcaggggagggagctgcacaggagctgggagtgaagagcaagggtttattcatattcctgcttcgcacaaagctagaagatgctgttggaagatgcaagggccatgcctctgggtgagccwgtggcctgggagaggacccggaactgtccagagcactcagattaagcatctttgcagcagtccggaagcaaaaacccattttcctgctcccctgttcacctgtgactattcaagcatcagccaactcacctgtgtcctttctggcaaggatcaggacctaaacctgctttagcctttaagctgaatatgaagggacacagtcctgaaaaagcctcacacttcctccttgggagatcagttttggttgtttgtgtcactgcttcagatgtgtggtgtttggccttggacttgaatcccacaaatatgagaggagatgatgactatcacatctgaattataggcttcaacccttcttccaggaccctataaaatgtttttataagtactggaagtaatcattttatgaagtgcctgcaacttagctgtataaaactacttggagaatggtcttgttttcacataaatgtgagtgtcttgaagatctgaaagatctccttggaatgtgagttaagacaggctctgtttctgcatttgagaatctatctccagctgtgagtaattgaagcaggagctgtgttcaaaatgttgttttcttccatcaaccaatgtcatctattggctcaaaagcattcattgagaatcatgttgmtcacttagagagacacgaatgaaggataagaaggagggtgtatctttaaggagactaaaaccaggaggattgaatgtgtcattcattcagcaatattgttgggagcctactaaatgctgtacaccattatgagtgttgaggatacagcagtaaattaaaaagacaggaagctcttccttcaagggagtttatagtcaagaaaagcaaccaaaaayagaaataagtaaagcacagaaaatggtgataagggctatagagcagtgttccccaatctttttggcacaagggactggtttcatggcagacaaatttttcatgggcctggagatgggaggatggtttcaggatgattcaagcgcattgcatttattgtgcactttatttctattcttattacattgtaatatataatgaaataattatacaactcaccataatgtagaatcagtgggagccctgagcttgttttcctgcaactaggcagtcccatctgggggtgatggagacagcaacagatcatcaggcattagattctcataaggagcacagaacccagatccctgacatgtgcagttcacgatagggttggtgctcctattggaatctaatgccactgctgatctgacaggtaatgtgagcaatggagagaggctgtaaattttaaatacagatgaagcttcactggcccaccacacacctcctgccatacagcctggtttctaacaggccacagactggtactggtctgtggcccaggggtttccctgctataaagaaaagaaactggtgctaaatccacaggggaaatggcaagaaagcaagctatactgtaacaaagaagggctcgtggatgagtgggattttgaaaacagccttgaagacagagagaattggacaaattcaagtttgagtagatacaggggagagaggtcactgagtgaagagcagaagagtgcagcagaaaacagccacaggagctgaggtcacagtcacctcgtgaactaacaaagttagagtgaaaagtctactgcggcaggaagaaagccttggtgttggaaactcataattcctttgttggaacaacaaatgcctccaacataggcatttgttggagacactcatagaaggtaaacacctttgcatgttcctgaccattctacctccagtatctatggaagtgcctggcctgagcaggtgctaagtaaattatgtgttaagtgaatgaggaatgaagaaggttgtgtagggctggtggaaccaaataataaaggggccttgaatgacagagtgaggagcttggacttgatcttatcagcaacaaaaagataatgcataacacatgtcttggcagataccccattatgaggttcccttagctacaatactgagccccttgataagcctcccctccctttagttatttctgggaattttcccccatggtttcttccctttccatcctatctccttggaaaggaccagatgagcacagccttagcctcccaggcctcagatgtggaggtgtgtggcccgtgtattattaagaagctcacaagttctgacgcgaccagcagcccaaaccgtgctgtgctccaagcaggaatagagctaattccattcccgcttcatgcaatcagaattgcctgggcccctatgcagacgcactgcatgacagcagcctttgaattctcctcccacccctcctttccgtgatctcaaagtaaacctctaggatagacatgagggtgtcctcccaaagccttccccaaaacctcagtttcccctcttccttccaaagcctgccctcttcccttctggccatctctccaccacgttccttcatcatcctgcttgtcatgggctgttttccccttttgactgtttccatttgcctagaagcatctgctcttacagataggaaggggtagcatcaattactgttctaagtctttacttttacagatgaggaaactgaggcccaagarggaaaaaatgactcacccagctttaaacaaccagttcaccatgcagcagtgctggggttggaggtgatggagaaggaaaatttggaaggtgtttcaaggaaagacacctgtggggtttggtgaccagttggaatgtaagaggcaaaaaaaagggagaaggaactagatacatattcttctggcaggaactgttaattgggttcctgctcccatcttgcactacagtgagagagataacctggtctcctaccattggaaagcatatcatctgtgctctggaggatgagacaatcaaagaaaacaagtaaataagaaaacttaaaaactgtgatatgtaccrtgaaataaataagccattcagcaggtgtgagtttgaagattactcttctttagactgggtggtctcagggagagattttgtgcagagacaattaaaaaaatttatatatatatatattttttttattatactttaagttctagggtacatgtgcagaacatgcaggtttgttacatatgtatacatgtgccatgttggtgtgctgcacccattaactcgtcatttacattaggtatatctcctaatgctatccttcccccctccccccaccccacaacaggccccagtgtgtgatgttccccttcctgtgtccaagtatagtcattgttcaattcccacttatgagtgagaacatgcggtgtttggttttttgtccttgcgatagtttgctgagaatgatggtttccagcttcatccatgtccctacaaaggacatgaactcatccttttttatggctgcatagtattccacagtgtatatgtgccacattttctcaatccagtctatcattgttggacatttggtttggttattatattataaaaatgttttaaatggaagactcatgaaacaatggtgaccttagtaaaattgacaaggcttggaaaatacactggcttatgaaaggagatctgcttttaaggaagcagcccataaaagcacatgatgacttccttattgctagctttttcctgaacaaataatcttttaaataaagggagtggggtagagaatcttgctatcttctgagagtgtttcaaatcaaattatttattggacacaaggaggtcttctagggagaaatgtctacatgtggggtcccctattactctttccagcgttcttatgggcgttggggtccaaatcatgcatttgggtggacctgctcctttttcctaaaaggagaaatgcttcttaggctttgttaactggtgagacgaaccatttgacaagttttaattccagcagctcagactcatccaggatgaaattcctgattcctcagagctctccttggccagccagacagatcctgtcaagagaactttagctgccacttgcagaagtttgagggatgagaggacatctccccaagtgacctctttccttgcctggattggaaggagcaatggtttttcacagtaaccatagaccaacgtgcctcagtccctggaaaagtgggcagcacttccatcccacactgggcaggcccccagggtgccctgagcctgtctccttcggggatgtgtgcccagcacagtgtgcccggttccccttactcactgtaccctcccatgccatgctcccatgctttgccccatgcaagaggagagctaattccattcctgctcagtgccaccttcctcactttaccaaccactcaagttttctgccagaaagttcagaaaagactccacatgccaacactctcaagtgagcatacacatgactttactcagatacatgaatggagagctgtacaatttcaggccccagttaaataggggaaaaaaagactagcgaagtccttccaaagaggcaccgaaatcacatctgcttgctctgttggtaagctagattctatcattaggacatacaggctaagtgaggttccccagccagggtacagcttgtcctctctacctgggatccaggctgaaccatctttaccatcaccagagagcactgcgagaagctaatacaagctaaggactcttcccaggaaaatgtatctctggacatacacatttcatgtcagtcatgggaagtctgtctgtgaacctgaggttgcaagcctaaggttactgtccatggttattctgaccaccttcttagagagccctggtcaccatctaaggtagataatctaaaaacttcttgctgactgagagctgcccaagtggccccacataaaccccaggagggttcaggccaaagtagttcagcacaaaggcatctggtagactctggtctgctcttaaactttgactctayagcttgtctctggggtttaatttgatggggcagttttcttcctggtaagaaggagccattgggtctggcctgaatgttactggcactggagctccttggcctgttggtgtggcagcctgtctctctcctctgctcattggatgtgtaccaggcacatcggagagaccactcgctgaacaaggagaaacaattaaagattattttctcccatggtcatgtaacattagcttcttctttggagtccacatttttttaaattgagatcattcaaacttcatttctcagaatgtaaggccctgctgacaaacccttctgaacagcacactctgacttttaaaataatgcaattattgaggatactactcccctctcttctttctccttatctctgcaaaacctgttgtcattcagtgaaagctggacatactgccattaacacttccatgtcatcgtagggttgctaaacggcacacaaagatcaggagtggaaatgggtgaggtggagccgagtttgggtccagctgtgtgatttgggggaactactcgcgtcttcagccttgctgtcttcacatataaaggacaggttgacagctctgatctctaagtgcctgccagtcttcacattttagccttatgcaactccagctaagtagggtttaccatagcccagtgtctctcaaggttgtcattaagatgtcaagttttccagggggtaaaatgaagcgcagaagctggaggctggaaccaagaagactgactcacagctttcagcttccatatcaagtcacccttattctgagagaaacagttgaactaaggaggaaccccctaatgaccagtgctggataggaattcgagaactcagttcctactctcaccaacttttgaagctaaccatagcactcaccggtgtatcaaattcatggaggagaccagcatgggcaggaaaaaatggttttatcttgtattggagccattgaggcaaatgttgctgtaattttataactgtaaaaggtgactctagtcgccaagcctttactgggatgcctcctagtgccccctcataagcctattagatgagccccagttcaaaaatgaagtcagattttcccaatggatatagcattcagtggaaagacatagaggcaacattttaaattattcgtttcaatttcttcttggcatctagaggcctttacagtggaagtgaggattctgaatctccatgaatgagaatgttgatggtgtttggccataaactcctgttctatccacctcagtctgaccggcgtaagttggtcagggtgtccagagggtcaggaaagaggcagaaattctgcagcagaccaaatggtggaaagaaactcagtgacaggaagaatccttaggctgtggggattttccaaagcccaagaattaaaccaggcaaattcacatgcaaaggatggcttgagctgcagggcaaggtgttcaggggattaagtcaggagctgttggctcttcttgaagcagagattgttgaggagaaaaccatagctacggtgaccaaagaagtaggagcccctattctcatgtgggtgatttggaagtctggctcttcctatgaagcatcatgagaaaaactagagggtctgatgccagatgatagagcaaggaaaaaatggtagtaaaataacattacaaaaaaaccaaatgactgaactgaaatggtgggcaaaaaaaagaagaatgagacagcagaaagaagtcagggttgggagataatatgaggctacagccatcacgcagaaaagaaaaccaagccacactgtgaagaagaaccatggcaagaacacagagacacagccattcattcattcagtcagtcagtccatccgtctgtcagaaggtcggccattcatgcagcaaaaactaggagaatgccttcaagactctagcattttactggattctggagctccgtgagtgagcaaagccggccggatggctgctcgaatggacttccccacagagtgactgggtcagaggcacccacccctgaaccaggctggttcagccctgaccctctaggtcctgatggctggaggccaggaacaagcattctccagctgtcttcccaccctaaaaacatagccagtcctcaggaagaaagagatttgggaagaatggaggctgaggatagaactaatgcagagttcagagaaaatagaaccagacggggaaggtttgggcagagaaagagagagcaggaggagggtttggggccatgcagctgctttccaagcccaattccagccccatctctcctttctaggagaggaaaaataaaggaagaaatacgtggatgggaataatgtcaataaggagaggagcagttcttttgctgtcctttttttttttttttagacaggggttcactcccgttgcccatgctggactgcagtggtgcgcattagctcactacaacttctacctcccgggctcaagcaatcctcctacctcagcctcctgagtaactggaactacaggcacatgccaccacacccagctaatttttgtatttttagtaaagatggggtttcaccatgttgcccaggctggtctcaaactcctggtgtcaagtgatctgcccaccttggcctcccaaagtgcagkgattacaggcgtgagccaccatgcctagcccttttgctgtcttttctcactctttggaaagttcttgaaggaagcatagctatgagtctctcatctaaccccagccagtcagcagctgctcaaagaaaatcacatggctcccagcacctgttccccatcacaagggaagaatactccaagcatgagaatggatcctgcaacctgcccctggtggaactatcagtttgggagcatgcaaatccgtgctaggcttacacacatctggctgctgtcacacacttaataggataaaccaaacattgtcatttacaggaaggtctctggtctggaagcataagccaaaatctagagatttgcttggattaaaaagaaaatattcctggggttaggcctagagattatctgacattcagatcttagtgtaaattagttttaatcaactctctttctcaccctatacctatacctgagccatgttgaagaaatgagtgttttgagtggggtacagagagggggaggccaggattcacctgtgaagactggaacacagcaagagactagagagagggcccaagagcttggctctgggtcagccatacctggaattaagagcagggccacgcaaggaaagaagggatgggaaggaagtgactaaaaggaaatgttgagatttacgagtgcaaaactgggttctgtaagcagaatgagtgtaattgaaggaattatgggaaattccaagactctcaaaccatatttattagcattcacattcatagtgcatatttttttttcttttttaaaaattgaaattcttcaaataaggaaacgaccctcccctccctcgctgatttacagagtagtgacattcccagacaaggtgggtttcagtgtgctcagctcagacattcttgtagtcattaagcacaggcccaggcaggtctttgtgaaatgggtttccttaatcacatcactgtcactattagtaggaaatattggacaatatataggtttcataatgtaagacaaatttttttctggaactgaccgcatttgcacaaaaccatcagtcatgttggcattagccattttttccatcacagatgaggttcgaaaaagcatttttccaattcagcttcccccagctgcacactttatcactccccatcagctatcctcctaagagatgtattattgcartatatttggagattccacaaaggagcatgggccctgaaatcaatcacactgcctaatttcaaacctaccagtaactatgtgagtgacctcggttgagctactcaaactcattaagccacagtttcttcatttgtaaaatagggaagagtcacataactcttcatgttactaacgatgattaaatcatatggaaagtgttcagcacagtgccttgcctgtttcaaatcaggcattcaaagactgtaaactttattataattataggacaacatgaaaagctttagagctaaagaataaaactttctcactttacatgttttccaaataaacacccatyatgtgkrtgtgtgtgtgtgtgtgtgtgtgaatttgagacacatggaacttagcagggagtgtgcttcagaggtaataaatgctcccatcaacaaccacactattgtgtcttctttgggttcttcagtatttaagtttactctttgtttatattgatgagctttttgacttaatttcagagcactgtttgccagagtggattttaatagcaccagcaatttgtcacggctctgataggtccacagagcagagaggaaaagaaagacataaaatcaagaccttaggtttgaaacaacagcaacaaaaaaattgttcagggccattaggaatcatccattcaacatactcctttttcagataagaaaactggaggcccaaaggcatcataggagtttcccaaagccattctaccaactgtacacgaagctgtgactaaaagcccgcggagaaggaaaaggagcttgggagccaagaaagaaaagaaaggaggtggaaggaaagtcaagatgttattttgcaatttctctgaaaggagtgaagagggacgtttgggatttcataattcataaagctcctttagcaaaagcccttggaagtctgagaatcagagaataaagaacattggattgggagtcccataccctttatccatcactcttatcagtattgtagctatgaggtttgtgacaatctctttaataagcatttttaagagttcagctttttattgaacgtgttataaaataggtttactcaaaaaaaaaaaaaaaaagcccatattatcatcagactccagattcttctttctttgcttccaccttcttcttctcggcctaggccacagtgacagaagggcaggacctcccgcaggtacaccaccagctgctgagcaggtcttcccaccccgcccctccactgcagaggaggctcccgaagttgacgatggccagggccttggcagacaagccaggccaaaagccgtcatcatttaccccagctgctttagaaacgacattgaccttatcctatgtgatgatcccctcagcgttatacagaatgagggctgagtcrgtgcaggcgagctctgagatggagtccgtggtgtggacaagtgcaaggctgggctgcccggagtagtgctagtgctggatgcagtgagggcctgaccccaacgcagcctcagctcagaagggcagagcatcttggcggcagctgggaaaaggctaaataagcattttttaaatttgtaaattgagtaattggaggagataatccttaaggttgttccattttaagacttcacagttttgttcttctgctgcgaaatgccctgtggcagtctctgcgcaggatgtgacgggtcctgaggcctggttcctgccgtgcacatcaacgggtagggtttgggtaggtagagaaggtggaaaagggcatcaaggacacagtggcccaacttgagaggacaaaaaaaatgatcaatgacctggagaaaaagtgtagtgagtctggctagagaaaaaatagcaactagtcatattagaaagctggttagaccagaggctgtggaggactccgaatgtgaagcaaagacacacatttgggagacatcgagggatattgacaaagggagctaacggtgacrtcaaaagacatcatctaggaaaagtgattgagaatcactggcccaactttggcaaggccaatattgtgtaaagttgagattctcatcaaaatccataattctaacatttgggaggggaggaattcataaacactgaggctgtgtctgttgcataacactgcatcagagaataaarggcatgttcagataaccgaattttaatatggattacttgcatggattccaacttacttttcaatttaggcaattttcaattaggcaaaacaatttacatatgtggactcagtctgagtttcacattttcatttggtaaaacttcacagcagctgttggtcactgagagccagtgcaaccctacccactgggcctgctcctgtaattaatgacacacgcggaccaagtaggaatggtctttgaagatattgcaaaagggtgacagtcataggagctagtcagtcaaaygtgagaaactcatatgtgtttgggatcattttaaccgtttaaaaatacagaaagatgtctgtttgattgttttcctagccaattggcttgctggctttcaaataatatgtataaatctgtgtgttttcttccagggtctttcttccctgatttcaagccctctgaaacagtttttaaaatagtattttggctcggatatctaaacagctgcatcaaccccatcatatacccatgctccagccaagagttcaaaaaggcctttcagaatgtcttgagaatccagtgtctcygcagaaagcagtcttccaaacatgccctgggctacaccctgcacccgcccagccaggccgtggaagggcaacacaaggacatgktgsgcatccccgtgggatcaagagagaccttctacaggatctccaagacggatggcgtttgtgaatggaaatttttctcttccatgccccgtggatctgccaggattacagtgtccaragaccaatcctcctgtaccacagcccgggtgagaagtaaaagctttttgsaggtctgctgctgtgtagggccctcaacccccagccttgacaagaaccatcaagttccaaccattaaggtccacaccatctccctcagtgagaacggggaggawgtctaggacaggaaagatgcagaggaaaggggaataatcttaggtacccaccccacttccttctcggaaggccagctcttcttggaggacaagacaggaccaatcaaagaggggacctgctgggaatggggtgggtggtagacccaactcatcaggcagcgggtagggcacagggaagagggagggtgtctcacaaccaaccagttcagaatgatacggaacagcatttccctgcagctaatgctttcttggtcactctgtgcccacttcaacgaaaaccaccatgggaaacagaatttcatgcacaatccaaaagactataaatataggattatgatttcatcatgaatattttgagcacacactctaagtttggagctatttcttgatggaagtgaggggattttattttcaggctcaacstactgacagccacatttgacatttatggggagagggcctagagaggaagagcattaagatggtggccgagatccagacacattatttttagagcaagtcctgaaactccaccctttctgatacatccaatttctcagcttgagggaaacttggcagtgaggtttacctttgactgcactttgaatggatgctgctcctcatttcccaaagatgagagtgaggggcactcatgatgtcttggaatgtagtgttctctatccttgggtcaggagagggttgaaagaaccaaccagggtggtatggcttttcccaagagaaaacaatagacctgagcatcattctttcaatttaactactagagagaaaatccattaaacagttccaagatcagatgatgataggctttctctctaatatctttaaagagcaagaggttggtgtggctgttaatttcttgcaaagatagaggctgttcacttactgcacagccatttcaacatggcttacaaaagcctttcttgacaaatcacttacctgttccagaactctgttatgaaaatccagagcttataatattttgaaaggcaaaagattgtctcccattacttcttatctgcttcactattgcataatgaatgagcttcacctgtggcatgttggaatgagccttatgatccaagtacattattccygaactttgaaaaatactaatgcttagcttcagacaatactgatggatcaccaaagaactgtctaacgcaggagtttgcaaacattttttgatagaaggccatttgttctggtaaaagatccagtagtcaactcaacttcatctattcctacttttctgcaagagcttggggaacatgctatattttgctttatgtataccaaattttggtaaaccataataactcagtacagaacttgtgtatctcttttctgaaatgcctggaaccagaagtgtttcagattacagattttttcaaattttgaaatacttgcatatacataatcaaatatctctgggatgggacccaagtctaaacacaaaattcatttatgtttcatatacacctcatatgcatagcctgagggtaattttatacaatatttttaattgactgtttttgactgcaacccatagacatgaggtcaggtgtggaattccccacctgtggcgtcatgtcggtgctcaaacaatctcggatcttagagcatttcggatttcagattttcggattagggctgctcaagctatagattactaaggatgaagatggtaactataagtaaaaattaaaatatggctgtcttttcacaataaggatttaaaatagaatttaagtttttggaataattctcgacaacaatcagtggtctaaaactaaagaccatttgcctggcctctttcctctattagggtaatttcctctaacaaattcaaagcagctgtaaccttcacagcaagagtagcggcctcaacatctttttcttcttctcttgcagcaaaatgataatttccttaaattcttcttaaaaccaaatctctttccacattgcaatggagggtatgtttgcatgtggatttgggttttgttataggttgtatttagacctggagtgtgactgttttttcagcctttttctgaagagtgtcttcttactggccagatacatattcagccttgtgttcagaacttggattctggcactgagatgttggccggatttttagactcttctgttctctctctgtgtcccataagagctctgccagatgtgaatgtcctattatagaggcaggcatctatgaagaacttgaatatgcaaacccttgcttctctttggccttgataggaaagatcagtttcattgttgacaagagcttggtccaggatctgaataagaaaatcacttgccccactcccccttacaggaagagcgtcccaacaggaagaatgattatcgtttttcttcaacaaattatggttccatgtttgagatgatcctttaaacacctttacagacatattaaattttagatacgggaaagcttagaaatacaggaaatctggccctaatgccacatctaatcaaaataaacaactagagaatctttcagtcaacggattaaaaccatgacaattgtatccatgtaaaactatccgtaaataattttctgctacactcttctccagccccctctctccagggaggtaaacttttaacatttttttcctttcccatagcatgatacaccaaatttacaagaaattgataacgtcacccaaaacttagtcaaagtggggtaaagaatatatgagttgaattacttttcgctcattccccctaaatctctgtacctttaagcatgccaaaaaatatctaaaattgttgcagtttagcaaatgattgtcatatttatactcacatgtttactgcttctatttggagtttgaggaatttacccagagtaacgatgtcttctctaatgtgttataaaaagtagttgctttgggattgtctaaacatcacaaaaatcaacgtgacattatgggatagggcaagtttgagtttattctgacattatgggacagggaaaatttgagtttattctgcaactcaaactgcatgcattaygagagaccctgaatctcattattcaaaaatttccccagattatgtcaaggatttcagaaaagcattttactcatcagttttctttcctttgcctctctcatgtcttatccaagagggtttctgcttgtcgtcacatagcatatctaacactctccaaaatattcaaaaataaatattccatggtagacagtagtgtttgggtaaataaatattctcttaagatttttgttaggtcctacagtgtgccaggcatcttcagggaattttgcacccattgcctctaaactccttggaaactctgctacccctattttacagataaaaatctgatcattgtaagaggttaaggacttgcccaaggccaaggggaaccatgatttaaacctgggtctccctattctcaacctgcacattttccatagccccccttcctcaagagaatgggrgtaaacgttttcccatttggattaggtgtgctgaggatgccaagccatatccaaactttttaatgttctgtttccttgagatttgcctccaaattaaccatggcaaacatgctgccaaatctccagcccagtcaaacccaagagcagggcatctgtggaagaatttggtgtctgcacttctatcagactgcatcacatttttaggagttaatggcctggaatgtgattaaggccttgcaaggaggacatactatggcacgctgggggaagatgggcatagaagagtatgcagaaggggccacattggccaagaacagtaaaatgcagttgctgacaggacacatatcgggtgttgtattgaagttattgatgaccaaccacagttcatagaaacacttttgggaagtacatcccttttaaaaataaatgaaagcaaatacgacataactcactctcactcacctgtattccaactttttttttgtttggacagaggggaatggattgtagatatttcaccaagaattgcagagagcatatcaagcatgtgaattttatgatgccaccgtggagaaagggttcagaatgctgatctccaggtagctggagacctaggcagtctgcaaatgaggagtcagctggaagctatggctatgtattatgtgacatcgcttgttcctaagtgaaaactggatatcccaaccttctggcccagtaggtttcatggttaagacctggtagtgagaacattttaggaactatttgcttgggcaggyaatttttcactctgatcacagctacttaatcagagcttgacaaactttctcaattgcttctggggctggtctgctcaggtcctttggccaaaaaagatgctgcctctgtgtgtgaatacttgttgacttaattaaagaaagagctctgctcattagcaaagggcactgaagcagatgggaggtaaactctccaaggaaaaaccaagtgaaaagaaagcagaggaggcaaatatggagacatcagaggtatgcctaccagttactctgatttttttacactactaggacttttaactatgaaaccacctgcgcacagctccagtggagcccagttggaacactgtttgcacctgcccygtatctgcagactgtgctggggagctgggctgagccaggctgctgtggtgccaaccatcttcagaaagcaatggcagctgtggcctcctggccctccagaacccctgggagcagaatgagtggagatgatcactgtggggctaggctgacaaaagcaagttagaatttcagtggaggacaccagccctgctcccatcagcattagctcattcacgctccccagacccaaatgtggaggaggggttgagaattggccttatctgctctattcaggaaattgtcatttctgctttgctgctgcaacatggattactggttctcccacctaaaaggaaggttgtggggtttggggttagaggggtttaggagcaggaagatttaccatagacgtcgcttaaagcaggatggttgagtcatggcttgctgcaactgataagcaaggaactgccctaaagattgtggcttattcatttcaaaagacaaaataattgcctttccttttcgtgtggctcargagttattactttactttttctctctctgtatcatattcagtgcagccacrttataaactggaaatgattattactaaactataaaaactacagacttaattaggcagaaaatctaagagcaaatgtacactgtattttgagaaaaaaatgacggcactggcttcttcaaaagccggatcctgtaggtgcattcaaacgcagtagagagaaagctaagacagaaaaatcccaacttgagtttaatatttctgtccgtttatatagcactttatgtttgtcaaagtaattgtgcctatcttaagtcatccctgtgcagtagaaggagaaggaagagattattacctacactttagcatataaagaaaagaggaggtgggagatttaagggtttctttgaatatccccaaatccagcctccgactcctttttccatgacacctccatgtttcccaggtccactgtgtttctcgacactcttgacgttcatatctcactcatttgtccctgacctataattccagctctattggcactttctctcctgccttatctctgccatggctgggcagcatgtcactgttctaggggccgagggcaaatttgtctatgcttctgtcattgactgacagacaagcacatgtgattctgttgtttctccctagatggcagcagcagrgccaaggaaataggcagggcaggaggctcttggtttgctccacagggtgacatgtaaggcagtgattgccaccttaatgtcctcaggaacgtagaggtcccaaagggagtttgggaaataattcttttcccggtcagcctgtgggtcattgcatacccactggtcatcagcagcagcaaacaacctctcctgcaccccgccctgcacttggcatgaaaaacacagagaggcacagagagtccccagcttacaagctggatagagttcaagttcatctgtttcaaagtcaagaatgcatttttccaagaggcattgttataaatgggggagggggaggatgttcccagattaaccaaaaaataaaaatctatttaatgtatattaggagtttgcaaaccttttctgtatgtgactagatagtaaatattttaggcattgtggggtcatacagtctctatcacacattcttatctgttttgactttttgcagggagggggacaaccctctaaaatgtaaaaacccttcttctctcaaacaaaacaaaacaaacaaaaaaacaggctgcaggccggagtgagctcatgggccgtaatttgccgtcatgatctatgccgttactagctaacagtgtagtacagatgatgctaaacaataggtttcggtgttccacatacaaatatttttttcatatgccattgacacaactccacttggctaacctgcatgagtcattggataaagtggcaagtccatattcaaagtggccccactccatgaattgttgtgaccttccaagcaggtatcaggataagaggtgagcatccgccacccccactgctgtcatctgtagagcagaaaggtccactggggcccaggtagcctcaatatcattcagctcctcacctcatcagggaaacccccacagcacaatctggctgaccctaagagtagcaacaataaatacacacctcctgaccaaggccaacctgaaatttctcccagacccttgggacctgcccaagtggaagtccccagaggaccccaagagaatttcagggccacacttggctccttgggaaggcctcctggacatggcaccccacaccagggcatttgagggcctgcctggagctcaccaaggagagccatggggttcagaaagcatgctgggtatgaggggcatttccaaatgacagataggatgcagaatttctctcctcctttttctcttcttcctcctcctcctcctcctctacttcttccttcttttcttatttttccttttcctttgactaactggaatagaaatgatattactatggggaagcatatttagccctcccctaagaataccagattcatgtttccctgagctgacacacttgttggagggacctcttgttccttcctctctccagtcctgatgggcaacgaggaagagaaagactctcccaatcagaaataaggtgcagttcctgcagccgagggcacggtgttcacagtgttgagagaggaggctccacagcagagctctgagatggggcgtggatggtggtgggtgcagaactgatatggaagaacctggaaatactgaggccattaagtaatctgtgacctttggctgatgcttcatggcagctttccctcccttcccttcttcgtcccctgtttggtcttggtcctgtgccctttcatctttcccatctcctttcttgatmccatcctctccattattccactctccccttcttgctaaacttacaaacagtgaaagaagctggggtgggtgcccttgctccagagggtgccatttcccatggaatccatgctccatgcatagctctgagtgatgagatggggctgctctcagcaactccatcctcttcccaggtcagcctgattctgtgagctccaggcccacagcttccagagagcccagggcaggagacagtgccaggaggatgaggacattctgaaggcccccaatgacttttaccctctgcttgcagtgctgccttcctgttcttacacaattacttccaagtgaaaggtacaaacaasgtgcagccacattttggaaaagagctggtggtcagagtgggtggctgcagtatttctatgagcctccctggtgtgcacctcttaccactctctgatggttcgaaagtctctactgagcccagcaaagtaaccttctctttctcttcttctgcatcttctgtctctttcctttattgttcctttctttttgactttcccccttaggagtgcctgagggtcttcaaggccttgattaatcccataaagtaaacctggttttatgttagcattgagcaatgcttaacccatcggaatgtataccctaagcaaaactgtcaaccaggcaaagggtgttctttctcttctggcgctctgctcttcgtccctgtccccagcagcccatctgctactggaacttgttcacagagtccttctgccaacttatcatattcttgttccaggaacttttctgctttaagtaaaggatcttctcccaacgagtatgctcctgcatttgcagatacagcacagctccatgcatttgtagccctgccatattagtgtcctagccaatcataacaaatggggtggcttcaaaaagagaaatgcattgcctcacyrttctggaggttggaaaatccaagattaaggcgttggctggttgtttcctgtgaggtatctctccttgacttgtagatagatatcttctccctgtgtcttcacttggtctttcctctgcatttctctgtcccaatttcttcttcttataaggacaccggttttattggatttgggtccaccctcatcaccttatttaaccacaccatgccttaaaaggcactatcgccgaatacagtcacattctgaggtcctggggacttcaacataggaatctgtaggagactcatttgagcccacaaggactccctcctcactctctcatttctgcccatacaaaatgttatccataattcttttcccagattagaagtttaaattcagccatttctgatcatcccaatttctctccaagttcttacagcaattgtctgtagaatgtatttggcaactaattctgtactctgttgtaatttttctgttgttttttaaagtttatatctatttaaagtattttaaagggtaccttgtatatactgtacttatataagttctgtcttctcaactagaggagaactcctggatggcagcaatggtctgtcacttagcatgcccatgacagtactccagcccctaagcaggcatggagagaggggtgcacagcagaacaagtaataagatccaaccactagttacagatagcagctgggaggccagtccccagggacctggaaacatcagaagatccacccagaaaggctcaagttgatgaccctgaggattctaagggacagtaagatcccagttaggkgtgcagagcacagcagtggggaaccccaggtcagcagtggggaatcacagccatctcgagtcaggtgggcatatgcttacccagagacatttgcacctgaggaagcagagccccatcattaaataggacagaccctagactccgagaggagggtgaggcagaacaagatgggataagaaccaacagcagagcccaatcttgggaactggggcattgaggaccacatgagagccctgtgatcaccctggggcacccgtgccagtgataggtgggttaagggtatgtcagtgctgtctgccctgtatcatgactggcttgaaaaatgggtgccaaggagcctcatgtagttttcctctactcttctcatagtctaagaaagacagaaaagaggaaaggaagctgcactgtttggatttgatatgaggatgtagacagccaggccctgctaaaagctctcttaakttcgaccttctgaagaccacctcccactcttaaagcctaagccttcatgagcacaatgagacggtcctgctgccctgccacccactctgcctggtctcagggcatcctggcctgcacaccttgtgcctcttgaaaaatcccatgccatttccacttaatcacccaacccaagacccttgtattgcctcacagtgttccctgacagacacagagtgatatattctcttctgtcctggttcctgctgagaagcgaggagcatttatcctcatttggaagaatcaggactgttctaactgcatagtacctactgttgtgttttctgggcaagacaccatgccgctgtggcctcctatccacctccttcctccctggggactctcaggttgcaagtatatctggttccacaatatcaatcacatcagaacacccttgctatctagagtcacgtgatgcaccagcttcagtccaatctagaaatgacagggggaaaatcacatcaaaaggcaaagcctacaaaagtattctgtcttttcaagcccaaaagccatccaaaaccaagttcgaataagtgtagcaatggcttattgatttatctttaaaaattgcgtttcttctcctcccttgtcttcatccctgttgctaaatgcagccttatctttcttaaggaaaagagttcggctaactgaagtctcaagggatgggagggctgtggcccattaatcaaaagctgagcatcgggcagagtacttcgtgccccacagtgcctccccgagycagtcctggagtcataacagaggtgacagtggttgtaaagagcagagaaggaggagaccttgatgaatgtggtgctgaatgacagcttgaatctacaaataaggatgcccaaattcaatccgacaagtaggaaggctattaaaaagtacttctgtgaagtattttgaagatcaaagcaagcattacaaatatttaaataacaatccattgctagttttctacatactttaaaaaaaaagagtcatacttttattgggaagtaattgaataaaaactgaggtcccttgcttgctttcatctccattcccagcagcttatctggccccgtcttcctcttctgaatamcatatgcaaccctgatacctaaacttcaacaagtgagagctgacatttgtgcaacagaaattctgcctcagtatttaaagctgaatcaaaaacacatgctttcttcatcagatgtgagagaaaacaaactatttttatctctgggtataacaagtcacaagcaattcactctccagtattaacacagaaacttaatccaatattcctgacaacgaaatcattttgctgcctataatgcatccatgatgatttacaaagataaagtttaaatagtaaaaattgtattttcagagtatccactacatgccaagtttttgcacatgatatggtaaggtatgagatttcatagtcacattacaaaaaaaaattttcccagagaataaatacaacattatgggtatgagaagaggcaagtaagtcaagtctgcagggagttttgaaaaagagaaatactggaaagagctgcgctctcttgtgtgttctcctggtgttctcctgtgctcacctcttagcttgctaaacgtgaccttcccaactccaccccaatgcccatgctaggaagggcactggaaggacctggaaaatggtgttgagagaagaccgatgatggactgggarccacgggcctgggcttcattgcagttcccatctctgtacctatttaagtggccctgaacaaatcacgtgacctctcttgagccattttcctcacctgtgaaatgggattagcagatacaattgtgtacatgaaatgccttatgaggtgataaagctataaaatcatagtaggccccctataaatgctagcactctattcccatcttcatttcccctctcaaatgccatctgaataagacacaactaaaaattagatcacctttaaagtatcttcaagcactgaaagtgccatgtgcaggaagagagaaaataagtccttcactttcctttgctctttatctcacttcaggtttacatttccaggagctggtcatccccacctgaagacattcatttctctgtaattagaaagcaggtcacaaactacctgctgcaccgcggctcaggtcctgtcattcctacattcaaggtgctaggcactaaatcccaactctcagttattccccacaccacactattttctttgggttggaaatatccccacctggaaaatttgtcttagcttttaaaaatcaggcaaactacactactttgaagatttccaccaagctctctgaattgtagacagcccagaacaagagtatccaaggctggcgtttgtcatcttcctcacattggctacttacttagcaatagaaagtatattaagttatcatagttgtcctatgaaagatgctacataaaatgcagtcattatagaaaaggtgtgagtgtctgcctgtgtgtstgcgtgtgcttatataaatgatgttatgggaaagagaagtagttttgaccactggaagacagtacagcatttgaagcaaaactaagatgtaacatcatctaaggaaatatgggatgaacacctcttggcgtgggcaactactggaagtaawtgtttacaagccaaaaccacaaattcccaatcatgaacagaggtcgttttgacttcactgcaaattgaagatcaccataatacccccaaagcctggctttcacatcatacaaaggtcacacctcatgctacattgaagcatatgaaagagtgtctgcttgtgttacaaacctgatggagcagaggtggggggtgggggaaatggaagcaaaagggacagacttgaagctgtacttccagactctcatggaagctccaggtcacaatcttagttctaatttcaggttctgccagtcgagtctagacatttctggggcaccctttaagtggtctccagcagccttctaggcaggtggcttcacagggaagtccacactgcaagctcagctcaccacgactcaggctgacggggtagtcagccatgctcggaggctgaatttggcagggacttgctgccatctccctgccaaatggtctctcgtgactcagaatctcaaacttgttttaaagagaggaaaaaaagtcactttcggggatgaggttcttggcccaactctgctttatataaacacagtctatggctatttcagtcttctggattttgagaagcagctgcaaggatgaacggattggtgttggcccaaattaaaaagaagagtattcarttctttcagtgtttggagaaagaagaccaaaagcatcatctcacaggsagcagaatgtgaccagcctggctaatgaggaaatgagagggatcctcaacttgagaacccgctctactgaagtctgaacttggaaaaatggacacattgggtttggagtaagaattcttactctacaaaaggataaaattgtgatcacattgatgcatgatgcctaggatattaaaaatgcatgattaattaaatgttagtctaccttgtgttttaaagggacacacacccatgacatgaagccagcttcccgtccacgactgttgtccttactgcccaaggaaggggagcatgaaacccaccactggtcctgcgacccactgtctttggaatccaccccaggagcccaggagccttgcctgacacttggatttacttctttatcaagcatccatctgactaaggcacaaatccaacatgttactgttactgatacaggaaaaacagtaacttaaggaatgatcatgaatgcaaagggaaagaggaaaagagccttcagggacaaatagctcgattttttgtaaatcagtttcatacaacctccctcccccatttcattcttaaaagttaattgagaatcatcagccacgtgtagggtgtgaggaattccataaggcaccccagtttcttcaataagtaaatggcatttttaaaaggggaacttttatgggttaaaatattcttaagagatgtattcatcaagtatactgtacaagccttgttcatttagattgaaacaaagtgtaaaaagacatttttgaagtaattggagaaaattaagcataggctgtgtcctattagatgttagataattagatcgttattttaaattttgttggatgtgataatggcattgtccttaactggtaagtgcatatcgaagtatgtttgcaatttgctttaaagttttattgccaaaagtggggaagcaagtgtgatagatgaaataagaatggcaggcaaggccacatgccgttcttccatgtttgtgcatgtttgaaatttttcagaataaaatattttaaaagaaaaaaaaagttaggcacatttaacttgtaaaagttagtgtccctcaaattctagaacattcatagacatgaaaatcacsctgcaaaacaaaatccccttcgttcaaagagagctgctcttgcagtctctgctctctcatttctttattcactctataatattcagtgtggggttactgtgctccagcgccaagtccagggggtggagaataacaagggcagagacatagtccttgccctccaagcacctgtgatggtaatacagtgccatgggagcttggtgaagggcctcagccggctgcagagttaggcttatcaaaagtggtgatctctacggtgaatcctggaggacacaatggggtggggaacagaaacagttgttccaggcaaagaagggaggaatctgtgccaaggcccaggggctggtgaacctcaggygtgtgctgggggtgctgcctcctcccaaatgtcggggcacagggaagtcagtctcgcttatcatggtggccacttggctctacaaacccccattgcccaagtccccacaggcaaaccacacaactgctcttcttctcactcttttttttaagccaagaaagaactcactgaaacagccagtcagtcagggatgagtccaaggctttcctgacagagtgaccatgtttggcttggctgaaaatcacaaagccttggtttcccagttgcgtgattctctttgttctcaaggcttagtgcagcattacagtgggatggctaaacagagaaaaaaaaaaaaaggaggtctatttctttctcttcatacaaataaatatttgcccaagaatggaagtgcttaattcttaagaataaccaaatgctttggacttcttaacaagcaaatcatatacaaagcaattcagtgttcctactaattgagaaattgtttttagcaagaagatgttatgcagcatgtttttaaaaaacaagtttttccaacaacaacaacaacaacaaaaagaaaaaacagaaaataactgaatcactataatatccccaaaggctggctttcacaccatccaagggtcacagstcacgctacattgaagcgtatgaaagagtgtctgcttgtgttacaaacctgatggagcagaggtggggcaggggggaaatgaaagcaaaagggacagacttgaagctgcacttttgcaatcaactaacagttaggaaggacttgacttgctggggctaaggaaaacaaatctggaggttcattttgcctgtgaaattaaaattatrctttagtaaataaagctgacgccatttaaccatgaacccggtgacatttcctggcttgctgcagcgtttctgcttgtctccttgttacatttgtttaaaatacaaacacagcatttccatgttgccagagaagcaaatgtgggctgactggctgrttttagctgctatggtttttctgtaacctttaacaattgttgtgrcaaataagattccatgtaaggtgcaatttctaactgtgcagtgtttgtgaaccacatccaccttctccaggtttggtatttggtcgactaagttgacgatgtcattacctttccttccatttaaaaaaaaaagttaatctgaatcgtgctgagagtttggtatgcacgctatactattcaagggagcattctcttctgtgtcagaataatatatttatgtgtgtgaatcattatacttgaatttgtggcaacattttgtatcaatgaatatatatgacacccaggctgactacaatggcttcaaagagtttaatttctcttaaatggactcagtatccttggaatgtgctgtttaagtgtttctgaattttctacaygccatttttacaggtccatctgtttatgatgtgatgagataaacaatcacgttgattttatgtttcttttcaaagaaaatgaatgtatatagtactaagcagatgaataaattattgaaaaaatatacttcatggatcatgcccactgataaaaatgaatttattttatttgttgaacaaactgactgttcaaattataagaatttatattgtccttattaatatgaatgccatctatttaagtgttgttcaatattgatatgtgttctctaataaaatattttaaacctctttctttaaacacataacaccctagtttttcaatcatggtgtgttgttaatgtctcttgagaaatggagtgggtagygcaaagaaaattggtgtcttcagcgggctaaatgaggtagattgtaatagtttgcaaagtgtcttttgctttttggatgaataggtattaagatttattttaagactgtcttcatttatccgtttgtaagtagcatttttttgtgatagaaataactcattcattatagaaaatgtaggaaataagtaaataagtataggaagagcaaaatataaggtgcctttaagtttaccttccaaagacaacactttattattttcttcaagaatctcatttttatatcctcactttaaaaaaaatagaaagtatactgcaaaacaaataacaataaatagggtagattggacatagggtgtacaggggccgcattcaagatacgggcaaggaccagaatacacctggatcatcaggtttagaggcaggtagcaggggaaggtggtattagaagtcaggcacatggtaatgttggatgtgttcaagacaggacatattaagttacccatagccaaggcaataggttatgagggccgaggtcagagaagatcacagacaacacagctgtgttttgatgatgagttctttgatggaggttcttctctagccatgggctcagaayctgaaagcctcagggctaccctttcggccccactccctcagtgggactcctcagcaatgtggtttcctccttggggacatgaactctggagtcagattgtctggcagctgttataggctcctaattccctcaaccactcgccacttagaagatctcaagccaatgtttcaacatctccaaatcctcatttcctcttctcaaaaatgagaacaatgactactgtrcatcattagagggcttctgggctaatgaaataaaaccatgaagttaaagatttaaggaaatgcctgccgtatagttagcactcagcaattacaggttgttctttttctcagtgatcttgctagggggtttttgtggctgtcattttgactatccacaaagctgagcatctgcttcctggtgaagagggatcattattttccacccaaagtccttggcatctaagtcaactgatagtaatacaggagctaaaaagaaattatttaggcagttaggrcaaaagagctctcagtggaatttccttttaataaaaagcagccccaaaataatttcttttctaacaaaaagcagcctgaaaaatcaagctgcaggcacagataagcaagcttgaagcttgcataggtaaatgccggcagctgtaccaataaaaaagggatacctggaagccagttatattcaaaatggaggttttcccttcccttttctttgttgccacatgtgcaggtaacatggcacaggccaggtaaagacctcatttgcataataaaagattagggtgggatggccagcctcctctggtactatgtaaatagcacacctggtccaaccaatccactatgccccatgtaaatgagacaccgcctcctcaagctcatctataaaaccaaccaataaaagtggctcacacaataagaaaattgttaataccattatcaatactttggcctgaaaacatgcatctttaccaaaatgctctccagtcaaactgcctgggtttgaatcctatctagtgatttgttagaatgtttgccaatgagctctctggaaaaaaaaaacaaaattgccacatgatgtgtggcattttgtcaatttttgtggtgtaaattatcccacaatggccaaattcaaggtagcgacatgatgttgttgaacacactgttgggaagaggtgtgcacagtcagctctcaagagcctgtacaagccaacttcaacactccactgatcccacccatgccccttagcagcatgtgacctaagccaacctgagtgttcatttccttacctgtaaaacgagataataatagaagcttcctcattggaccgatacatgtaaagaatgtctgtgtagttcataataaacattcaatgagtcttaggtgttgttgttgcaattgctgttattgttaacacaatactgatgcctattggcacagatcacagacatctcagaacagcaaaagtgtccatccacacacattccctagtagatcaacttttctgagatatgtgtggcagtattacaatcctttttttggtcattacatagcacttactccttacactcacccatactgaatttgttaagtctctgcttcagacaccaaagctttggggttaactctgttcctttacttttcaattttaaacaaagtatttaatgattctatgaactagttttcttagacaaaaggcctcttaatgccaaatcatcctgccagcctattattattattaattctcctgtttataaatacaaattgccttcaacagaatttatgaaaaacaactcttttattctgttgtgtaggtggaggaaaaaatacttttttcgtactcactccccacatgttattatgttctgatccatatactcatttcagaattacatctgcacatggtaaactaaacaagtaaaagcactgcagtatcatgaggttgggatgggctctgggtttctgaatcctatcacataccacactgcaggcctcatttgcagaaactgtacctagaaggacaagagccaaatgggaaacaacttacaattttttttttttttttttgagacagagttttgctcttgttgcccaggctggagtgcaatagcacaatctcggctctccacaacctccgcctcctgggttcaagtgattctcctgcctcaacctccggagtagctgggattacaggcatgcgccaccgcacctggctaattttgtattttcagtagagatggggtttctccatgttggtcaggctggtctcgaactcccgacctcaggtgatctgcccgccttggcctcccaaagtgctggggctataggcgtgagccactgcacccagcctacaacttagaatttttatgaatcaccaggagagctgtgttgccaaaattaaagcatctctgctgagctgctctgtctcagggtttcctatacccaacttgcttgtatctaaaatatccaggtttgaggaatgccacagaaggaatgtttgtgtccctccaaaatccatatgttaaaacatctttcccattgtaaaactatttggaggtggggcctttgggaagtaattaggtcatgaggacaaagccttcatgaatgagatttttgtccttacaggaagagacccagctgggtgtggtggctcatgcctgtaatcccagcacgttcggaggccgaggccagtggatcacttgagctcaggagttcgagaccagcctgggcaacatggtgaaaccctgtctctactaaaaatacaaaaattagttgggcatggtggcacatgtctgtagtcccagctacttgggagactgaggcaggggaatggcttgaacccaggaagcagaggctgcagtgagcggaaatcatgccactgcactccagcctgggcaacagagcaagattctgtctcaaaaaaaagaaaaagaagagaccccagcccagacagcttccttgtcccttctgctatctgaggttccagcgaggagacggccacctatgaaccagaaaacaggcctttaccagataccaaatctgccaatgccttgcttttgaacttcccagcctccagagctgagagaaataaatttctgatgtgtataagccacctatttatgttattttgttacagcagcccaaatgaactaagacaaggacaaatttcaatgctcatgtgcctctagccccatgaaccaaacactaatggaaaagctgaaattgagagtagaatcatgaccaggccttcttctggaaggggggccctgatcgtaaagcaatggagataggaaatgagagaggaagagtggaatcttgcccactaagaatacatggtccaagaacaaccagccagattgtgcattcctttttgatttgggctggccatggaggagtcttaaggccaaaagatagcagtgaaagcaaaggcagaaatttcttcctctctgtgggtaaaggagcaaatacaaagagaaaagcagacagtcttcctgccctcttcatataaatgccatatgtggatataaattgaaaagtaatagtttcaccaatctctagtcctaatccctaaaggtaaccacccttaccattttattgtgagtttactcattcaatgcatagctattaaagatttattacatgccaggcatcatctttgaccacattagtgaacaaaacagaaaaacataaggcttactctatgaagctaacatgctagaacatcttccagaaatgctctatgaacatgcaaatatgtggattgcataaatatctttataaaaacagaatgagccagatattgattggttatattagatgcatctctatagatcagtgattgagccatcagcccctgattatcttagatccctgggttgttgccataacaaacacaccacaaagttaaagaaaagtccagtctcctgtcctttggaaagttatagtttgatattatgagtcctacaaaacaactttgagagcttattttagagcttctagtatttttaggggccatgagtgtgtttcaatagtgttgtcactgcctaaaacatttttgaaactgttttgagactgccttcagagtcaatttatgtgtgatacctcccctaacaaattccttatttacttattattgcaaataatactaaccttgaccacaaaacatctttctccaatacaaaaggtgacactcacctgctgaggggacagcttcagaggtcctctctggttgagtccgtaggtgactggtgccaagacattggccaggtcatcctgttggccaaatgcaagctgggagggtgaaaccactataaaaagccatgctgaataaattcagtgggaaaaattaggtcaatagtttttcaacttttttttttttttttttttagacgaagtctcgctctgtcaccaggctggagtgcagtggcatgatcttggctcactgcaacctccgcctcccgggttcaagagattctcctgcctcagcctcccaagcagctgggactacagggatgtgccaccaggccgacgccaccaggcccagctaatttttgtatttttagtagagacggggtttcaccatgttggccaggatgatctcgatctcttgacctcatgatctgcctgcctcagcctcccaaagtgctgggattacaggcgtgagccaccgtgcccggcccaactattttttttttttatcttttttaacagtgcaatcctttctgtggatgaaatcttgctcagaagctcaatatgcaaaagaaagaaaaacagcagggctggacggatgttgggagtggggtaagaccccaaccactcagaaccacccccccaacacacacacacattctctccatggtgactggtgaggggcctctagagggtacatagtacaccatggagcacggtttaagcaccactggactacacattcttctgtggcagttatcttaccttcccatagacacccagcccatagccattggttaataaaggttgtccaaatgagaaaggggatcaagtagtaaatcgctgttgaaggggtagaaggtgaggggctctcaaaagagctcagcatttaaaggaaccaactaaagagcaatggaagacccaatggtcttgatctaccaaagatcattaccaaacagtggttcgtatctgcaagaacgatttcctaaaggttaaaatccagagcagacagaagtttttgaaggctggggtaaaaaacagatggggcatcctagcactctttgaattcacaacatgaatgagtaggaggtagcccatggtctaggggaatggggtgatggtaactgatgacagaggaggagacaaatgctccattttcattttgctccctactcctccagcggagataataatcgatttgaaacctagggaagtaacccacatggattaagtggacttacatgggaagcatgacaaaggcaggtgctggggtgtggtcaggagggccttggctctgaagccacccttgagggtaccagtagaggaacaggacctgggaatgggtctctgaagtgcctaagtggtgctcttctccaccttccctgggcaagccctgaatacactgatacgtacagttagccaacactcagttatagttaccaggggcaggcattgttccaaatattgtacatatactaactcgtataatgctcccaacagaactatgaagtagtttctattgtttccctcctcttacagaaggaaaactgagggtcagtggggtttaggggtttgcaaaattttcacacacacaaaaaatgttcactccaagtgagtggcagagcttggatttgaaccaaggtactttaactccagagaccaatttcttaaccaatatgcctccctagacactagactctcagttttattcccagtaaagagtcaagttgaaggacacagcggataactgtgggcaaatgagctttgtgaggggctgccctataagcagtgcaaaaccagggtacccataccaggtggggtgtggaggagtctgcccaagggtgacacagcctgggaaagctaaaagaaactgctgctccctggaggcagctcatcccaaaaggacaaaaggggtcttagagctgagcctgccagtttatttattccagattcaccaatcgaattaagctactccttcatcatgagatggatggaagaaaagttgaggagtgggcgggacacactcaccctaacaaggagcacaaagggagataggaaaggtcagggcaatggtgtgacccaaagttgggtaggaagcaaaattcaggacaggacaaagagccagcaataaagcaaagtggagagactagatccctgcaaatggtctaaaccagcagatatcctgagattcaagaagctatgaaaggtggacccaagagctgagcaaagggtcagcaaccagggcatgcattaggtggcttcaaacaactccttaggataggcactttacacacaatgtctgatctattcttcacagtcagctcttacagcccaaagtatgttccttttacagatgaggaaactgaggcatagcacaattaagcacctgctcagtttccagctgtccaggaccagcatcatatttcttctctccatatagcacactcacttcttgcaaagaagagaaacttgctacgatgcgaaacattcaaatgctgccctaaattagaacatggcttttcaaattctccatcttgtataacaaagcacctactaaaatgtttaatatgatttttctccaaaagcacattcactacccacctttgataatattctaacatcctgaaatcgaagtacacggttttagaaacatgacagaatatctagactaagggcatccctgaacatagagttttggccactacaccagcctccaattcccaaagcaagcactgtcagtctcctatgctcagcgacattaagtatcccctaattctgtgacaccataagacagctgagacaatctgatgtttttgctttctgatgaggaagccaatgagagacccagccccagtaaaacatggacaccagtgttgaaagttattattccttttgcagctacttccagccttgctgcttggaaggctcttttaggactcagagttgaaattctccaaatagtaaatattgcttccagaaaatttcttcccagagttcatcatggtaacacattttttaattacttgcaaaatgagcaccagttaatccccttgctccctgttagccagtgactgtagagatgctgatttaatcgctgcttgccatccacatgaagggcaggggggatcctgccactctatgataaggatttcctaagggaagaaaggggctctcctctccaagctcagtcccgtgcagaccgtggggaactttgaggtttgagaagaattcgcatccatttttagaagagacatcctcacatcgtcacagtgtgcctgccactgtaaacctaaataggacatgaggacaaagccagaaagacaagaccttcatgcctcaggcacaaggtccccaggcactgctttggactgcaatcacatgagaaagactctacagaaaatgaagaaaaacaactctgacggacaagcatccttttctagtttgctacagttagaagctgtctagacaggcagtagagtcctcagcccaggcaagtaaaggccctgcatggtaccttgacattcaggaacctcatcttggatacggcaaggaattcacgaggccagagaaccaccccagctgcccttaaagatcatgtcccaggtattctaggcccaaaatttcctgcccagatggttctgagattgcctccagaatagactgaaggccatgtaggtgactactagcacacttggaaatattaagaaaatcatccctatctccctgggtgcctgtgtgttctgaatctcccatcttgttcttacctctttcctcacccagcctggagctcttgctttagacctggaccacaagagccctcagtttcctggttcagtcaccctttccctgcaaagcacagcaaaaccaatgatctgcctcaaaaataaccattgctgccactcgtggagtactccctacataccaggcaatactctgtgagataataagaaatatatttggtatttgttcctggttcctagcacagagcccctaaaacctttgtaatttctagagtgagaggagtgtcttcggtcacacctgagttcatgttaacaaggtgacttaaggtgggacccctagagagcctcaggatgtggctggttgccaggaagactaagtggtagaggatggaaacattcagcttcaccagtcaacctccaaaaaggagagagtgctggagactaagctctgttgaaaactcttaaacaacaagataggatgtgtgaacacatccaggtgctaggggcgtgctgtaacctgagagattgtggaagctctatgcacattggcctacaccttccctgtgcattccttctgttcagctgttcctgaggtgtatcctttataacaaacggataaacataaggcaaatgtttccctgagttctatgagccattatagcaaattatcaaatctaagaaggaggttatggaaattcccaatttgttgccaagtcagacagaagttgtaggtgacctggggacccaccacttgcaactggcatctgaaatggggtgcagtcttgtggggtccacactaactcctggtagcatcagaattgagttaaattatagggcacccagatggtgtccagagagttggagaatttggtagtattggaagaccaacaacaacaaaccaaagcagaatgctaaatactttccatgcactaccatttgctgtttgcagcaatattataggtggtagttattaattcacattttccatattagagaagagaggtctaaagaggttaagtaatttgctcagggtcaaaccgctagggaatccaccctgtaatacaacacctatcagtgagttcctgtctgatttaggccctcaaccacacgtgtccttgatcagcagtacaattccagctgctattctagacctttgacatgctctgtgtcagtggaagaaagacgagattcataaatttggaaaggaaagctttgattctcataaaacattgcaacatgcaggctgagaaccatagcttacaaccaaaacccagaaacaggaacttcaagggtgttttactgtaccaacccccgtaaccccacaaacacgcgtaagacagggattcatgctaaattaggtggccagatatacatattcaataagctacagaaggagtcatgaatatttatgagaggagaagcatgctcatgtgcaagtcagcttcatgcttccctgtgagactatgttaaaaaaaaatgcagccttagcatgatgcaagggtcatgcgagttttaggacctctgatgtcaaaggtgaagcagaggacacgaaagctctcactgcactcctccctagactggacagaaccaccccgttgtctgtggtctctcatcaggagggaatgtggggttgttttgtcaaaactgcaaaagggaggagcagcaccaggtggttggttgaactcagtggtgcagtcttttgaaagggctggtttctgtttagcccttggggaagaaagcctaatggtggttagcgagggatgggggacaacgagatgtgttcaacctctcatcatgtcatggctgggaatgtaatttccaaggtttatctggggtcctcttgggcaagagggggtccattaagtcagctgagggtgcttagagttttttctttctcatctgcatcccacaccaaccgcttcccctttcccatccagaagtccttcctagttcaccagcagacatgagaaggcaggtgctgttttcactgtgcccccaaccccacacatttatctaagctacatcaagaataaaataatctccaccatcatttatcagttcccatgaactttacacactatgccttattatcttttcaaaaaatcctgcagggaagcatttttttctccattttatgagcaagaaaccatggcttcctaggatattttgactttgcagtacaagttctcatattacttttttttgtcttgaaaaacttttgactagtcttaatcacttcacctactagatcaattttagtaagttagaattagcttgccatattcccagaaaaagaaataactaggatgttgattcaaattgcattagattcataaatttttttttttttttttgagacagagccttgctctgtcacccaggctggagtgcagtggcacaatcttagctcactgcaacttctgcctcccatgttcaagtgattctcctgcctcagcctccaaagtagctgagattacaggcacccatcacctggccaactaatttttaatgtttttagtagaggcagggttttgccatgttggccacgctggtctcgaactcctgacctcaggtgatctatccacctcagcctcccaaagtgctgggattacaggtgtgagccaccatgcctggccagattcatacattaatttagaggaatttgtatctctgctctgggcctctcctcctgggcaaggggacaaggctgggagtggagccagggctaggcaaggatgtggaggggctgtttcaagaacaggaggcacatccatgtgtgggtccccatacaagggacatctaccaccactacccgcaaggaaagcttcagacatcaagacaaagaggttatagaaacaaatctgaatccaaatataaggatgggcatagagagtaggtccaagctgtcaaaggggtcagagtccagaggaggagaggaatgcaggcgacgaatgcaggtgacgaggggccattgcagggaggacactacatacctgcatgtggcctggagccagcatcaacaccaccctctccctcactccatgacaaagtggtctggga
